United States Patent Application Publication US 2024/0327476 A1 - sequence listing, part 67

SEQ ID NO: 126718 - DNA, 1785 bp, synthetic construct
  misc_feature 1..1785: note = Description of Artificial Sequence: Synthetic coding sequence
  source 1..1785: mol_type = other DNA
atggtcctgctgcatgtcttgtttgagcacgcggtaggttacgcactgctggcgctgaaagaggtagaagagatatccctcctgcaaccccaggtggaggaatccgttttaaatctcgggaagttccactcgattgtgcggcttgtcgctttctgccctttcgccagctctcaggtggctcttgaaaatgccaacgccgtctcagaaggcgtcgttcacgaggacctgaggcttctcctggaaacacaccttccctctaagaaaaagaaagtcctgctcggagtgggagacccaaaaatcggggcagcgatccaggaagaacttggttacaattgtcagactggcggggtgatcgccgaaattttacggggcgtgaggctccatttccataacctcgtgaagggcctaactgacctgagcgcttgtaaagcccagctggggctgggtcatagctatagccgcgcaaaagtaaagttcaatgtgaatagagtcgacaatatgataatacagtcaatttccctcttagaccaattagacaaggacataaatactttttccatgcgggttcgtgagtggtacggatatcattttccagaactggtgaaaatcattaatgacaacgcgacttactgtcggctggcgcagtttattgggaatcggcgtgagctgaacgaagacaagctagagaaactcgaagagctgacgatggacggggctaaggcaaaagctatcctggacgcctctaggtctagtatggggatggatatttccgctatcgacctgatcaacatcgagtccttcagctctcgcgtggtgagcctctctgagtatcgacaatcactccacacttatctccggagcaagatgagccaggtcgctccatcgttaagtgcgttaattggagaggccgtgggcgcccgcctgattgctcacgctggatccctgactaacctggcaaagtatcccgccagcactgtgcagatactgggcgcagagaaggcattgtttcgagctctcaaaactaggggcaacacccccaaatatggactcatcttccatagcacattcatcgggcgagctgcagctaagaataagggacggatcagccggtatttggcgaacaagtgctctattgcgtctcgtatcgattgtttttctgaagtgcccacaagcgtgtttggtgagaaactgagggagcaggtggaagagagactgtccttctacgaaaccggcgagattcccagaaagaacctggatgtcatgaaagaagcgatggttcaggccgaagaggccgctgctgagattacaagaaaattggagaagcaggagaaaaagaggctgaaaaaggagaagaagagactggcagcccttgcccttgcctcgagcgaaaactcgagttccacccctgaggaatgcgaagagatgagcgaaaagcctaagaaaaaaaagaagcagaagccccaagaggtgccacaagagaatggcatggaagacccaagcatctcattttccaaaccaaaaaaaaagaagtccttttctaaggaggagttaatgtcttctgaccttgaggagactgccgggtccacaagtatcccaaaacgtaagaaaagcacacccaaggaagaaacggtcaacgaccccgaggaggctggccaccgttcaggtagcaaaaaaaaacggaagttcagcaaagaggaacccgtgtcaagcggcccagaagaagcggtgggtaagagtagctcaaaaaaaaagaagaagttccacaaagcctcccaagaagactag

SEQ ID NO: 126719 - DNA, 678 bp, synthetic construct
  misc_feature 1..678: note = Description of Artificial Sequence: Synthetic coding sequence
  source 1..678: mol_type = other DNA
atggacatatctgctatagatctgattaatatcgaaagtttttcttctcgggtggtgagcttgagcgaataccgacagtctttgcacacctatctgagatcgaagatgtcacaggtggctccctcactctcggctctgatcggagaggccgtaggcgcccggttgatcgcgcacgcaggatcactgaccaacctggccaaataccctgcgtccacggtgcagatcctgggggccgagaaagcattatttagagccctcaagacccggggaaacacgcccaagtatgggcttatctttcacagtacttttatcggtcgggcagccgctaagaacaagggacgcattagtcggtacctggccaacaaatgttccatcgccagccgcatagactgcttttcagaggtgccaacttccgtctttggggaaaagctacgtgaacaggtggaagaacgtctttcattctatgagacaggggaaattcctcgaaagaatctggatgtgatgaaggaggccatggtgcaggctgaggaagcagctgccgaaattacccgcaaattagagaagcaagagaagaagaggcttaagaaggaaaagaaacggctggcggctctcgccctggcttcatcggaaaatagttccagcacacctgaagaatgcgaggaaggggaccgctgctag

SEQ ID NO: 126720 - DNA, 660 bp, synthetic construct
  misc_feature 1..660: note = Description of Artificial Sequence: Synthetic coding sequence
  source 1..660: mol_type = other DNA
tgactgatcaacattgaatcctttagctcaagagtcgtgagcctttcagaataccggcagtctttgcatacttatttgagatccaaaatgtctcaggtggcccctagtcttagcgcactgattggggaggccgtgggggcgaggcttatcgcacatgcaggttctttgacgaatcttgcaaagtatcctgcatctacggtgcagatcctcggcgccgaaaaagctttgtttcgcgcgttgaagacgaggggcaacaccccaaagtacggactaatttttcactcgacgtttatcggaagggccgccgctaaaaataaggggcgaatttctcggtacctggctaacaaatgttccatagcttcacgcattgactgttttagcgaggttcccacaagcgtcttcggcgagaaactccgcgagcaagtcgaagaacggctgagcttctacgagaccggggaaattcctcgaaagaacctggacgtgatgaaggaagccatggtgcaagctgaagaggctgccgctgagatcacgcgaaagctggaaaaacaggagaagaaacggctcaagaaagaaaaaaaacggttagcggccctcgcactggcatcctctgaaaatagctccagcacaccagaagagtgcgaggagggggatcggtgctag

SEQ ID NO: 126721 - DNA, 846 bp, synthetic construct
  misc_feature 1..846: note = Description of Artificial Sequence: Synthetic coding sequence
  source 1..846: mol_type = other DNA
atggtccttctgcatgtgctctttgaacacgcagtgggctatgctctgctcgcattaaaggaggtcgaggaaatctcccttttacagccacaggtggaggagtccgtgcttaatttgggcaaattccactccatcgtgcggctggtggccttttgccctttcgcaagcagtcaagtcgcgctggagaatgcaaacgctgtctcggagggcgtcgtgcacgaggacttgagacttctactcgagacgcatcttcccagtaagaaaaagaaagtcctgttgggggtgggggatcccaagataggagccgcaatccaggaggagttggggtacaactgccagaccgggggggttatagccgaaattctgcgaggggttcggttacatttccacaatttggtgaaaggtctgaccgatctcagtgcttgtaaagcacagttgggtcttggacactcttactcaagagcaaaggtgaagttcaacgtgaacagagtggataatatgataatccagtcaatctcactcctggatcagctggataaggacattaacacctttagcatgcgagtgagacagtccaggtgtggcgagggcaaggcagttgcactgtggttcctgatgaagcagctaggccaaggcgtcaccgttgccctctgcagggagtggtatggctaccacttccccgagctcgtgaagatcatcaacgacaacgctacatactgccgtcttgctcagttcattggtaatcgaagagagttgaatgaggacaaactggagaagctggaagagcttactatggacggggctaaggctaaggccatcctcgatgcgtcaagaagcagcatgtag

SEQ ID NO: 126722 - DNA, 402 bp, synthetic construct
  misc_feature 1..402: note = Description of Artificial Sequence: Synthetic coding sequence
  source 1..402: mol_type = other DNA
atgagaaaacacgtgctcgccgcatccttttcaatgctgtccctgctggtcattatgggcgacaccgacagcaaaaccgattcatcatttattatggacagtgaccctaggcgatgtatgcggcaccactatgttgactccatttcccaccccctctacaagtgcagctcgaagatggttctgctcgcccggtgcgaaggccactgctctcaagcttccaggagcgagcctttggtgtcctttagtaccgtgctgaagcagccgttccgatcatcttgccactgttgccgtcctcagaccagcaagctgaaagcactgaggttgagatgctcgggtggcatgagacttacggctacatatagatacatacttagctgccactgcgaagagtgcaactcctag

SEQ ID NO: 126723 - DNA, 7416 bp, synthetic construct
  misc_feature 1..7416: note = Description of Artificial Sequence: Synthetic coding sequence
  source 1..7416: mol_type = other DNA
atgccagctctaagaccggccctgctctgggcactgctcgccctgtggctctgttgcgccgcccctgcccatgctcttcagtgtcgcgacggctacgagccatgcgtgaacgaagggatgtgtgtgacttatcacaacggcaccggatattgcaagtgtcccgagggctttctgggggaatattgccagcacagggatccctgcgagaagaatcggtgtcaaaacggaggcacttgcgttgcccaggctatgctcggcaaggccacttgccggtgcgccagcggttttaccggggaggattgccagtattccacaagccatccttgcttcgtcagccgaccatgcctgaacggcggcacctgccatatgctgagtcgcgacacatatgagtgcacctgccaggtgggcttcacaggaaaagagtgccagtggacagatgcctgcctgtcacacccatgtgcgaacggcagcacatgtacaacagttgcaaatcagttttcctgtaagtgcctcacaggattcacggggcagaaatgcgagactgatgtaaacgaatgtgacatccccggtcactgtcagcacggaggaacgtgtctcaatctaccgggatcctaccaatgccagtgtccacaaggcttcacaggacagtactgtgactctctgtacgttccgtgcgcaccttcaccctgcgtgaacggggggacctgccggcagaccggagactttacctttgagtgcaactgtttgcctgggtttgagggctcaacctgtgaaaggaatatcgacgactgcccaaatcatcggtgccaaaatggaggcgtatgtgtggacggtgtaaacacttacaactgcagatgccctccacagtggaccgggcaattctgtactgaggacgtggacgaatgtctccttcagcctaatgcatgccagaacggcggtacgtgtgccaacagaaatgggggctacgggtgcgtttgcgtgaacggctggtccggggatgactgtagcgagaacatagacgactgtgcttttgcatcttgcactcccgggtcaacatgtattgatcgagtagcatctttcagttgcatgtgcccggaaggaaaggccggtctcctttgccaccttgacgatgcctgtatctccaatccctgccataaaggagctctttgtgatacaaaccctcttaatgggcaatacatatgtacctgccctcagggctacaagggggcagattgtactgaagatgttgatgaatgtgcaatggccaacagtaacccatgtgagcacgcaggaaagtgtgtcaataccgacggggcgttccactgtgaatgcttgaaggggtacgccggacctcggtgcgaaatggatatcaatgaatgccatagtgatccatgtcagaatgatgctacttgtcttgacaagataggtggcttcacctgtctctgcatgccaggttttaaaggggtccactgtgagctggagatcaatgagtgtcagtctaacccctgtgttaataatgggcaatgtgtagacaaagttaatcggtttcagtgtttatgcccacctggatttactggtccagtatgccaaatcgatattgatgactgttccagcactccctgtctcaatggggctaagtgtatcgaccatcccaacggctacgaatgccagtgtgctactggctttactggagtgttgtgcgaagagaacattgataactgcgatcccgacccttgtcaccacgggcaatgccaggatgggatcgactcatacacctgcatatgcaatcctgggtatatgggtgccatttgctcggaccaaattgacgaatgctactcctccccttgcctgaacgacgggcgatgcattgacctggttaatggttatcagtgtaattgccagcccggcacctcaggggtcaactgtgagatcaacttcgatgactgtgcctccaatccgtgcatccacggaatctgcatggatggcatcaacagatattcgtgcgtgtgttctcccggtttcacaggtcagcgctgtaacatagacatagacgagtgcgcttccaatccctgcaggaaaggagccacatgcatcaacggcgtgaacgggttccgatgcatctgcccagagggcccccaccacccatcctgctactcccaggtgaatgaatgtttgtcgaatccttgtattcatggaaattgcacggggggcctctcagggtataagtgtttgtgcgacgccggctgggttggcatcaattgtgaggtggacaaaaacgagtgtttaagcaacccttgccaaaatggcgggacgtgcgataatttggtcaacggttatcgatgcacatgtaagaaagggtttaagggatacaattgccaggtgaacattgatgagtgtgcttccaatccctgtctgaaccagggtacatgttttgacgacatcagtggatacacttgtcactgtgttctcccatacaccggcaagaattgccaaacggtcttagcaccatgttcccctaacccctgtgaaaacgcagctgtgtgcaaagagtcgccgaattttgagtcctatacttgcctgtgcgctcccggctggcaagggcagcggtgcactatcgacatcgatgagtgcatctcaaaaccatgcatgaatcacggtctttgtcataatactcagggtagctatatgtgtgagtgtccacccggctttagcggcatggattgtgaggaggatattgatgattgtcttgctaatccttgtcagaacggcggctcttgtatggacggggtcaacacatttagctgcttgtgtctacctggcttcacgggagacaaatgtcagaccgacatgaacgaatgtctgtctgagccttgcaaaaacgggggcacctgcagcgactatgtgaatagctacacgtgtaaatgccaggccgggttcgacggtgtacactgtgaaaacaatataaatgagtgtactgagtcctcatgtttcaacgggggaacttgtgtggacggaattaattctttcagctgtctgtgccccgtgggcttcaccgggagtttctgtctgcacgaaatcaacgaatgttcctctcacccctgtctgaacgagggaacctgcgttgacggccttgggacatataggtgtagctgtcctctcggttataccggcaagaactgccaaactctcgtgaacctgtgttctagaagtccctgtaaaaataaaggaacatgtgtccagaaaaaagcggaaagtcagtgcctctgtccctctggctgggcaggagcctattgtgacgtgccaaacgtgtcttgcgatatcgccgcctcgagaaggggggtccttgttgaacatttgtgccaacattctggggtgtgtatcaacgccggaaacactcattattgtcaatgccctttaggctatacaggatcttactgcgaagagcaactcgatgaatgcgcatcaaacccttgtcagcatggcgcaacgtgctccgacttcattggtggatacaggtgcgagtgcgttcccggctaccagggcgtgaactgcgagtatgaggtcgatgagtgccagaatcaaccgtgtcaaaatggggggacgtgtatagatctcgtgaaccattttaagtgcagctgcccccctgggacacgaggcctcctgtgtgaagagaatattgatgattgtgcacgcggtccacactgcctgaacggtgggcagtgcatggaccgcatcggtggatacagctgtcgctgtctacccggctttgcaggggagcggtgcgagggtgacattaatgaatgtctctccaatccctgcagcagcgagggcagcttggattgcatccagttaaccaacgactatctgtgtgtgtgtcgatcagcttttactggccggcattgcgagacgtttgtggacgtgtgtcctcaaatgccgtgcctcaacggcggcacctgtgccgtcgcctctaacatgcccgatggatttatctgtagatgcccaccaggcttctcaggcgccagatgtcaatcatcatgtggacaggttaaatgtaggaagggcgagcagtgcgtacatacagcatcaggccctaggtgtttctgcccgagtcctagagactgcgagtccggctgcgcatctagtccttgtcagcacggtgggtcatgtcacccacaaaggcagcccccctattactcctgccaatgcgcccctcctttctctggcagtagatgtgaactgtatacagcccccccctccactccccccgccacatgtctgtctcaatactgcgctgacaaggcccgagacggcgtttgtgacgaagcgtgtaactcccatgcctgtcagtgggacggaggagactgcagtctgactatggaaaacccatgggctaattgttcttcccccttaccatgttgggattatattaataaccagtgcgacgagctgtgcaatactgttgaatgcctattcgacaatttcgaatgccagggtaactctaaaacgtgcaagtacgataagtactgtgcggaccactttaaagacaatcactgtgaccagggctgcaattccgaggaatgcgggtgggacggtctcgactgcgcggctgatcagccagaaaacctagcggagggaacattggtgatcgtagtgctgatgccccccgagcagcttttgcaggacgcccgctccttcttgcgtgcacttggcacattgttgcacactaatctacggattaaaagagacagtcagggtgagctcatggtatacccctactatggcgagaagtcggcagctatgaaaaagcaacgaatgaccagaagaagtttgccgggcgaacaggaacaggaggtggcgggctcaaaagtcttcttggaaatagacaatagacagtgcgtccaggacagcgaccattgcttcaagaacacggatgcagccgcagctctcttggccagccacgcgatccagggaacactcagctaccctctcgtgtctgttgtttctgaatccctgactcccgaacgtacccagttgctgtacctcctagctgttgccgtcgtgatcattctatttatcatccttctgggggtgattatggcgaaacgtaagagaaaacacggatccctgtggctgcccgagggattcactctgaggcgcgatgcttccaaccataaacgccgtgaacccgttggacaggacgccgtcggcttaaagaacctgtcggttcaggtgtctgaggcaaacctgattggcacaggaacgtctgagcactgggttgatgacgagggcccccagccaaagaaagtgaaagctgaggatgaagctctgctgtcagaggaagacgaccccatcgatcgcagaccatggacccagcaacacctggaagctgctgacatccgccggactccaagcttggcgttgacccccccccaagctgagcaggaggtggatgtattggacgtgaatgtccggggaccagacggctgcactcctctgatgctggcatccctcaggggaggatcttccgatctttcagacgaggatgaggacgcagaggacagcagcgctaacatcatcaccgacctcgtctatcaaggcgcatccttgcaagcccagactgacagaactggcgagatggccctacacctcgcggcccgatactcacgggccgatgctgccaaacggctgcttgatgcaggagcagatgcaaacgcacaggataacatggggcggtgtcctcttcatgccgccgtggcagctgatgctcaaggggtcttccagatccttattcgcaatcgggtcaccgatttggacgctaggatgaacgatggaacaacccctctgatccttgcggctcggctcgccgtcgaaggcatggtcgctgagcttatcaactgtcaggcagatgttaacgctgttgacgatcatggcaagagtgctctgcactgggctgcagcggtgaacaatgtggaagcaactctgttgctgttaaagaatggggctaacagagacatgcaggataacaaagaggagactcccctgtttctggcggcgcgagaaggttcgtacgaggccgccaaaatactactcgaccacttcgcaaatcgagatataaccgaccacatggacagacttcctagagacgtcgctcgcgaccgaatgcaccacgacatcgtacgactgttagacgagtacaatgtaactcctagccctccaggcacagtgctgaccagtgctctgtctcctgtgatctgcggacccaataggagttttctttctttgaaacacacaccaatgggaaagaaaagcaggaggccttccgcaaagtcaacgatgccaacatctctaccgaacttggccaaggaggccaaggacgccaaagggtcaaggcggaagaagagcttgagcgagaaggtgcagctcagcgagtccagtgtcacactctcccctgtcgatagcttagagtcgccccatacttacgtgtccgacacaacctcatcacctatgatcaccagccctgggatcctccaggcttccccgaaccccatgctcgcaactgctgcgcctccggccccagtccacgctcagcacgctctgagtttcagcaatctgcatgaaatgcaacccctggcccatggcgcaagcaccgtgctgcctagcgtgtcacagttattatctcaccatcacatcgttagtccaggctcaggcagtgctggttctctttcccgccttcaccctgtccctgtgcccgctgactggatgaatcggatggaagtgaatgagacacaatacaacgagatgttcggtatggtgctggccccagcagagggcactcaccccgggatagccccgcaatcccgcccccccgaagggaagcatatcacaacccccagagaaccactgccccccatcgtcacctttcagctaatacccaaaggatcaatcgcccagcctgccggagcgccacagccacaatccacctgcccccccgccgttgcgggtccattaccaactatgtaccagatcccagaaatggctcgtcttcctagtgtggccttcccgaccgctatgatgccccaacaggatggccaggttgcccagactattttgcccgcatatcacccgttcccagcctccgtgggaaagtatcctacaccacctagccagcactcatacgcatctagtaacgccgcagagcgaacccctagccacagtgggcatctacagggggagcacccctacctaacacccagtcccgagagcccagatcagtggtcttccagcagtccccacagtgcttccgattggtccgacgtcaccacaagtcctacccccggcggggctgggggggggcaacgcggaccaggtactcacatgtcagaaccgccccacaataacatgcaggtttatgcatag

SEQ ID NO: 126724 - DNA, 711 bp, synthetic construct
  misc_feature 1..711: note = Description of Artificial Sequence: Synthetic coding sequence
  source 1..711: mol_type = other DNA
atgtgtgtgacttatcataatgggaccggttattgtaagtgtcccgaaggcttcctgggcgaatactgtcagcaccgggatccctgcgagaaaaaccggtgtcaaaacgggggtacatgcgtcgcccaggctatgctggggaaggcgacctgtcgatgcgcctccggttttacaggagaggattgtcagtatagtaccagccacccttgcttcgtgagccggccgtgcctgaacgggggtacctgccacatgttaagtagagatacatatgaatgcacttgtcaggtcggattcacaggcaaagagtgccaatggacggatgcttgcttgtcgcatccttgcgcaaacgggtccacttgtaccaccgtggccaatcagttttcctgcaagtgtctgactggcttcactggtcaaaaatgcgagacggatgtgaatgagtgtgacataccgggacactgccagcatggcggcacctgtctgaatctgcccggatcatatcagtgccagtgtccccagggatttaccggccaatactgcgactcactgtacgtgccttgcgctccatctccatgtgtgaatggtggcacttgcaggcagaccggcgacttcaccttcgagtgcaattgtcttcctgagaccgttcgtcgagggacggagttatgggaaagagacagacaggtgtggaatggtaaagagcatgatgaaaattag

SEQ ID NO: 126725 - DNA, 720 bp, synthetic construct
  misc_feature 1..720: note = Description of Artificial Sequence: Synthetic coding sequence
  source 1..720: mol_type = other DNA
tgcagagacggctacgaaccatgcgttaacgagggtatgtgcgttacatatcacaacggtacagggtactgtaagtgccctgaaggattcttgggcgagtactgtcagcacagggacccttgtgaaaagaaccgctgccagaacgggggaacatgtgtggcacaagccatgttgggtaaggcaacttgcagatgtgccagcgggttcaccggcgaggattgtcaatactcgaccagtcacccctgtttcgtgagtcgcccctgcctgaacggtggaacgtgccatatgctcagtagggatacgtacgagtgcacctgtcaggtggggtttacgggtaaggaatgccaatggacggatgcatgcttatcccacccctgcgccaacggaagtacatgtacaacagtcgccaatcagttctcctgcaagtgcctaacggggtttacagggcagaaatgtgagacagacgttaatgaatgtgacattcctggacattgtcagcacggcggtacctgtttgaatttgccagggtcatatcagtgccaatgcccgcaggggttcaccggtcaatactgtgatagcctttacgtaccctgcgcacccagcccttgcgtcaacggtggaacgtgtcggcagaccggtgatttcaccttcgagtgcaattgccttccggcatgctggccccgcacaccggacctgagacttcttctcggtgagaagtag

SEQ ID NO: 126726 - DNA, 672 bp, synthetic construct
  misc_feature 1..672: note = Description of Artificial Sequence: Synthetic coding sequence
  source 1..672: mol_type = other DNA
atgtggatctgtccaggcggagggggcggaggtgggggagggggcgacagagaggatgcacggccgcccctgtgctgtgggagatgttggaggtccggatgcgccgcaagaccccctagaatggtctctatcggactgcgcggagcagtgaggggcgctagagggtgccacctcggaagaccctttagtccaagcgtgctattatgtgttgggcggcccgggtctgccgctggggcagaaaggggacacagtcttggctcccaagagttcggtcatcgcagaggaccattgccctggtgtcctgcaaatagacggggatcgccaccatcggcaccccggggccctgggcctcttactcgactcttgggaagacgggaggctgggagtaagagccaaaaactattatttcggagcgctcgggtgcagggcgggggtcagttttgcccttccggcagcgcttttctgggcgttgaaagggaacctactgcagggttgggcggagcagaacgccgtaatgctcgattctggaggggggagagaggccagggtcggcaagccaagcgaccggcaccctcccagcctgcctccccgctgcctgggggaggcacttgggccggctgtgttgggctggtctggatgggcaccggcttttgtggcgcccccgaattttag

SEQ ID NO: 126727 - DNA, 2592 bp, synthetic construct
  misc_feature 1..2592: note = Description of Artificial Sequence: Synthetic coding sequence
  source 1..2592: mol_type = other DNA
atgtgcgtcacatatcacaacggcacaggatactgcaaatgtcctgagggcttcttaggcgagtattgtcagcatcgcgacccttgcgagaagaatagatgccagaatggggggacatgcgtggctcaggccatgctgggcaaagccacttgccgctgtgcgagtggctttacaggagaagactgccagtattcgaccagccacccgtgcttcgtttctcgaccctgcctgaatggagggacctgtcatatgctgtccagggatacctacgagtgcacttgtcaggttggtttcactggaaaggaatgccagtggaccgatgcctgtctgagccacccatgtgcaaatgggtccacgtgtactacagtggccaatcagttttcttgtaagtgtcttacaggcttcacaggccagaagtgcgagactgacgttaacgagtgcgacataccaggccactgccagcatggcggaacatgcctgaatctccccggttcctaccagtgccagtgcccccagggctttaccggtcaatactgcgactcactctacgtaccgtgtgcgccgagtccgtgcgttaacggtggaacctgtagacagactggcgacttcacattcgagtgtaattgtttgcccggtttcgaaggcagcacttgtgagcgtaacatagacgactgccccaaccacagatgtcagaacggaggcgtctgtgtcgatggagtcaatacctacaactgccggtgtcctccccagtggactggccaattttgtacagaggatgtggatgaatgcctgctgcagccaaatgcctgtcaaaatgggggtacttgcgcgaacagaaacggaggatatggatgcgtctgcgttaatggttggtccggtgatgactgctccgaaaacatagacgattgcgcctttgcatcctgtacccccggtagtacctgcatagacagagtggcgtcattttcctgtatgtgcccagagggcaaggcaggtctgctctgtcacctggacgacgcatgcatcagcaacccatgccacaaaggggctctgtgtgatactaatccccttaacgggcagtacatttgtacttgtccccagggctataagggggcagactgcacagaagacgtcgatgagtgcgcgatggctaactcgaatccctgcgaacacgcgggcaaatgtgtcaataccgacggcgccttccattgcgagtgcctgaaaggctatgctgggcctcggtgcgaaatggacattaatgagtgccacagcgacccgtgccagaatgacgccacttgtttagacaaaattggtggctttacatgtctgtgtatgccaggattcaaaggggtacactgcgaattagagataaacgagtgccagtcaaatccctgcgtaaataacggacagtgcgtcgacaaagtgaaccgattccagtgcctctgtccccctggtttcacaggtccggtgtgccagatagatatcgatgattgcagttcaactccatgtctgaacggcgcaaaatgtattgatcaccctaatggttacgaatgccagtgtgccacaggcttcaccggagttctttgcgaagaaaacatcgataactgcgacccagatccatgtcaccacgggcagtgtcaggatgggattgactcatacacctgcatttgtaatcctggctacatgggtgctatctgcagtgaccagatagatgaatgttattccagcccctgtttgaacgatggtcgctgcatagacttagtgaacgggtaccagtgcaactgtcagccaggcacctcaggggtgaactgcgagatcaattttgatgactgcgcctcgaacccatgtattcatggcatttgcatggatggcattaatcgatactcctgcgtgtgttcccctggcttcaccggacagcggtgcaatatcgatattgacgaatgcgcctccaatccatgtcgtaaaggcgccacatgcattaacggtgttaatggtttccggtgtatatgtcctgaaggacctcaccacccctcatgttacagccaggttaacgagtgtctgtcaaatccttgcatccacggcaactgcaccggggggttgtcaggttataagtgcctctgcgatgccgggtgggttgggatcaattgtgaagtggacaaaaacgaatgcctgagcaacccctgtcaaaacgggggaacctgcgataatctggttaatggataccggtgtacttgtaaaaaaggatttaagggctataactgtcaggtgaatattgacgaatgcgcttccaacccatgcctgaaccaggggacgtgcttcgacgacatctccggatacacgtgccactgcgtgctgccttacacagggggcagctggaggtaccagcaaggcccagagggcatcctggacttagcgcttagcgtgccggaaagccagtgccctggactttgggggtgcaatgcccccccaagggctcatagcagcgtggtcctgcccgcttttaccgactggatcctttccttcgaagaaactctctggcctcctaagatgcaggttgtggactcccaccttccaacattgtacttttctatctag

SEQ ID NO: 126728 - DNA, 6966 bp, synthetic construct
  misc_feature 1..6966: note = Description of Artificial Sequence: Synthetic coding sequence
  source 1..6966: mol_type = other DNA
atgggtccaggggctcgcgggagaagaagaagaagaagaccaatgtcaccacctcctcctccaccccccgtgagggctctgcctttgctgttgctcctcgccggccccggcgctgcggccccaccgtgccttgacgggtcgccgtgcgccaacggtgggagatgtacccagctaccgagcagagaagctgcatgcttatgcccgcctggctgggtgggagagaggtgccagctggaggacccctgtcacagcggcccctgcgctggtaggggtgtgtgccagagttcagtggtggccggcaccgctagattctcttgccgatgccctagaggctttagggggcccgattgttccttacccgacccgtgtctctcctcaccctgcgctcacggtgcccgctgttctgtgggccctgacggtagattcctgtgtagctgtccccctgggtatcaagggagatcatgccggtcagacgttgatgagtgccgcgtgggagaaccgtgccggcatgggggtacctgtctcaatacacccggcagtttcaggtgccagtgccctgctgggtatacaggacctctgtgcgagaatccagctgttccttgcgctccatcgccttgtcgaaatggagggacctgtcgccaaagtggagacttgacctatgattgtgcctgcttgcccggctttgaaggccagaattgtgaggtgaacgtagacgactgtcccggccacaggtgcctaaacggcgggacatgcgtggacggcgtgaacacatacaactgtcagtgccccccagagtggaccggtcagttctgcaccgaagatgttgatgaatgccagctgcagccaaatgcatgtcataatggagggacttgctttaatactcttggtggtcattcctgtgtctgcgtaaatggttggaccggagagagttgctctcagaacatcgatgattgtgccacagcagtctgctttcatggagcaacctgtcacgatagagtggcctccttttactgtgcgtgtcccatggggaagacgggtctactgtgccatcttgatgacgcctgtgtgtctaatccatgccacgaggatgccatatgcgatacaaatcctgtgaatgggcgcgccatttgtacctgtcctcccggttttacgggtggtgcatgtgatcaggatgtcgacgagtgtagcattggcgcaaatccctgcgagcacctcgggcgctgcgtgaacacccagggctcattcctttgccaatgcggtagagggtacaccggtccacggtgcgagacagatgtgaatgaatgcctttccgggccgtgccgaaaccaagctacatgcctggacagaatagggcagttcacctgtatctgcatggctggttttacaggaacctattgtgaggtggatattgatgaatgccaatctagcccatgtgtgaatgggggagtgtgtaaagaccgcgttaatggattctcctgcacctgcccctctggcttctctgggtctacctgccaactggacgtggacgagtgcgcatctactccatgcagaaacggagcaaaatgtgtggatcagcctgatgggtacgaatgccggtgcgccgagggcttcgagggaacgctgtgcgaccgcaacgtggacgattgctctccagacccctgccaccatggtagatgcgttgacggcattgctagcttctcatgcgcctgtgcccctggatatactggaactcggtgcgaatcccaagtggatgaatgtcggtcgcagccctgtagacacggtggaaagtgcttagacctagtcgacaaatatctttgccgctgtccaagtggtaccacgggcgtgaattgcgaggtgaacatagacgactgcgcctctaatccctgcactttcggcgtttgcagggacggtataaaccgctacgactgcgtgtgccagcctgggttcaccggacccctttgcaacgtggagatcaatgaatgtgcttcatcgccatgtggtgaaggaggcagctgtgtggacggcgagaacggttttcgttgtctgtgtccccctgggagtctgcctcccttgtgcctccccccaagccatccctgcgcccacgaaccttgtagtcacggcatttgctatgatgctcctggcgggtttcggtgcgtgtgtgagcctggatggagcggtcctagatgcagccagtctcttgcaagggatgcctgtgaatctcagccctgccgggctggagggacatgttcttccgacggaatgggcttccactgcacgtgcccaccaggagtccaaggccggcagtgcgaactcttaagtccatgcacccccaatccttgtgaacacgggggaagatgtgagagtgcccctgggcagctaccagtatgctcttgtcctcagggctggcaaggccccagatgtcagcaggatgtggatgagtgtgcgggccccgccccctgtgggcctcacggtatatgcactaacctggccgggtcattctcatgtacttgccacggtggctacacaggtcccagctgcgaccaggatataaatgattgtgaccccaatccttgtctaaacggagggtcatgccaggacggtgttgggtcattcagctgttcctgcctgcctggattcgcaggccccagatgcgccagagacgtggacgagtgtttgagcaatccatgtggcccagggacctgtacggaccacgtggctagctttacctgcacctgtcctcccggttatggcggattccactgcgagcaggacctgccagactgctcccctagctcatgctttaatggtgggacctgcgtggacggggtaaatagcttcagttgtctatgtagacctggatacaccggtgcccattgtcagcatgaggccgatccttgcctgtcaagaccgtgcctgcacggcggggtctgtagcgctgcccaccccggtttccggtgcacctgtctggagagttttactggtccacagtgccagacgttggtcgactggtgttctaggcagccttgtcagaacggggggaggtgcgtgcagacaggggcgtattgtctgtgcccccccggctggagcggaagactgtgtgacatccgctcactgccttgtagggaggccgcagcccagattggcgtgcggttggaacaattgtgtcaagccggcggacaatgcgtggatgaggattcttcccactattgtgtgtgccccgaaggcaggacagggtcccattgtgagcaggaggtagatccttgtctggctcagccatgtcaacacgggggcacgtgcagggggtatatgggcggttatatgtgtgagtgtcttcccggctacaacggagacaattgtgaggacgatgtggatgagtgtgcctcccagccatgtcagcatggaggcagttgtatcgacctggtggcccggtatctgtgtagctgcccacccgggaccctgggtgtgctttgcgaaatcaatgaagatgactgtggacccggcccccctctcgactccggcccaagatgtctccacaatggcacctgtgtcgaccttgtcggtgggtttcgctgcacatgcccacctggctatacaggacttcgttgtgaggctgacatcaatgaatgccggagcggggcttgccatgcagcccacaccagggactgccttcaggacccaggaggaggctttcgttgcctgtgtcacgcaggcttcagtggacccaggtgtcagaccgtactaagcccatgcgaatcacaaccctgccagcacggtggccagtgtagaccatccccaggtcccggaggcgggttgacattcacctgccattgtgcccagcctttttggggcccccgctgtgaacgcgtggctaggtcgtgcagggaactgcagtgtcctgttggcgtaccatgccagcaaactccccgcggcccaaggtgtgcctgtccccctgggttatctgggccgtcatgtagaagctttcccggatcgcctccaggtgcgtctaatgcctcctgcgccgcagccccatgcctccacgggggctcgtgcaggcctgcaccactggcccctttttttagatgcgcctgcgcccagggttggacaggacctaggtgcgaagcccccgccgccgcaccagaggtgtcagaagagccacgatgcccccgggcagcttgtcaggctaagcgtggggatcagagatgtgatcgcgagtgcaactctccaggctgcggttgggatgggggcgactgctccctctcggtcggggacccgtggcgacagtgtgaagccctccaatgctggcggctcttcaataactccagatgcgaccccgcttgctcttcccctgcttgcttgtatgacaatttcgattgccacgccggcggcagggaaagaacatgtaatcctgtctatgaaaagtattgtgccgaccactttgctgacgggagatgtgaccagggttgcaatacagaggagtgcggctgggacgggctggattgcgccagtgaggtgcctgccttacttgcccggggggtgcttgtcttgacagtgctcctgcctcccgaagagctgctcaggtcttcggccgattttctccagaggctgtccgccatactccgcacatcactaagattccggctggacgctcacggccaagctatggtgtttccctaccatagaccctcccccggcagcgagccacgcgcaagaagggagctggccccagaagtcataggcagtgtggtgatgctggaaattgataatagactctgtttgcagagccccgaaaatgaccactgtttccccgatgcacagagcgccgcagactacctcggtgcactgtccgctgtcgaaaggttagactttccatatccactgagagatgtcagaggagaacccttggagcccccggagccgtccgtacccctgctccctttgctggtggccggtgctgttctgctactcgtcatcctggtgctgggcgtgatggtggccagacggaaacgcgagcatagtactttgtggtttccagagggttttagtctgcataaggatgtggcctccggtcacaaaggacggagagaacctgtgggtcaagacgcgttaggcatgaagaatatggccaagggcgagagtctgatgggggaggtggctaccgattggatggatacagaatgccccgaagcaaaacgcttgaaggtggaagagcccgggatgggtgcggaggaagccgttgattgccggcagtggacgcagcaccacctggtagctgctgatattcgcgttgcccccgcgatggctctgacacccccccagggggacgcagacgccgatggcatggacgtgaatgtgcgcgggcccgatggcttcacacctctgatgctcgcaagcttctgcggaggcgctctggagcccatgcccaccgaagaagatgaggctgatgatacctccgctagtatcatatcagatctaatctgtcaaggagcccagctcggtgcccgaaccgaccgcaccggggagactgctttgcatttggccgcgaggtacgcaagggcagacgcagccaaaagattactagacgctggggctgatacaaacgcccaggaccacagcgggcggactccattgcatactgccgttactgccgatgcgcagggtgtatttcagattctcattagaaatcgttcaaccgatctcgacgcgaggatggcagatggctcgaccgcacttattttagccgcccgactggcagtggaaggcatggtggaagaacttatcgcttcccacgccgacgttaatgccgtcgacgagctgggtaagtctgctctacattgggccgccgccgtcaacaacgtggaggctaccttggctctcctgaagaatggcgccaacaaagacatgcaggacagcaaggaggagacacccctgttcctggctgccagggaggggtcctacgaggcagccaagctgctcttagaccactttgctaatcgagagatcacagaccacctggacaggcttcccagggatgtggctcaagagcgccttcaccaggatattgttcgactgctcgatcaaccctcaggacctcggtcaccccccggacctcatggtctggggcctctgctgtgtcctccgggagctttccttcctggcctaaaggctgcacagagtggatcaaaaaagagccggcgcccccctggaaaggccgggctcggcccgcagggtcctagaggtagaggcaagaaactgaccctggcatgtccgggtcctcttgccgatagctctgtgaccctctcacctgtggactcactcgattcccccagaccatttggtggacctccagccagcccggggggttttccactggagggtccttacgctgcggcgacagctaccgccgtcagcctggcccagctagggggccctgggagagctggcctgggccgccagccgccagggggctgcgtactctcattgggactgctcaaccctgtggctgtgcctctcgattgggcccggcttcccccccctgcacctcctgggccttcctttctccttcctttggctccggggcctcagctgttaaacccaggaacacccgtttcccctcaggagcgaccacccccataccttgccgtgcccggtcacggcgaagagtatccagctgctggagcacatagctctcccccaaaagccagatttctccgggtgccaagtgaacacccttatctgactccatcacccgagtcacccgaacattgggcaagtccatcacccccatcgctcagcgattggagcgaaagcaccccatcaccagcaacagctaccggcgccatggctacgactactggggccctgcccgctcagcccctgcccttatctgtccctagttccttggcccaggcccaaactcagctgggaccacagccagaagtaacccctaaacgccaagttcttgcatag

SEQ ID NO: 126729 - DNA, 3867 bp, synthetic construct
  misc_feature 1..3867: note = Description of Artificial Sequence: Synthetic coding sequence
  source 1..3867: mol_type = other DNA
gcggccatgggccccggtgcccgagggaggcgacggcggaggcgcccaatgagccctccaccgccacccccacccgtgcgagctctgccccttctcctgctcctcgcggggccaggcgcagctgctcctccttgcctcgatggcagcccttgcgcaaacggagggagatgcactcaattgccaagtagagaggccgcatgcctgtgccctccagggtgggtgggcgagcgttgccagttagaggacccctgccactcaggaccctgcgcggggaggggagtgtgccaaagttccgtggttgccggaacggctcgtttctcgtgtcggtgcccgcgaggttttagagggccagactgttccttgccggacccgtgtctgtcttctccgtgtgcccatggagcgaggtgcagcgtcgggcccgatggtcgcttcttatgttcctgcccacctggctaccagggacgatcctgtcgcagtgatgtggatgagtgcagagtgggcgagccctgcaggcacgggggcacatgtttgaacacacccgggagcttcagatgccagtgccctgccgggtacaccggccctttatgcgaaaaccctgctgtgccctgcgccccctctccctgccgcaatgggggcacgtgccgccagagtggggacctcacatacgactgcgcctgcttaccagggtttgagggccaaaattgtgaagttaatgtggacgactgccccggccatagatgtctcaacggcggcacttgtgttgatggcgtgaatacttataattgccagtgtcctccagaatggacgggccagttctgcactgaagacgtggacgagtgccagttgcagcccaacgcttgtcataacggggggacatgctttaacaccctcggtgggcactcgtgcgtatgcgtgaatggctggacaggcgaatcatgctcccagaacattgacgattgcgccaccgccgtctgctttcacggtgctacttgtcacgaccgggttgcgtcattttactgcgcgtgccccatgggcaaaacaggtctgctgtgccacctggatgatgcatgcgtcagcaacccatgccatgaagacgctatttgcgacacgaatccggttaatgggcgcgctatttgcacatgcccccctggcttcaccggcggtgcatgtgaccaggacgtcgatgaatgttcgattggtgccaatccttgcgagcacttgggaagatgtgtcaacacccaagggtccttcttgtgtcagtgcggccgcggatacactggtccccgatgtgaaaccgacgtgaatgagtgcctatcagggccttgtcggaatcaagccacatgcctcgacaggatcggtcagtttacctgcatctgcatggccgggttcacagggacgtattgcgaggtggacatcgatgagtgtcagagctctccttgtgtcaacggcggcgtctgtaaggacagggtcaatggcttctcttgtacatgtccttcagggttttcagggtccacatgtcagctggatgtagacgaatgtgcatctacaccctgccggaacggcgccaagtgtgtggaccagccagatgggtatgaatgcagatgcgccgaaggttttgaagggacattgtgtgacagaaatgtggatgactgctcccctgatccctgccaccatggaaggtgcgtagacggcatcgcctctttcagctgtgcctgcgctcctggatataccggaaccagatgcgaatcccaggtagacgaatgccgttctcaaccatgccgccatgggggcaagtgcctcgacctcgtcgacaaatacctgtgtcgatgtcccagcggaaccacgggtgtgaattgcgaggtcaatattgacgactgtgctagtaatccctgcacttttggagtatgcagggacggcatcaatagatacgactgtgtctgccagcctggctttactgggccactctgcaacgttgagatcaacgagtgcgcatcttcaccctgtggcgagggtgggtcatgtgtggacggcgagaacggttttcggtgcttatgtccgcctggctcgctgccccctctgtgcttgccccctagtcatccgtgcgcgcatgagccttgttctcacggaatctgctacgacgctcctggaggctttcggtgcgtgtgtgagccaggctggtcaggaccccggtgttcacaaagtctcgcacgggatgcttgtgaaagccagccctgcagagccggtgggacatgtagtagcgatggaatgggttttcactgcacttgcccacccggcgtccagggacgccagtgtgagctgctgtcaccctgcactcctaacccatgtgaacatggaggccggtgcgagagtgccccaggccaactgcccgtgtgctcttgccctcagggctggcaggacccttgtctgaatggcggatcctgccaggatggggtgggctctttctcctgtagctgcctgcccggatttgcagggccacgatgcgctagggacgtcgatgagtgtctatctaatccctgcggccccgggacatgtactgaccacgtggcctcatttacctgtacctgcccaccaggatacggcggattccattgtgaacaggatctgccggactgctccccttcatcttgcttcaacggcggaacatgtgtggacggggttaacagttttagttgtctgtgccggcctggctacactggggctcactgtcaacacgaggctgacccgtgcctgagccgcccctgcctacacgggggtgtctgtagcgccgctcaccctgggttccggtgcacatgtttggaaagctttacagggccccaatgccagactctggttgattggtgttcccgccagccgtgccagaatggcggccggtgtgtccagaccggggcctactgcctctgtccccccggttggtccggccggctgtgcgacattagatctttgccttgtagggaagccgcggcacagattggtgtaagactagaacaactttgccaggcgggaggacagtgcgtggatgaggacagttcgcactactgcgtgtgtccagagggtaggactgggtcccattgcgaacaagaagtcgacccatgcctcgctcaaccttgtcagcatggtgggacctgccgcggctacatgggaggctatatgtgcgaatgccttccgggttacaacggcgacaattgcgaagatgacgtggatgagtgcgcatctcagccctgccagcatgggggaagctgcattgatctggtcgcgcgctacttgtgttcttgtccccctggcaccttgggggtcctctgcgagattaatgaagacgattgcggcccggggcccccattggacagcggcccacggtgtctgcataacggcacatgcgttgatcttgtgggcgggtttcgatgtacatgtccgcctggctacactggtctccggtgcgaggctgacatcaatgagtgtagatcaggagcatgtcacgctgcccatactagggattgcttgcaggatcctgggggcggcttccgctgtctttgtcacgctgggttctccgggccgagatgccagactgtcctctctccttgcgagagtcaaccctgccagcatggggggcagtgtagaccctcacctggacctgggggtggcttgaccttcacttgccattgcgcacagccattttggggccccaggtgcgaacgggtggcacgaagttgccgggagttgcaatgccccgtcggggtaccttgccagcagacgccccgtgggccaagatgtgcctgccccccaggtttgagcggccctagctgcagatcatttccggggagccccccgggcgccagtaatgcctcatag

SEQ ID NO: 126730 - DNA, 6012 bp, synthetic construct
  misc_feature 1..6012: note = Description of Artificial Sequence: Synthetic coding sequence
  source 1..6012: mol_type = other DNA
atgcagcccccgtcactgttgttgctgctcttgctgctgttgttactctgcgtaagtgtcgtgagaccgaggggtctgttatgtgggtcattcccagagccctgcgccaatggcggtacctgcttaagcctgtcactcggccaggggacctgccagtgtgcccctggcttccttggtgagacctgccagttcccagatccgtgccagaacgctcagttatgccagaacggaggatcatgccaagcccttctgcctgctccgcttggtctgccctccagtcctagtccactgacaccttcctttctatgtacctgtctgccaggattcaccggggaacggtgccaggctaaattggaggatccctgtcccccaagcttttgcagtaaacgcgggagatgccatatccaggcctctggccgtcctcagtgttcgtgcatgccaggatggaccggcgagcaatgccagctgcgcgacttctgctctgcaaatccttgcgtgaacggtggagtttgcctggccacatatccgcagatccagtgccactgccccccggggttcgaagggcatgcctgcgaaagggacgtaaatgaatgttttcaagatcccggaccttgccccaagggaactagctgtcataacactcttggttccttccagtgtctctgtccagtggggcaagagggcccacgctgtgaactgcgggcagggccatgcccaccaagaggctgttctaacggtggcacgtgtcagttaatgcctgagaaggattcaacctttcacctgtgcctctgtccccccgggtttattggccctgattgcgaagtgaatcccgacaattgcgtctcacaccagtgccaaaatggaggcacatgtcaagatggcttggatacgtacacctgtctttgccccgagacatggactggatgggactgcagtgaagacgtggatgaatgtgagacgcagggcccacctcattgtcgtaacgggggaacgtgccaaaattccgctgggtcatttcactgtgtatgcgtgtccggctggggaggtacgtcatgtgaggaaaatctagatgactgtattgcagcgacctgtgctcccggttcaacatgtatcgacagagtgggtagtttttcctgtttgtgccccccaggtaggacgggtttactgtgtcaccttgaggatatgtgcctctcacagccctgtcacggggatgcacagtgctcaaccaaccctctcactggttccacgctgtgtctctgtcaacctggttacagtggcccaacatgccaccaagatttagacgaatgcctgatggcccagcagggaccaagcccctgtgagcacggcgggtcttgcctgaacacaccaggctccttcaattgcttatgtccacccggctacacagggtcacgatgtgaggccgatcataacgagtgcttaagtcagccttgccacccaggttctacatgcttggacctgctcgcaacattccattgcctctgcccccccggcctagagggtcagctctgcgaggtagagaccaatgaatgcgcctcggcaccttgtctgaatcacgcagattgtcatgatttactcaacgggtttcagtgtatctgtcttcctgggttctcaggcacacggtgcgaagaggatatagatgaatgccggagttccccctgcgcaaacggtgggcagtgccaagatcagccaggggcattccattgcaaatgtttgcctggcttcgaggggccgaggtgccaaaccgaggtcgatgagtgtctctccgatccatgtccagtaggcgcaagctgccttgatcttccaggtgcctttttttgtctgtgccccagcgggtttacgggccagctctgtgaggtgccattgtgcgcacctaatttatgccagccaaagcagatatgcaaagatcagaaagacaaggccaattgtttgtgtcctgacgggagccctggatgtgccccaccagaggacaactgtacatgccaccacggtcactgccaacggtcatcatgtgtgtgcgatgtagggtggacaggacccgaatgtgaagccgagctcggtggctgtattagcgcaccttgcgcgcacggggggacctgctacccccagcctagcggatacaattgcacatgtcctaccggctacaccgggcccacatgctcagaagagatgaccgcatgtcactctggaccttgccttaacggggggagctgtaacccctcccccggcgggtactattgcacttgtccaccctcccatacaggcccacagtgccaaacgtccacagactattgcgtaagtgccccctgttttaacgggggaacatgcgttaaccggcccggcacattttcatgtctgtgcgcaatggggttccagggtccacggtgcgaaggtaagttgagaccttcctgtgcggatagtccatgccgaaatcgcgccacctgccaggatagcccacagggcccgagatgcctctgccccacaggttatacaggcggtagctgtcagacacttatggatttatgtgctcagaaaccgtgtcctcggaactctcattgtctgcaaaccggaccttcctttcattgtctttgccttcagggctggaccggaccactgtgcaacttgccgctcagctcctgtcaaaaagcagccctgtctcagggcattgatgtgtcctctctttgtcacaacggcggattatgcgtcgattctggaccaagctatttttgccactgccctcccggatttcagggctcgctttgtcaagaccatgttaatccctgtgagtcccggccctgtcagaacggcgcgacatgcatggcccagccctctggttacctttgtcaatgtgccccaggttatgatggccagaactgtagcaaagagctcgatgcatgtcagtctcagccctgccacaaccacggcacctgcacccccaagccaggcggatttcactgcgcctgtccccccggcttcgtgggacttagatgtgagggagacgtcgacgaatgtcttgatcagccctgtcaccctaccggtactgcggcctgtcattccctcgcaaatgctttctactgtcaatgcctgcctggacacaccgggcaatggtgtgaagttgagatcgacccttgtcactcccagccctgttttcacggggggacctgtgaagctacagcgggctctcctttgggcttcatctgtcattgtccaaaagggtttgagggtcctacatgttcccatcgcgcgccgagttgcgggttccatcactgtcaccacggcgggctgtgccttcctagccctaagcccggcttccctccgagatgtgcatgccttagcgggtatggcggtccagactgtctcactccacccgctccgaagggctgcggcccaccaagtccttgtctatataatggctcctgcagcgaaactaccgggctcggcggtcccggctttcggtgttcatgccctcattcctccccaggtccacgctgccagaaacctggcgcgaagggctgtgaggggagaagcggcgacggggcctgcgacgcaggctgtagcggccctggtggcaactgggacggtggggattgctccctcggggttcctgatccttggaaggggtgccccagccactccagatgttggctgctgttccgggatggccaatgccacccccagtgcgacagcgaagagtgtctctttgatgggtacgattgtgaaacaccgcccgcttgcacccccgcctacgaccagtactgtcacgatcatttccacaacggccactgtgaaaaaggctgtaacaccgctgaatgcggatgggatgggggagattgccgccccgaagatggtgacccagaatggggcccaagcctggctctgctcgtggtactttccccaccggccctggatcagcagttgttcgccctcgctcgtgtgctctcactgacattgcgcgtcggtctgtgggtaaggaaagatcgggatgggcgggatatggtgtatccttaccctggagcgagagccgaggagaagctcggtggtactcgggatccaacctatcaggaacgggcggccccacagacacagccccttggaaaggagacggacagcctttcggccggatttgtcgtcgtgatgggcgtagatttaagccgctgcggtcccgatcatccagccagcaggtgcccttgggaccctgggctcttgcttagattcttagccgccatggcagctgttggcgctttagaaccactgctgccaggccccctgctggctgtgcaccctcacgctggaacggctccacccgccaatcagctgccctggcctgtgctttgctccccagtggctggagtaattcttctggccctcggtgctctgctggtgctgcaactgatccgccgcagacgccgtgaacacggggctctgtggctgccacctggcttcactcgcagaccgcgcacccagtcagcgccacacaggcgacgaccgcccctgggagaggatagtattgggctcaaggccctcaagccaaaggccgaagtggatgaggatggtgtagtgatgtgttccggcccagaggagggcgaggaagtcggccaggccgaggaaactgggccccctagcacttgccaactgtggtcactgagtggaggctgcggggccctgccccaggccgctatgttaacacctccacaggaatctgagatggaggctccggatctcgatactagggggccggacggagtgaccccactgatgtccgctgtgtgctgcggagaggttcagagcggcactttccagggcgcatggctgggctgtccggagccctgggagccactcctggacgggggggcctgtccgcaagcccatacagtgggaactggagagacgccacttcatctggctgcaaggttcagcagacccacggccgcccggagactgctggaagctggggccaatccgaatcagccagatagagccgggaggacccccctccatgccgccgttgctgctgacgcaagggaagtgtgtcagctgctgttgcggtccaggcagacagccgtggacgcccgaacagaagacggcactactcccttgatgttagccgcccgcctggcggtcgaggacttggtggaagagctcatcgccgcacaggcagatgtgggagctagggataagtgggggaagactgccttacactgggccgcagccgtaaacaatgcgcgcgctgcccgatctctgctgcaggccggcgccgataaagacgcacaggacaaccgtgagcagactcctctttttttagcagctcgtgaaggggcagtggaggtggcccagttgctcctgggtctcggcgcagcccgggagctgcgtgatcaagcaggcctggccccagcagacgtcgctcatcagaggaaccattgggatctgctcacgctgcttgagggggccggcccccctgaggctagacataaagccacgcccggaagggaggcagggccttttcccagagcacgaacagtcagtgtaagcgttccaccccacggaggtggcgctttgccccgttgtcggaccctgtcagccggggcgggacctcgtgggggaggcgcctgccttcaagctcggacttggtcagtcgatctggccgcgcgtgggggaggagcctactcgcactgtcgttccctctctggggtgggcgccggcggcggtccaaccccacgtggccgtcgattttcagccggcatgagaggccccagacccaatcccgccatcatgcggggtcgttatggtgtggcggcaggccgcgggggtcgcgtgtccaccgacgactggccatgtgactgggtcgcccttggcgcctgtgggtcggccagtaacattccaatccctcccccatgtttaacaccgagtcctgagcgcgggtcgccgcagttggactgtggcccacccgcccttcaggagatgcctattaaccaggggggggagggcaagaaatag

SEQ ID NO: 126731 - DNA, 3147 bp, synthetic construct
  misc_feature 1..3147: note = Description of Artificial Sequence: Synthetic coding sequence
  source 1..3147: mol_type = other DNA
tgtgccccaggatatgacgggcaaaactgctccaaggagctcgatgcctgccaatctcagccttgtcataaccacggcacttgtacccctaagcctggcggattccactgcgcctgtcctccaggatttgttgggctgaggtgcgaaggggacgtggacgaatgccttgaccagccctgtcacccgacgggcactgcagcctgccactccctggcgaatgctttctattgccagtgcctcccgggccatactggccagtggtgcgaggtcgagatagacccttgtcattctcagccctgcttccatggtggtacctgcgaggcaacagcggggtcccctcttggcttcatctgccactgccctaaagggttcgaggggcctacctgctctcatcgagccccttcttgcggattccaccactgtcaccacggggggctttgtctgcctagtccaaaacctggatttcccccacggtgcgcttgtctaagcggctatgggggacccgactgtttgaccccaccagcccccaagggctgtgggccacccagtccttgtctttacaatggctcatgcagcgagaccactggtttgggggggcctgggtttcggtgctcctgtcctcatagttcgcccgggcctagatgtcagaaacctggagctaaaggctgcgaaggccgatcgggggacggtgcctgcgacgcaggttgcagtggccccgggggcaactgggacgggggggattgttcattgggagttcccgacccttggaaggggtgccccagccattccaggtgttggctgctcttcagagacggacaatgccacccacagtgcgatagcgaggaatgtcttttcgatggatacgattgtgagactccccccgcctgtactcctgcctatgaccagtactgccacgaccattttcataatggacactgtgagaagggatgtaataccgctgagtgcggatgggatggtggggattgccgacccgaagacggcgaccctgagtggggtccctcccttgcattgctcgtcgtgctgagtcctcccgctttggaccagcagttattcgcactcgctcgcgtcctgtctctaacgcttcgcgtgggcttgtgggtgcgtaaggatcgtgacggacgggacatggtctacccctatcccggcgctcgcgctgaagagaaactaggaggcacacgagaccccacatatcaggaaagagccgctccccaaacccagcctttgggaaaggagaccgattccctgagcgctggatttgtcgtggtgatgggagtggacttgtcacgatgcggcccggaccatcccgcatcccggtgtccatgggaccctggcctgctcctgaggttcctggcagctatggcagcagtcggagctctagaacctctacttcctggcccactcctggcggtgcatccccacgcggggacagctcccccagcaaatcaactcccatggcccgttctctgctcccccgtggctggcgtcatcctgctcgctctaggagcgctgttggtcctgcagctgatcagacggcgccgaagggagcacggcgccctgtggttaccgcccggcttcaccagaagacccaggactcagtccgcgcctcatcgccggagacctcctctgggggaagatagcatcggtctcaaggcactgaagcctaaagccgaggtggatgaggacggagtcgtgatgtgttccggccctgaggagggcgaagaagtcggacaggctgaagagacaggccctccctcaacttgccagctgtggtcgcttagcgggggttgtggcgccctgccccaggcagcaatgttaacgccaccacaggaatcagaaatggaggcgcccgatctagatacccgcggtcccgacggggtcacacccttaatgagcgcagtgtgttgcggcgaagttcagtcaggtaccttccagggagcctggctcggctgtcccgagccatgggagccactgctggatggcggtgcgtgccctcaggctcataccgtcggcactggagagaccccactgcacctggctgccagattttccaggcctaccgctgcacgacgactcctcgaggctggggccaaccctaaccagcccgatcgcgctggacggaccccactgcacgccgcggtggccgctgatgcgcgggaagtgtgccagctacttcttcgaagccgccagacagctgtagatgctaggaccgaagacggaaccactccgctgatgctggccgcccgcctggcagttgaggacctagttgaggagctcattgccgcacaggcagatgtgggcgcgagagacaaatggggcaagaccgctcttcattgggcagcagccgtgaataatgccagggcagcaagaagcctgctgcaagctggggccgacaaagacgcacaggataacagagagcagactcccctgtttttggctgcacgtgaaggagctgtagaagtggcccagctgcttctgggtctgggggctgccagagagctgagggatcaggcgggactcgcccctgccgacgtcgcacatcagcgtaatcattgggacctcctgaccctgctggagggggctgggcctcccgaggccaggcataaggcgactccaggccgggaggcgggaccatttcccagggctagaaccgtgtccgtgtctgtcccaccacatggggggggagcgctaccgcgttgtagaacgctgagcgccggtgccgggccacgcgggggtggcgcgtgccttcaggctcgaacctggagtgtggacctcgcggcccggggtgggggcgcctactctcattgcagatccctctccggggtgggggccgggggcggtccaactccccgggggagaaggtttagtgccgggatgaggggcccccggccaaacccggcaataatgcggggtagatacggagtcgccgctggaaggggcggacgggtcagcacagatgattggccctgcgactgggtcgctctgggcgcgtgtgggtctgcgtccaacatcccaatacctcctccatgcctaacaccctccccggaaaggggaagtccacagctggattgtggtccacctgcactgcaggaaatgccaattaatcaaggcggcgaagggaagaaatag

SEQ ID NO: 126732 - DNA, 6018 bp, synthetic construct
  misc_feature 1..6018: note = Description of Artificial Sequence: Synthetic coding sequence
  source 1..6018: mol_type = other DNA
atgcagccaccctccctactgctgctccttcttttgttgctgttgctgttactgtgcgtgtccgttgtgcgtcctagaggactgttgtgtggctcattcccagagccttgcgctaatggtgggacttgcctaagcttatcgctcggccagggaacctgccagtgcgcccctgggtttctcggagaaacttgtcagtttccggacccctgccagaacgcacagctgtgccagaacggcggcagctgtcaggccctgcttcccgcgccacttggactgccatccagcccttctccactgactccctcatttctgtgcacatgcctccctgggttcacaggcgaacgatgtcaagcacagcttgaggacccatgcccaccttccttttgctctaaaagagggaggtgccacatccaggcttccgggcgtccccagtgtagttgtatgccgggctggaccggtgaacagtgccagctgagagatttttgctccgcaaatccttgcgtgaacggcggagtgtgtctagccacatacccccaaatccaatgtcattgcccaccagggtttgagggacatgcttgtgagcgagatgtgaacgaatgcttccaggatccggggccctgtcctaaggggacatcctgccataatacactggggtcatttcaatgcttgtgtccggtggggcaagagggcccccggtgcgagcttcgtgccggaccttgccccccccggggctgtagcaacgggggtacttgtcaactcatgcccgaaaaagatagcactttccacctgtgcttgtgtcctcctggatttatcgggcccgattgtgaagtgaatccagataattgtgtgtcccaccagtgccagaatggggggacgtgccaagatggcctggatacctacacatgcctttgccccgaaacttggaccggctgggactgttccgaagatgtagatgaatgtgaggcacaaggaccgccccattgtagaaacggggggacctgtcaaaacagtgccgggagctttcattgtgtgtgcgtcagtggttggggagggacttcctgcgaagaaaatctcgacgattgcatcgctgctacatgtgcaccaggatccacctgtatagatagagtgggctcgttctcctgtctttgtccaccgggcagaacagggctgttatgccatctggaggacatgtgcctgtctcagccctgtcatggtgacgcacaatgtagtacaaatcccctcactgggtcgactctgtgcttgtgccagccaggatatagtggccccacatgtcaccaggacctcgacgagtgcctgatggcacagcagggacctagcccctgcgagcacgggggaagttgcctgaatactcctggttcatttaactgcctgtgcccacccgggtacaccggaagcaggtgcgaagcagaccacaatgagtgcctttcacaaccctgccaccctggttctacttgccttgacctgctcgccacattccattgtctgtgccctcccgggctcgagggccagttatgcgaagtggagacaaacgaatgcgcctccgccccctgtctaaatcatgctgactgtcacgatctgctcaatggatttcaatgtatctgtttgccagggttctccggcacgcgttgtgaagaggatattgacgaatgccggagctccccatgtgcaaacggcggccagtgccaggaccagcccggagcgttccactgtaaatgccttccagggttcgagggaccacgatgccagactgaggtagacgagtgcctgtcagatccttgtcctgtgggagcgagttgcctcgacctacctggagctttcttttgcctgtgtcctagcgggttcactgggcagctttgtgaggtgccactctgcgcccccaatctttgccagccgaaacagatctgtaaagatcagaaggacaaagctaactgtctttgtcctgacggaagtcccgggtgtgcaccgccggaagacaattgcacatgccaccacggccattgccagcgcagctcgtgtgtgtgcgacgtcggatggaccgggccagaatgtgaggctgaactgggtggctgcatcagcgctccttgtgctcacgggggtacatgttatccacaaccgtccggctacaactgcacgtgcccaactggctacaccggccctacatgctcggaagagatgacggcctgtcattctgggccttgcctcaatgggggctcctgcaacccttcaccgggggggtactattgtacctgtcctcccagccacaccggcccacaatgccagaccagcactgactattgcgtctccgccccctgtttcaatggcggtacttgcgtgaaccgtcccggcaccttctcttgtctgtgtgccatgggttttcagggccctaggtgtgagggcaagttgaggccatcatgtgccgactcaccttgtagaaatagggccacctgtcaggactctccgcagggtccacgttgtctgtgtcctacggggtacacaggaggtagttgccagacactcatggacctctgcgctcagaagccctgcccacgcaactctcactgtcttcaaacagggccctcgtttcactgcctgtgcctgcagggttggactggacccctgtgcaacttgcctctgagctcgtgtcagaaggctgccctgtcccagggcattgacgtttcctctctctgccacaacggcgggctgtgcgtggattcaggcccctcctatttctgccactgcccacctggcttccaggggtcactctgtcaagatcatgtgaacccttgtgaatcacgcccttgccagaatggtgctacttgtatggcacaaccatccggctacctctgccaatgcgcaccgggatacgatggacagaattgctccaaggagcttgatgcctgccaaagccagccgtgccacaaccacggtacctgtacgccaaaacctgggggattccattgtgcctgccctcctggtttcgtagggctgcggtgtgaaggagatgtagacgagtgccttgaccagccatgccaccctacgggcactgccgcgtgtcactctctggcaaacgcattttactgccagtgtctcccgggccatacaggacagtggtgcgaagtggagatagacccttgccactcacaaccctgtttccacggagggacatgcgaagccacagctggaagccctctgggattcatttgccactgccccaagggctttgagggcccaacttgttcacatagggctccgagttgcgggtttcaccactgtcaccacggtggactttgtttaccaagtcccaaaccaggctttccacctcgctgtgcatgcctcagtggctacgggggccccgactgcctgacccctcctgctcccaaaggctgcggccctccgtcaccttgcctgtacaatggctcctgctcggaaacaaccggcttggggggtcctggattcaggtgctcctgcccccactcatcacctggccctaggtgccagaaacctggcgctaagggttgtgagggccgcagcggcgacggagcctgcgacgccggctgctcaggaccaggcggaaactgggacgggggggactgttcccttggcgttcccgacccctggaaaggctgcccctctcattccagatgctggctgctgttcagggacgggcagtgccacccacagtgtgactctgaagaatgcctgttcgatggatacgactgcgagactcctcctgcgtgtaccccagcatacgatcagtattgccacgatcattttcacaatggtcattgcgaaaagggttgcaataccgcggagtgcgggtgggatggcggggactgtaggccggaagatggtgaccctgaatggggtccatctctggctctactcgtggttctatctcctcctgcactagaccagcagctcttcgcactagccagagtgcttagtctcaccctaagggtcgggctctgggtcagaaaggatagagacgggcgggatatggtttatccatatcctggagcgcgggccgaagagaaactagggggcacgcgtgatcctacttatcaggaacgcgcagccccacagactcagcctcttgggaaagaaacagactctctgagcgccgggtttgttgtcgttatgggggttgacctatccagatgcggacccgaccatccagccagtcgatgcccctgggatcctgggctcctacttcggttcctggcggcaatggccgctgttggggccctcgagcccctgctccccggaccgttgctcgcagttcatccccacgccggtacggctccaccagccaaccagctgccatggccagtactctgttcaccagtggccggggtgatcctgctggctctcggcgcactgctggtgctgcaactgattcggcggagacgtcgggagcatggggcgctctggctgccgcctggcttcaccagaagaccgcgcacccagagtgccccccacaggcgccggcctccattgggtgaggattccatcggcttgaaagcactaaaacctaaagcagaggtcgacgaggacggcgtagtcatgtgtagtggacctgaagagggagaggaagtcggacaggcggaggagacgggaccccccagcacctgccaactatggagtttgagcggtgggtgtggcgctctgccacaggcagccatgttgactccaccccaggagagtgaaatggaggctcccgatctagatacaagggggccagacggcgtgacgcccctcatgtccgcagtctgctgcggcgaagtgcagagcggaacctttcaaggcgcgtggttgggatgcccagaaccgtgggagccattactggacgggggagcctgtccccaagcccatactgtcggcacaggagagacccccttgcacctggctgcaagattttcgagaccaacagccgcacgaaggctccttgaagctggcgcaaatcctaatcagcctgacagagccggtcggacgccccttcatgccgctgtcgctgccgacgccagggaagtgtgtcaactccttttgaggtcgaggcagacagccgtggacgcaaggactgaagatgggaccacacctttgatgcttgcagctagactggctgtggaggacctcgtcgaagaactaatcgccgcccaggctgatgttggcgctagagataagtggggcaaaaccgctctgcattgggctgccgctgtaaataacgctagggcggcccgatctctcctgcaggcaggcgcagacaaagacgcacaggacaatagagagcagacacccctgttcttggccgccagggaaggagctgtcgaggtagcccagttgttgcttggtctcggcgccgctcgagagctgagggatcaggctggtctagctccggctgacgtagctcatcagagaaatcactgggatcttttgactctgctggaaggagcggggccaccagaggcgagacacaaggcgacaccgggacgggaggcaggtccatttccaagagctcggactgtctccgtgagcgtgcctccccacggaggcggcgccttgccaagatgcaggacactgtctgctggagctggacctagaggaggaggcgcatgcttacaagcacgcacttggagcgtcgacctggccgcccgaggcgggggcgcttattcccattgtcggtcactttctggggtaggggctggcggtggacctaccccaagaggacgcagattctcagctggtatgcggggcccaagacctaacccagcgattatgagagggaggtacggagtggccgcgggaagaggaggccgggtgtccacagacgattggccctgcgattgggtcgccttgggcgcctgcggatctgctagcaacattcctattcctcctccatgcctgaccccatcaccagagcgtgggagccctcagctggattgcggcccaccggccttgcaggagatgcctatcaaccagggcggtgagggcaagaaatag

SEQ ID NO: 126733 - DNA, 6012 bp, synthetic construct
  misc_feature 1..6012: note = Description of Artificial Sequence: Synthetic coding sequence
  source 1..6012: mol_type = other DNA
atgcagcctcctagtctcctgctgctgctgctgttactgctactcttatgcgtgtccgtggtgagaccgaggggactgctctgcggttccttcccagaaccatgcgctaatggcggcacatgcttgtcactctccctgggccagggaacttgccagtgcgccccaggatttctcggggaaacttgccagtttcccgacccatgccagaatgcccaactgtgccagaacggcggttcctgccaggccttgctgcctgcaccgcttgggctgccatccagccctagcccccttactccgtcttttctctgcacgtgtctgccaggattcactggggagagatgccaggcccaacttgaagacccatgccctccttccttttgttctaagcgagggcgatgtcacatccaagctagcggccgcccccagtgctcttgtatgcctgggtggacgggcgaacagtgccagctccgggatttctgctccgccaacccatgtgtcaacgggggagtgtgtctggccacctatccacagatccagtgtcattgcccgccgggatttgagggccacgcctgtgaacgcgacgtgaacgagtgctttcaagatcccggcccttgtcccaaagggaccagttgtcacaatactctgggaagttttcagtgtctgtgtcccgtcggacaggagggcccaaggtgcgagcttagggccgggccgtgcccccccaggggctgtagtaacgggggcacctgccagcttatgccagaaaaagattccacatttcatctgtgtttgtgtccacctgggttcatcggaccggattgcgaggtcaatccagataattgtgtgtcacatcaatgtcagaatggggggacttgtcaggacgggcttgatacatacacgtgcctctgcccagagacatggactggttgggattgttcagaagacgtggacgaatgcgagacacagggtccacctcattgtcggaacgggggaacatgccagaactcggcagggtccttccattgcgtctgcgtctctggttggggcggaacctcttgcgaagagaacttggacgactgtatcgctgccacctgtgcccccggctctacttgtatagacagagtgggctcattctcttgtctgtgcccccccggccgaacaggtcttctctgtcacttagaggatatgtgcctctcccagccttgtcatggtgatgcacaatgttcgacgaacccactgaccggtagcactctctgcttgtgccagccaggatattcgggacccacctgccatcaagacctcgacgagtgtctgatggcacagcaaggcccttcaccatgcgaacatggcggaagctgcttgaatactcccggctcatttaactgcctgtgcccaccaggctataccggctctcggtgtgaggccgaccataacgagtgcctgtcccagccatgtcatcctggctcgacttgcctggaccttctggccaccttccactgcttatgtcccccagggttggagggccagctctgcgaagttgagacaaatgagtgcgcctcagcgccctgcctaaaccatgctgattgccacgatctgttgaacggatttcagtgcatctgcctcccgggcttctcaggcactcggtgtgaagaagacatagatgagtgcagaagctcaccgtgcgccaatggggggcagtgtcaggatcagccgggagcttttcattgcaaatgtcttccagggtttgaaggcccgcgctgtcagaccgaagtcgacgaatgtctgagtgatccatgccctgttggagcatcctgcctagatcttcctggtgcatttttttgtttatgtcccagtggattcaccggacagctgtgtgaagtgccactgtgcgctccaaatctgtgtcagcccaagcagatatgcaaagaccagaaggacaaagcaaactgcctgtgtccagacgggagcccaggctgtgccccaccagaagataactgtacttgccaccacggccattgccaacggagtagttgtgtgtgcgatgtcgggtggacaggacccgagtgtgaagcggaactcggcgggtgcatcagtgctccttgcgctcacggcgggacctgttacccacagccatcgggctataactgtacatgccctaccgggtatactggccctacctgcagtgaggagatgactgcatgtcactcggggccatgccttaacggcggaagttgcaatccctctccaggtggctactactgtacatgccccccttctcacaccggcccccaatgtcagactagcaccgattattgcgtgagtgcaccctgtttcaacggaggtacctgcgtgaatcggcctggtaccttctcctgtttgtgtgctatgggctttcagggaccacgctgcgagggcaagttacgtccatcttgtgccgatagcccatgcagaaacagggctacctgccaagactcccctcagggaccaaggtgcctctgtcctacaggatacacaggtggaagctgccaaacgcttatggatctttgtgctcaaaaaccttgcccacggaacagccattgcctgcagaccggccccagtttccattgtctgtgtctgcaaggatggactggtcctttatgtaaccttcctctgtcttcttgtcagaaagccgccctatcacagggcatagatgtcagtagcctctgtcacaacggcggcctttgcgtggattccggcccgtcttatttctgccactgccctccaggctttcaggggtctctgtgtcaggatcatgtaaacccctgcgagtccagaccatgccaaaatggcgcaacctgtatggctcaaccatcgggctacctctgtcagtgcgcacccggctatgatgggcaaaactgctctaaggaacttgacgcctgccaatcccagccgtgccataatcatggaacttgtaccccgaaaccaggcgggtttcattgcgcttgcccgccaggctttgtcgggcttagatgcgaaggcgacgtggacgaatgcttggatcagccttgccatcccacgggtaccgccgcttgccattcgctcgccaacgccttttactgccagtgtctgcctgggcacacgggacagtggtgtgaagtagagatagacccatgccatagccagccctgcttccatggagggacttgtgaagcgacagcggggtccccactgggcttcatttgccactgtcctaaaggcttcgagggtcctacttgtagccaccgggcaccctcctgtggctttcatcactgtcaccacggcggcctgtgccttcccagtccaaagcccgggttccctccccggtgcgcatgcctatcaggttacggcgggcctgactgtttaacacctcctgcaccgaagggctgtggcccaccctctccttgtctgtataacggatcctgctctgaaaccaccggactcggcggaccaggcttccggtgctcatgtccgcattcttcccccgggcctcggtgccagaagcccggagcaaaaggctgtgaaggtaggtccggggacggcgcctgcgacgctgggtgcagcggaccgggagggaactgggacggaggtgattgttcgcttggtgtgcctgatccttggaaaggctgcccgtcacactctcgctgctggttacttttccgggatggacaatgtcaccctcagtgtgatagcgaagagtgtctgttcgacgggtatgattgcgagacccctccagcatgtactcccgcatacgaccaatattgtcacgatcattttcacaatggccattgtgaaaaaggctgtaataccgctgagtgcggatgggatggtggggactgtcgccctgaggacggagacccagagtggggcccatcgcttgctttgctggtggtattatctccacccgccctcgaccagcaattgtttgccttggcgagagtgctttccctgactttgagggttggcctgtgggtaagaaaggaccgagacggccgggatatggtctacccttaccccggcgcccgcgccgaagagaagctcggcggaaccagggatcctacctatcaggagcgggctgccccccaaactcagccactaggaaaggagaccgatagcctttcagccggctttgtcgtcgtgatgggtgtcgacctgtcacgttgtggaccagaccaccccgcctctagatgcccatgggatccaggactacttctacgtttcttagccgctatggctgcggtgggtgcactagaacctctcttgcctggcccactcctcgctgttcacccccacgcaggaacggctccgcccgccaatcaactgccttggccagtgctgtgctctcctgttgcaggtgtaatccttctcgcactgggagcactcctcgttctgcagctcattcgcagaagaagacgggaacatggcgccctgtggctacctcccggtttcactcgacggccacgaacgcaatcagcccctcacagaagaaggccaccactcggcgaagactcaattgggcttaaggctctcaagcctaaggctgaagtggatgaggatggcgtggtcatgtgttccggcccggaagagggcgaggaagtgggacaagccgaggagactggccctccatctacctgtcagttatggtccctgagcggtgggtgtggtgctctgccacaggccgccatgctaacacccccacaagaaagtgagatggaagcccctgacctggacacgagggggccagatggcgttacccctctgatgagcgcagtctgctgcggagaagtgcaatctggcacatttcagggggcttggctcgggtgtcctgagccctgggaacccctcctagacggcggggcctgtcctcaagcacatacagttgggaccggggagaccccgctgcatctagcggcccgcttcagccgccccactgctgccaggcggttactggaagctggggccaacccaaaccagcccgaccgcgccggacggacccccttgcacgctgcagtggctgcagacgcccgagaggtttgccaactgctgttacgttctagacagactgcagttgacgctagaaccgaagacgggactacgcctctcatgctggcagcccgcctggctgtggaagacctggttgaagagctaatcgccgcccaagccgacgtgggagctcgggacaagtggggtaagaccgccctgcattgggcagccgccgtcaataacgcaagagcagcacggtctctcctgcaagctggtgccgataaggacgcccaggacaaccgagagcagacccctttgttccttgccgcaagagagggggccgtcgaggtggcccaactcctgctgggattaggtgccgctcgggagcttagagaccaggccggcctagctcccgcagatgtcgctcaccaaaggaatcactgggatcttctgactctcttagagggtgctggacccccagaggcaaggcacaaggctactccagggcgcgaagcagggccgtttccccgtgcacgtactgtgtcagtttccgtgccgccacatggaggcggagccctccccagatgtaggaccctgtcagccggggcagggccccgcgggggaggagcttgtctccaggcaaggacttggagtgtggatctagcggcaagaggcgggggagcgtatagtcattgtcgatcactttctggggtcggtgccgggggaggtccaactccgcgcggacgccgtttctcagccggcatgagaggccctcgtccaaaccccgcgattatgagaggacgttatggcgtagccgcaggtaggggaggaagggtttcaacggatgattggccctgcgactgggtcgcactcggcgcctgcggatccgctagcaacatacctatacctccaccctgtctcaccccatcccccgagagaggttctccacagttggattgcggccctccggcattgcaggagatgcccatcaaccaagggggtgagggaaaaaaatag

SEQ ID NO: 126734 - DNA, 561 bp, synthetic construct
  misc_feature 1..561: note = Description of Artificial Sequence: Synthetic coding sequence
  source 1..561: mol_type = other DNA
atgagcgccgtatgttgcggcgaagtccaatcaggtacctttcaaggggcttggttaggatgcccagagccatgggaacccctgctggacggcggcgcttgcccccaagcccatactgtcggaacgggagaaacacccctccacctggccgcaaggttttcgagaccaaccgcagcgcgcagactgcttgaagctggcgccaatccaaatcagccagaccgtgctggtagaacaccattgcacgcagcagttgctgcagatgcgagagaggtgtgtcaactactcttgcgctcccgccaaacagcagtagatgcaaggactgaggatggaactacaccactgatgctcgccgctcgtctcgctgtggaggatttggtggaggaattgatcgccgctcaagcagatgtgggcgccagagataagtggggcgcagacgcggctattcccggaggagcaggacggtccggaggatcttctccagcaactgcgggggctggtggttctccccgggcggcaggcccagggtgggctagcgcaggtggtaggcgcagccctacatag

SEQ ID NO: 126735 - DNA, 6009 bp, synthetic construct
  misc_feature 1..6009: note = Description of Artificial Sequence: Synthetic coding sequence
  source 1..6009: mol_type = other DNA
atgcagccgccttccttgctgctgttgctgctgctgctgctattgtgtgttagcgttgtacgcccaaggggactgctttgtggatcctttcccgagccctgtgcaaacggcgggacctgcttgagcctgtcgctgggccagggaacctgtcagtgtgctccaggcttcttgggcgagacctgccagtttcccgacccctgtcagaacgcacagctgtgtcagaatggcggcagctgtcaggccctcctgccagctcctttgggtttgccgagcagccctagtccactgaccccttccttcctttgcacctgcttgcccggattcacaggcgaaaggtgccaggctcagctcgaggatccctgtcccccctctttttgtagtaaacgaggtcgttgccacatccaagcgtcaggtaggccacagtgtagttgtatgcctggctggactggggagcaatgtcagctgcgcgatttctgcagcgcaaacccatgcgtgaacgggggtgtctgcctggctacctatcctcaaattcagtgccactgcccacccggctttgaaggccatgcgtgcgaacgcgacgtaaacgagtgcttccaggatccaggaccttgccccaaggggacttcctgtcacaacacattgggctctttccagtgtctttgccccgtcggccaggaaggccctcgctgtgaactgcgtgctggtccatgccccccgcgaggctgtagcaatggcggaacgtgtcagttgatgccagaaaaagattcaacattccacctgtgcctgtgccctcccgggtttataggccccgattgcgaggtgaaccccgacaattgcgtcagtcatcaatgtcagaacggtggcacttgtcaggatggcctggacacctatacatgcctctgtccagagacctggacaggatgggactgctcggaagacgtcgacgagtgtgagacacaagggcctccacactgtcgaaacggtggaacctgccagaactctgcaggatcctttcactgcgtctgcgtgtcaggatggggaggaacttcctgcgaggagaaccttgatgattgcattgccgccacgtgtgcccctgggtctacttgtatcgatagggtgggttcttttagctgcctgtgcccgccagggcgcacggggctgctgtgccatctggaagatatgtgcctgtctcagccctgtcatggggatgcccagtgttccaccaatcctttgacaggatccacactttgtctatgccaacccggctacagcgggcccacttgccatcaggatctcgatgagtgccttatggcgcaacagggaccttcaccatgcgaacatggcggctcctgcctgaatactcccggttccttcaattgcttgtgcccgcccggatatacaggatcaagatgcgaagctgaccacaatgagtgcttgtcccagccatgtcaccctggctccacatgtctggacttactcgcaaccttccactgtctgtgccctcctgggttagaaggccaactgtgcgaggttgaaaccaatgaatgtgctagcgccccctgcttgaatcacgccgattgccatgatcttctgaacggattccagtgcatatgccttcccggcttttctggcacacgctgtgaagaggatatcgatgaatgtaggtcttcaccctgtgccaacggaggacagtgtcaggatcagcctggggctttccactgtaaatgcttgcccggatttgagggccctcggtgccaaacagaggtcgatgaatgcctctcagatccgtgccctgtgggagctagctgtctcgacttaccaggcgcatttttttgtctctgccccagcgggtttaccgggcagctttgtgaggtcccactgtgtgcccccaatctttgtcagccgaaacagatctgcaaagatcaaaaggacaaggccaattgcctgtgccctgacggatcacccggctgtgccccccccgaggacaattgcacatgccaccatgggcactgccaacgctctagctgtgtttgtgacgtaggctggaccggccccgagtgtgaagcagaattgggtgggtgcatctctgcgccatgcgcccatggtgggacttgctacccccagccttcagggtacaactgtacttgccctactggttataccggcccgacgtgtagtgaggaaatgaccgcttgtcactccggaccttgtcttaatggtggatcttgcaacccatctccaggcgggtattactgtacctgtcctccgtctcacaccggcccgcagtgtcagacctccacggactattgcgtgagcgcaccctgctttaatgggggcacatgcgtgaacaggcctggcacctttagctgtctgtgcgctatgggattccaagggccaaggtgtgaagggaaactacgaccaagctgtgccgactctccctgccggaacagggccacctgtcaggattccccacaaggccccaggtgcctgtgcccgacaggctacacagggggctcctgccagactcttatggacttatgtgctcagaagccctgtccaagaaactcccactgtctacagactgggccatctttccattgcctttgtctgcagggctggaccggcccgctgtgtaacctgccgctgtcatcgtgccaaaaggccgcactgagccaaggtattgatgtgtccagcctgtgtcacaatggaggtctctgcgttgattcaggcccgtcctacttctgccattgccccccgggttttcagggctccttgtgtcaggatcatgtgaacccttgcgagagcagaccctgccagaacggcgcaacctgtatggctcagccctcaggatacctgtgccagtgtgcccccgggtacgatggccaaaattgtagcaaggagctagacgcctgccagtctcagccctgccacaaccatggaacatgtacacctaagccggggggcttccattgcgcgtgcccacccgggttcgtcggcctcagatgcgagggcgacgttgatgaatgccttgaccagccttgtcatccaacgggcacggctgcttgccattctctagctaacgccttctattgccagtgcttaccgggccacacaggccagtggtgcgaagtggaaattgacccgtgtcactcccaaccttgtttccacggaggtacctgcgaggctaccgctgggagcccactcggcttcatctgtcactgcccgaagggctttgaagggccgacatgctcccatcgtgccccatcttgtggctttcaccactgtcatcatggaggcctttgcctccccagtcctaaacctggcttcccaccccgttgtgcgtgccttagcgggtatgggggacctgactgcctcacgccccccgctccgaaggggtgtggtcctccttccccttgcctgtacaacggatcttgctcagagacaactggactggggggtcccggttttaggtgctcttgccctcatagttcccccggccctaggtgtcagaaacccggggctaaaggttgtgaaggcaggtcaggtgacggcgcttgtgacgccggatgcagtggcccaggagggaactgggacgggggcgactgttccttaggggttccagacccttggaaaggttgtccaagccatagccgctgctggctcctttttagggacggccaatgccatccacaatgtgatagcgaagaatgtctcttcgatggatatgactgtgagactccaccggcgtgcacccctgcatatgaccagtattgccatgaccattttcacaatggacattgtgagaaggggtgcaataccgctgaatgtggatgggatgggggggattgccggcccgaagatggcgatccggaatggggaccaagtctggcccttttggttgtgttatcacctcccgcccttgatcagcagctctttgcactcgctcgtgtcctgtcccttacactccgcgtgggtctgtgggtcaggaaggaccgggacggtagagacatggtatatccatacccaggcgctcgtgctgaagaaaaactcgggggaacacgagaccccacctaccaggagcgtgccgcacctcagacacagccactgggaaaggaaacagacagcctgtccgcaggcttcgtggtggtcatgggtgtcgacctgagccgctgtggaccggatcatccagcatccagatgtccgtgggaccctggcctgctgttgcggtttttagccgccatggcggccgttggtgcgctcgaacccctcctgcctggaccccttctagctgtccacccacatgcaggcaccgccccgccagccaaccaattgccgtggccagttttgtgctcccccgtggcgggggtgattcttcttgcactgggagctctgctggtacttcaattgattcggagaaggcgaagagaacacggggcactttggctccccccggggtttacccggcgacctcgtacacaatcagcaccccaccggaggcggccgcccctgggagaagattccattgggctgaaggccctgaagccgaaagccgaggtcgatgaggatggcgtggttatgtgcagcggcccagaggaaggagaggaggtgggacaagcagaggagaccggccctcccagcacttgccagctttggtccctctcagggggttgtggagccttgccacaggccgctatgctaacacctcctcaagaaagcgaaatggaagcaccggatttggacaccaggggcccggatggagtcaccccactgatgagtgccgtgtgctgcggagaagtgcagtctgggacgttccaaggggcctggctgggctgtccagagccatgggagcccctactggatggaggggcctgcccacaagctcacactgtgggcactggcgagacccccctccacctggcagctaggttttcccgccctaccgcagccagacgcctcctggaggctggggcaaatcccaaccagccagacagggctggtagaaccccactgcacgcggctgttgccgctgatgcccgggaagtctgtcaattgctcctgagaagccgtcaaaccgcagtagacgccaggacggaggatggaaccacacctctgatgttagccgccaggctggcggtggaagaccttgtggaagagctcatagctgcccaagcagacgtgggcgctcgggataaatggggaaaaaccgccctccattgggccgcagccgtcaataatgcacgcgccgccaggtccctcctacaagctggtgccgacaaggacgctcaggataacagggaacaaacaccgctgttccttgcagctcgcgaaggtgctgtcgaggtcgcccagctccttctgggactgggagcagcacgcgaactcagagaccaggccgggctggcccccgcggatgtagcgcaccagcggaatcattgggacctgctgaccttgctcgaaggggccggccctccagaggcccgtcataaggcaaccccggggagagaggcaggccctttccccagggcacgaacggtgtccgtctctgtccctccccacggcggcggtgccctgccacggtgtagaacactgtcggcgggtgccggtccgagaggcggcggggcctgcctgcaggcccgcacctggagcgtggacttggcagcccgggggggtggcgcctattcccactgcagatccctgagtggtgtaggagcgggcggaggacctacaccacgggggaggagattttccgcaggcatgagagggcctcgcccaaacccagccattatgcgaggtaggtatggcgtggcagccgggagaggtggtcgggttagtacagatgattggccttgcgattgggtcgccctgggagcttgcggcagcgcgtcaaatatcccaatacccccaccatgcctgactccttctcctgagaggggcagtcctcagcttgactgcggccctcccgccttacaggaaatgccaattaaccaaggtggggaggggaagaagtag

SEQ ID NO: 126736 - DNA, 6012 bp, synthetic construct
  misc_feature 1..6012: note = Description of Artificial Sequence: Synthetic coding sequence
  source 1..6012: mol_type = other DNA
atgcaacccccctctctgttactcctgctgctcctgctgctcctcctctgtgtgagtgtcgtacggcctagggggctgctgtgcggctctttccccgaaccatgtgcaaacggggggacgtgcctgagtctgagcctaggccaggggacatgccagtgtgcccccggattccttggagagacttgccagttccctgatccttgccagaatgcacagctttgtcagaacggaggctcttgccaggcattgctgcctgctcctctcggccttccgtctagcccgagcccacttaccccatcgtttctgtgcacgtgccttccaggatttaccggggagcgttgccaggcaaagcttgaggatccttgtcctccgtctttctgctccaagagaggtcggtgccatatccaggcatcaggcaggccacagtgctcatgcatgccagggtggaccggcgaacagtgccagttgcgggatttctgtagcgcgaatccctgcgtcaacggcggcgtctgtctcgctacgtacccccagattcaatgtcactgtcctcctgggttcgagggacacgcttgcgagcgcgatgtgaacgaatgctttcaagaccctggcccgtgccccaagggcacatcttgtcacaacacacttggttcttttcaatgtctgtgtcccgtcggccaggaagggcctagatgcgagctgcgcgccggtccatgtccgccgagaggttgtagtaacggcggcacctgccagctgatgcccgaaaaggactcaacttttcatttgtgtctttgcccgcccggattcattggacccgactgtgaggtgaatccagataattgtgtaagccaccagtgccagaacgggggtacttgccaagatgggctggacacttacacatgcctctgccctgagacttggacggggtgggattgctccgaggacgttgacgaatgtgaaacccaaggtccccctcactgtaggaatggcggaacttgtcaaaattcagcaggcagctttcattgcgtatgtgtgtctggttggggtggcacatcctgcgaagagaacctggacgactgcattgctgccacctgcgcacctgggtcaacttgtatcgaccgcgtggggagtttctcatgcctgtgtccccccgggcgcacaggacttctttgccacctggaagacatgtgcctatcccagccatgtcacggcgatgctcagtgcagcactaatccactgacaggcagcacactctgtctctgccaacctggatacagcgggccaacttgccaccaagatttggatgagtgtctaatggcccagcagggcccctctccttgcgagcatggagggtcatgtttgaacaccccagggtcgttcaactgtctatgcccccccggctacacgggatcccggtgcgaggccgatcacaacgaatgtctgtcccagccctgccaccccggatctacatgcttggatttgctggcaaccttccactgtctgtgcccacctggactcgaaggccagctgtgcgaagtggaaaccaacgagtgtgcaagtgctccttgtctcaatcacgctgactgtcatgacttattaaacggctttcagtgtatctgtctcccaggattttccggcacccgttgcgaggaggatatcgacgaatgtaggtcatccccttgtgctaatggcgggcagtgccaggatcaacccggcgctttccattgtaagtgtctgcctgggtttgaaggccctcggtgtcaaactgaggttgatgaatgtctgagcgacccatgtcctgttggcgcttcatgtctggacctcccaggggccttcttctgtctgtgtccttccggtttcactgggcagctgtgcgaagttcctttgtgcgcccccaatctctgccagcccaaacagatctgcaaggatcagaaggataaggcgaactgcctgtgccctgacggaagcccgggatgtgctccacctgaagacaattgcacttgccatcatggtcactgccagagatccagctgcgtttgtgatgtcgggtggactgggcccgaatgtgaggccgaactcggcggatgcattagcgcgccttgcgcccatggcggaacttgctacccgcaacctagtggatacaactgcacgtgccctactggatacactggcccaacctgctccgaggagatgaccgcctgtcactcaggcccctgtctgaacggcggaagctgtaacccctcacctggcggctactactgcacctgcccgccctcacacacaggcccccagtgtcagacatctactgactactgcgtctccgctccatgtttcaacggcggcacctgcgtgaaccgacctgggaccttttcatgtctctgcgcaatgggcttccagggtccgaggtgtgagggcaagttgagacccagctgtgcagattccccatgtagaaacagagcgacatgtcaagactccccacaggggcctagatgcctgtgcccaactgggtatacaggcggtagctgccagacgctgatggatctctgcgctcagaaaccatgcccaagaaattcacattgcttacagacggggccctctttccattgcctgtgcttgcaggggtggacaggaccactgtgcaatctcccgttgtcgtcctgtcaaaaggccgcactcagtcaggggatcgatgttagttccttatgccacaatggtgggctttgtgttgactctggaccatcctacttttgccactgtcctcccggcttccaaggatctctgtgccaggatcacgtcaacccatgtgagagcaggccttgtcagaatggagcaacttgcatggcccagccgtccgggtatctctgccaatgcgcccccggctatgatggccagaactgctccaaagaattggacgcatgccagagccagccttgccataatcatggaacttgtacccctaaacctggaggttttcactgcgcctgtcctcccggcttcgttggtctgcgctgcgagggcgatgtcgacgagtgcctggaccaaccctgtcatccgactgggaccgcagcctgccactctctggcaaacgccttctattgccaatgcttacctggacacaccgggcaatggtgcgaagtggaaattgatccgtgccactctcaaccatgctttcatgggggtacttgcgaggcgaccgctggctcccctttaggcttcatatgccactgccccaagggatttgagggaccaacttgtagccaccgtgctccatcctgtggattccaccactgccaccacggggggctgtgcttgccatcgcctaaacccggttttcccccccgctgcgcgtgcctgagtggctacggcgggcccgactgcttgacccctcctgcccctaaaggatgcggccccccatcaccttgtctctacaacggttcgtgctctgagactaccggattaggaggaccagggtttcggtgcagctgtccacactcatccccaggtcctcggtgtcaaaaacctggagccaagggctgcgaaggcagatcaggagacggcgcatgcgatgcaggctgcagcggcccaggtggtaactgggatggcggggattgctcgctgggggtaccagatccctggaaaggctgcccctcccattctaggtgctggctcctgttcagggatgggcagtgtcaccctcaatgcgactccgaggaatgcttatttgatgggtatgactgtgaaacaccccctgcctgcacccctgcatacgatcagtactgccacgatcacttccacaatggtcattgtgaaaaaggatgtaacacggccgaatgtgggtgggatggaggggactgcaggcccgaagatggggatccagagtggggcccttccctggctctcctagtcgttctgagcccccccgcccttgaccaacagctcttcgcactggccagggtactgtcacttacacttagggtgggtctgtgggtgcggaaggaccgcgacgggagagacatggtgtatccctacccgggcgcccgtgccgaagagaagctggggggcactcgggaccctacatatcaagaaagagcagctccccagacccagcctctgggcaaggaaactgatagtctttcagcaggcttcgtcgtggtgatgggtgtggatctgagcaggtgcggccctgatcatccagccagtcgttgcccctgggaccctggccttctactgcgcttccttgcggccatggcggcagtgggggccctagagccactactgccaggcccattgctcgcagtgcacccacacgcgggtaccgccccaccagcaaaccaattgccttggccggtcctgtgcagccccgtcgccggtgttatccttctcgcactgggagccctccttgttcttcagcttattcgtaggagacggagagagcacggggcgctatggctgccccccggattcactaggcgaccacgaacacagtctgcccctcataggcgtcgcccaccgttgggtgaagactcaattggtcttaaggccctgaagcctaaggccgaagtagacgaagatggagtggtgatgtgctctggcccagaggagggcgaggaggttgggcaggccgaggagaccggtcccccctccacctgtcaactgtggtcgttgagtggtggttgtggcgccctgccccaggccgctatgcttacgccgccacaggaatctgaaatggaagctcccgatctggacacccgtggtccggatggtgtcacccctcttatgtctgctgtctgttgcggcgaggtgcagtccggcacgttccagggggcatggctgggctgtcctgaaccatgggagcccttgctcgatggtggcgcatgccctcaggcacacacggtaggtacaggggagacacccctgcacctggccgccaggtttagcaggccaactgcagctcggagactcttagaggcaggcgctaacccaaaccagcccgacagagctggccgcacccccctgcatgctgccgtggcggccgatgctcgcgaggtctgtcagcttttgctcaggagccgtcaaacggcggtggatgctcggactgaggatgggacaacacccctgatgcttgccgctaggctggcagtggaggacctggtcgaggagctgatcgcggcacaggccgatgtcggtgcccgcgataagtggggaaagaccgctctgcactgggctgcggccgtcaacaacgctcgagccgctaggtccctgcttcaagccggggctgataaagacgcccaagacaatcgcgagcagactcccctattccttgcggctagagagggcgcagtggaagtcgcccaactcttgctggggctaggggccgcacgagaacttcgcgaccaggctgggctggctcctgccgacgtggcccaccagcgtaaccactgggatttactcacgctactggaaggcgcaggtccaccagaggcgagacacaaagcaacccccggaagggaggccggtccctttccgagagcccgcaccgtaagtgtgagtgtgccacctcatggcggaggggcacttccaagatgtcgcaccctgtccgccggagccggaccgagagggggcggtgcgtgtttgcaggcacggacctggtcagtggacctggcagctcgcgggggaggtgcgtattcacattgccgcagtcttagtggggtcggcgccgggggagggcccacccccagaggcaggcgcttcagtgccggcatgagaggaccacggccaaacccagcgattatgcgcgggagatacggcgtggcggcgggtcgtggcggacgagtctcaaccgacgactggccatgtgattgggttgcactgggcgcttgcggcagcgcatccaatatcccaatccccccaccatgtctgacacctagcccagaacgaggatcaccacagttggattgcggacccccggcactgcaggaaatgccaatcaaccaggggggggaggggaagaagtag

SEQ ID NO: 126737 - DNA, 561 bp, synthetic construct
  misc_feature 1..561: note = Description of Artificial Sequence: Synthetic coding sequence
  source 1..561: mol_type = other DNA
atgtccgccgtctgctgcggcgaagtgcagagcgggacgtttcaaggggcctggctggggtgtcccgagccatgggaacctctgctagatggaggggcatgcccacaggcccatacagtcgggaccggcgaaaccccattacatctcgccgctcgattttcgcgacccaccgcggccaggcgtcttttagaggcaggagcgaatccgaatcagccagaccgggccggtagaacccctctgcatgcggccgtcgcagctgacgccagggaagtgtgccagctgctactccgatcaagacagaccgctgtggatgctagaacggaagacggcacaaccccattaatgttggcggctcggctggctgtcgaggacctcgtggaggagctgatcgcggctcaggccgatgtgggagccagggacaaatggggcgccgacgctgccatcccaggtggagcaggtagaagcggcggttcatcacccgctaccgccggagcgggaggctcacctcgagcggctggccctggatgggctagtgccggagggaggagatcacccacatag

SEQ ID NO: 126738 - DNA, 561 bp, synthetic construct
  misc_feature 1..561: note = Description of Artificial Sequence: Synthetic coding sequence
  source 1..561: mol_type = other DNA
atgtcggcagtgtgctgcggggaagtgcagtcagggacatttcagggcgcctggctcggatgcccagagccctgggagccactgctggacggaggcgcttgccctcaggcccacacggtaggtacaggcgaaaccccactccacctggcagcccgattcagtcggcccacagcagctcgccgcttgctagaggctggtgccaacccgaaccagcctgacagagctgggaggacaccacttcatgcagctgtagccgctgacgctcgggaggtgtgccagttactgttacgcagtcgccagacagccgtggatgctcgaaccgaagacggtaccacacccttgatgctagccgctaggctggctgtagaggacttggtggaggaactgatcgcggcacaagcagacgtgggggctcgggataagtggggcgctgatgctgccattcctggcggggccggcagaagtggcgggagctctcccgcaaccgccggggccggcgggagtcctagagccgcaggccccggctgggctagcgccggagggcggcggagccccacatag

SEQ ID NO: 126739 - DNA, 561 bp, synthetic construct
  misc_feature 1..561: note = Description of Artificial Sequence: Synthetic coding sequence
  source 1..561: mol_type = other DNA
atgtccgctgtgtgctgcggagaggtccaaagcgggacattccaaggtgcatggttaggatgcccagagccgtgggagcccctgctcgacggtggggcctgcccccaggcgcacactgtcgggacaggagagactccacttcaccttgccgctcggttctccagacccaccgcagccaggagactgttggaagctggcgcaaacccaaatcaaccggatcgagccgggcggacccctctgcatgccgccgttgctgccgatgcacgcgaggtgtgtcagctcttgctccgcagtcggcaaactgccgtggatgcccgcaccgaggacgggacaactccactaatgttagcagcacgactcgcagtggaagacttagttgaggagctcatagcagctcaagcagatgtgggagcccgggataagtggggtgcagacgcagccatcccagggggcgcaggacgctcaggcggtagctcgccagctactgcaggtgctggggggagtcccagagccgctggtcctggctgggcatctgccggagggcggcggagtcctacatag

SEQ ID NO: 126740 - DNA, 561 bp, synthetic construct
  misc_feature 1..561: note = Description of Artificial Sequence: Synthetic coding sequence
  source 1..561: mol_type = other DNA
atgtccgctgtttgctgcggagaggtccaaagcggaacatttcagggggcgtggctaggctgtcccgagccatgggagccactgctggacggcggcgcttgccctcaggcacacacagttggtacaggcgagacccctctccacctggcggctcgcttcagccgacccactgctgccaggagactgttagaggccggggccaatcccaatcagcccgaccgggctggccgaaccccactgcacgcggctgtcgccgctgacgccagagaggtgtgtcagctgttgttacgctcccgacaaactgcagtggacgcccggactgaagacgggacaacgccactgatgttggcagcacgactcgccgtcgaagaccttgtcgaggaactgattgctgcgcaggccgacgtcggggctcgagacaaatggggcgctgatgccgccatccccggcggcgccgggaggtctggaggcagtagccccgctactgctggggcaggcggcagtcctagggcggccggcccagggtgggctagtgccgggggccgaagatcccctacctag

SEQ ID NO: 126741 - DNA, 561 bp, synthetic construct
  misc_feature 1..561: note = Description of Artificial Sequence: Synthetic coding sequence
  source 1..561: mol_type = other DNA
atgtctgcagtgtgttgtggcgaggtgcagtccggaaccttccagggggcgtggctcggatgtccagagccgtgggagccactacttgacggtggtgcatgtcctcaggctcataccgtaggtactggagagaccccactgcaccttgcagcacggttctctaggccgaccgccgcaagaagactgctcgaagctggcgccaacccaaaccagccagaccgggccgggcggacacccctgcacgcagccgtagccgccgacgcccgggaagtgtgtcagcttctgctgcgtagcagacagaccgctgttgatgcccgaactgaggacggcacaacgcctctgatgctcgcagcccgcttggctgtcgaagatctggttgaagaactgatagccgcacaagccgatgtgggcgctagggataagtggggagctgacgcagctataccaggtggagcaggacggtccggcggctcatcccctgctaccgccggcgccggagggtcccccagagccgccggacccgggtgggcctcagcaggaggccgcagatcgccgacttag

SEQ ID NO: 126742 - DNA, 1491 bp, synthetic construct
  misc_feature 1..1491: note = Description of Artificial Sequence: Synthetic coding sequence
  source 1..1491: mol_type = other DNA
atgggacgcggagtcagagtgctgttactgctgtcccttctgcactgtgctggagggtctgaaggtcgaaaaacctggcgtagacggggacagcagccaccgcctcctcccagaactgaagctgcccctgccgcaggacagcctgtagaaagttttccgctagacttcaccgccgttgaaggaaatatggactcatttatggcacaggttaaatcccttgcccagagtctttatccatgcagcgctcaacagctgaacgaggacctccgccttcatctgctgctcaacaccagcgtgacctgcaacgacggatctcccgctgggtactatctgaaagaaagccgaggtagccgtcgctggttactgtttctggagggcggatggtattgctttaaccgcgagaattgcgacagcagatatgatacaatgagacgccttatgtcctcccgtgactggccccggactcgaacaggaaccgggatactgagctcgcagcccgaggagaatccatattggtggaatgccaacatggtgtttatcccctactgctcctcagatgtttggtcaggcgcctcttctaagtcggaaaaaaacgagtatgccttcatgggcgccctcatcatccaggaagtggtgcgagaattgctcggcagagggcttagtggtgccaaagtgttactgctagcaggtagctcagcgggtggtactggagttctcctaaatgttgatcgggtggccgaacagctggaaaagctgggttaccccgccattcaagtgagagggctggccgactctggatggtttctcgataataagcagtatagacacaccgattgcgtggatacaattacttgtgctccaactgaggctattaggcggggaattcggtactggaacggggtggtgccagagcgatgtagaagacagttccaagaaggggaagagtggaactgcttcttcggatataaggtgtatcctacgttgcggtgtcccgtgttcgtcgtccaatggctgtttgatgaagcccagctcaccgtagataacgtgcatctgacggggcagcccgtgcaggagggacttcggttgtacattcagaatttgggtcgggagctgaggcacacgcttaaggatgtgcccgctagtttcgcgcctgcttgcctgtctcatgaaatcatcatccggtcccattggactgatgtccaggtgaaggggacatctctccccagagcacttcactgctgggacagatccctgcacgactctcacaaggccagcaagaccccactgaagggatgtccagtgcacttggtcgacagttgtccctggccccattgcaacccgtcctgtcctaccgtgagggatcagttcaccgggcaggagatgaacgttgcccagttcctgatgcatatgggcttcgatatgcagaccgtggcccagcctcaaggactggaacctagcgagctacttggcatgctctcgaacgggtcttag

SEQ ID NO: 126743 - DNA, 888 bp, synthetic construct
  misc_feature 1..888: note = Description of Artificial Sequence: Synthetic coding sequence
  source 1..888: mol_type = other DNA
atgggccgaggcgttcgagtgctgctgctactgagtctgctgcattgtgctggaggatctgaaggcagaaagacatggcggaggcggggacagcagccaccccctcccccaagaaccgaagctgcacccgccgcagggcagccagtggagtcgtttcctttagatttcacagccgtggaagggaacatggattctttcatggctcaagtgaagtctcttgctcagtcactatatccctgtagcgcacagcaactgaacgaggatctgagactccacctgttgctgaatacctctgtgacatgtaatgatggtagccctgctgggtattacctcaaggagagccggggcagtcgtcgctggctcctctttctggagggaggatggtattgcttcaatagggagaattgtgactctagatacgacacaatgcggcgactcatgtcaagccgagactggccccggactcgaacaggcaccgggatcctgtccagtcagcctgaggagaacccctattggtggaacgccaacatggttttcatcccgtattgtagcagcgacgtctggtcgggcgcttctagcaagtccgagaagaatgaatacgcatttatgggggcattgatcattcaggaagtggtgagggagctgctgggccggggcctgtccggtgctaaggtgctcttgctagcgggttcctccgcaggggggacaggcgtgctcctgaacgtggatagggttgctgagcagctcgagaaattaggataccctgctatacaggtgcggggcttagcagactccgggtggttcctagataataagcaatatcgccacacagactgcgttgacaccataacctgcgctcccacggaggctatcagacgcgggatttag

SEQ ID NO: 126744 - DNA, 4080 bp, synthetic construct
  misc_feature 1..4080: note = Description of Artificial Sequence: Synthetic coding sequence
  source 1..4080: mol_type = other DNA
atggccgaagccggactgcgtggctggctgctttgggcccttttactgaggctagcacagagcgagccctacaccaccattcaccagcccggctactgcgcattttacgatgagtgtgggaagaatccagagctgagcggctccctcatgacattgtctaacgtcagctgtctatcaaatacgcccgctaggaagattacgggggatcatcttattctgctgcaaaaaatatgtccgcgactgtacacaggacctaacacacaggcatgctgctctgcaaaacagttggtgtcccttgaagcttctctatctataactaaggccctgctaacccggtgtccggcctgctctgataactttgtgaacttgcattgtcataacacgtgttctcccaatcagagcctgttcatcaacgtcacacgcgttgcgcagctcggggcggggcaacttcctgctgtcgtggcttacgaggccttttatcagcacagcttcgccgagcagtcctacgattcttgttcgagggtgagggtgcctgccgctgctactctggcagttggcactatgtgcggagtatacggatcagcactttgcaatgcccaacgctggctgaactttcaaggagacacgggaaatggactggcacctctggatatcacattccacctgctggaaccagggcaggccgttggaagcggaattcagcccctcaacgaaggcgtagctcgctgcaatgagtcacagggggacgacgtcgccacttgtagctgccaggactgtgctgctagttgtcctgcaatagcccgaccacaggctctcgactccacgttctacctagggcagatgcctgggtcgctcgtgctgatcataatcctgtgctctgtgttcgctgtagtgactatacttctggtaggctttagagtagctcccgctcgagacaagtctaagatggtggatcccaagaaagggacctccctgtcggataagctgtctttttcgacccacacactgctcggccagttttttcaaggttggggaacatgggtcgcaagctggcccctaactattctggtactctcagtcatcccggtcgttgccctggccgccggtctggttttcactgaattaaccactgaccctgtggaactgtggtccgccccgaactcccaggcccgttctgagaaggccttccatgaccagcacttcgggccctttttcaggactaatcaggtgatcctcaccgcgccaaaccgcagctcctataggtacgactctttattgctgggaccaaagaatttctccggcatactagacctagatttgctgcttgagttgctggaactgcaggaacgattacggcacttgcaagtttggagccccgaggctcagcgtaatattagtctgcaggacatttgttacgctcctctgaacccggacaacacctcactgtacgactgttgcatcaatagcctgctccagtattttcagaacaaccgcactctgctcctcctcaccgcgaatcagactctgatggggcagacgagccaggttgactggaaggatcactttctgtactgcgccaatgctccattaacttttaaagatggtactgctttggccctctcgtgtatggctgattatggcgcgcctgtcttccccttcctggccattggagggtataagggcaaggattattctgaagccgaagcattgataatgaccttttcgctcaacaattaccccgcaggagatccacgcctggctcaggcgaaactctgggaggaggcattcttagaggaaatgcgggccttccagcgccggatggctggcatgttccaggtcacatttatggccgagcggtccctggaggatgagatcaatagaactacggctgaggacctaccaatctttgctacttcctatatcgtgatctttctgtatatctctttagcactggggagttacagctcttggtccagggtgatggttgatagtaaggccacgctggggctcggcggcgtggcggtggttctaggcgccgtgatggcagcaatggggtttttcagctacctgggtattagatcatcactagtgattctacaagtggtgcctttcttagtcctgagcgttggggcagataatattttcatttttgtcttagagtaccaacggcttccgcgcaggcctggcgaaccacgcgaggtccatattggacgcgcactgggcagagtggcacctagcatgctactgtgcagtctgtcagaagctatctgcttcttcctcggggctctgacccccatgcctgctgtacgaacattcgcccttacatctggtctggctgtgatccttgattttttgttgcagatgtctgcctttgttgcattgctgtctctggacagtaaaagacaggaggcgtctcgcctggatgtgtgttgttgcgttaagcctcaggaattgccaccacctggacagggagaaggcctccttctgggcttcttccagaaggcttatgctcccttcctacttcactggattaccaggggcgtggtactgctactgttcctggccctcttcggcgtctctctttattctatgtgtcatattagcgttggcctcgatcaggagctggctctgcctaaagacagttacttacttgactattttctattcctgaaccgctacttcgaggtcggcgcgcccgtgtatttcgttacgacacttggctacaacttttcaagcgaagccgggatgaacgccatctgcagttcagcagggtgtaataacttctcattcacccaaaagatccagtacgcgactgagttccctgagcagagttatctggctatcccagctagctcctgggtggacgattttatcgattggctgacgcccagctcatgctgtaggctctacatttctgggcctaataaggacaaattttgtccatcgaccgtgaatagcctgaactgtctcaaaaactgtatgagcataactatgggatccgtacggccatctgtcgaacagttccacaaatatttgccttggtttcttaacgatagacccaacatcaagtgcccgaagggtgggttggccgcctattccactagtgtgaacctgaccagcgatgggcaggttctggataccgtcgccatcctgtctccgcgactggagtattccggcaccataagcgcccattgtaatttatatcttcttgacagcacctcccgttttatggcctatcataaacctcttaaaaacagccaagattacactgaagccctgcgcgccgcccgtgaattagccgcaaatatcacggccgacttgcggaaagtgcctggtaccgaccctgcttttgaggtgtttccatacactatcaccaatgttttctatgaacagtacctaactattcttcctgagggcctgtttatgctgtcactgtgcctggtgcccactttcgctgtctcatgcttgctgcttggcctcgacctgcgttcagggctcctgaatctgttatctattgtgatgatcctggttgatactgtaggattcatggccctgtgggggatttcttataacgcagtttcgctgattaacctagtctcagctgtgggtatgtctgtggaattcgtctctcacatcactcggagttttgccatcagcactaagccaacgtggctcgagagggctaaagaggcgactatctctatgggttctgccgtttttgcaggtgtggccatgacaaacctgccaggcatcctagtgctgggacttgcaaaggcacagcttatccagatattcttctttcgcttgaatttgctgattaccctgcttggcctgctgcatggcttagtgttcctgcccgtcattctttcctacgtcggccccgacgtgaatccggccctggcgctggagcagaaacgggctgaagaagccgtggccgctgtgatggtggcttcatgtcccaaccacccctcccgcgtttccaccgccgacaacatatatgttaaccatagctttgagggcagcattaagggggccggcgccatctcaaatttcctgccaaataacgggagacagttctag

SEQ ID NO: 126745 - DNA, 3999 bp, synthetic construct
  misc_feature 1..3999: note = Description of Artificial Sequence: Synthetic coding sequence
  source 1..3999: mol_type = other DNA
atggctgaggccgggctaagaggctggttactttgggctctattgctgaggctggcgcaatccgagccatacaccaccattcatcaacctggatactgcgctttttatgacgaatgcggaaaaaatcctgagttatctggtagcttaatgactctgtcaaatgtgagttgtctctctaacaccccagcccgcaaaataactggcgatcacctgatcctgctacagaagatctgtccccgtctatataccggcccaaacacccaggcctgttgctctgctaagcagctggtctctttagaggcctccctgtctataaccaaggccctgctcacccggtgtcccgcgtgttccgacaacttcgtcaatttgcattgccataacacttgttctcctaatcagtccctgttcatcaacgttactcgggtggctcagttgggcgctggtcaactcccagctgtcgtagcatacgaagccttttatcagcacagcttcgccgagcaatcttacgacagttgctccagagttagagttccggctgcagctaccttagccgtcggaacaatgtgtggcgtttacggctccgcgctctgcaatgctcagagatggctcaattttcagggtgatacaggcaacggtctggctcccctggatataacctttcatctgctggagcccggccaggctgtaggctcgggaatacagcctctcaatgaaggcgtggcacggtgtaacgaaagtcagggcgatgacgtagccacttgttcgtgtcaggattgtgctgcgtcatgtccggctatcgcccgcccccaggctcttgactcgactttctatctgggccagatgcccgggtccctcgtcctaattataatcctgtgcagtgtttttgccgtggtgacaatattgctcgttggatttcgagtcgctcctgcgagagacaagtcaaagatggtagacccgaaaaagggaaccagtcttagtgataaactaagcttcagtactcataccctgctcgggcagttttttcaggggtggggcacttgggtggctagctggccacttaccatccttgtgcttagcgtgattcccgtggtagctctggcagcaggactggtgttcacagaactgaccaccgatccggttgagctgtggtctgctccaaattcccaggcgaggtccgagaaggcgttccacgaccagcattttggccctttctttagaactaaccaggtcattctgaccgctcccaatcggtcaagttatcgctatgattctctgctcctggggcctaagaacttttccggaattttggatctcgacctcctccttgaactgctcgagctgcaggagcggctgcggcacttacaggtctggtcaccagaggcccaacgaaatatatccctgcaggatatttgctatgcaccactaaatccagataatacatcactgtacgactgctgtatcaattccctgctccaatattttcaaaataacagaaccctgctgcttctgaccgccaaccaaacccttatgggccagacttctcaagtggactggaaggaccattttctgtactgcgccaacgcccctctaacctttaaagatggcacagcattggccctgtcctgcatggccgattacggcgcacccgtatttccatttcttgccataggaggctacaaaggtaaggattactctgaggcggaggccctgataatgacttttagcctcaataattaccccgccggggatccacggctggcgcaggccaagctgtgggaggaggcatttcttgaagaaatgagagcctttcagcggcgcatggccggaatgtttcaggtgactttcatggcagagcgctccctggaagacgagatcaataggactaccgccgaggacctgccgatcttcgcaacctcatacatcgttatcttcctgtacataagcctggcccttggatcatattcctcttggtcgagggtcatggttgattctaaagccaccctggggctgggcggggtggcagtcgtgctcggcgctgtcatggccgccatgggctttttctcttatttaggaattcggagttcattggtgatcttacaggtggtcccatttctcgtgctgagtgtaggggctgacaacattttcatttttgtgcttgagtatcagaggctgccccgacgcccaggagaaccccgagaagttcacattgggcgggctttgggtcgggtagcaccctctatgctgttgtgctcgctctcagaggccatttgcttctttctcggggccttgactcccatgcctgctgtgaggacttttgctctcacgtccggtcttgccgtgatcctggattttctgctgcagatgtctgcctttgtggcccttcttagtttagatagcaagagacaagaggctagcagactggatgtgtgttgctgtgtgaagccgcaggagctcccgcctcccggccaaggcgaaggactgctactgggcttctttcagaaagcatatgccccttttctgctgcattggattactcgcggggttgtgttgctgctgtttcttgctctgttcggcgtctcattatatagcatgtgccacatttctgtgggtctcgaccaagaactggcccttcccaaagattcctacttacttgactacttcctgttcctcaaccggtactttgaagtaggggccccagtttacttcgtgacgacactaggatataacttctcctctgaggcaggaatgaacgccatatgttcaagtgccggatgcaacaatttcagctttacccaaaaaattcagtacgccacggaattcccagaacagtcttacctggccatccccgccagttcctgggtggatgactttattgattggctgacacccagcagctgttgtcgcttgtacatttccggacctaacaaagacaagttttgtccctctactgtaaattcgttgaattgcctgaaaaactgtatgtcgattaccatgggcagtgtgcgtccatccgtggagcagtttcataagtatctgccttggttccttaatgatcggcccaacatcaagtgtcctaaggggggccttgccgcctactccacatctgtaaatttgacaagcgacggacaagtgctggcttcacgcttcatggcctaccataaacctctgaaaaacagtcaggactataccgaggcactcagagcagctcgggagctcgccgctaacatcaccgccgatctgcggaaggtgcctgggactgatccagccttcgaagtatttccatatacaatcacaaatgtcttctatgaacaatatctgactatcttgccagaaggactgtttatgcttagcttgtgcctggtgccaacctttgccgttagctgcctactgctcggactggaccttcgttccgggctgttaaacctgctcagcattgtgatgatcctcgtcgatacggtggggttcatggccttgtggggcatctcctacaacgctgtcagccttattaatttggtcagtgctgtcggtatgtctgtggagttcgtttcccacatcaccagaagcttcgccattagcaccaagccaacctggctggaaagagcgaaggaagctactatcagcatgggctctgccgtgtttgccggagtcgcgatgacgaatttgcctggaatcctggtcctggggttggcaaaggcacagctgattcagatcttctttttcaggcttaatctcttaatcaccctgctcgggctgctgcatgggttagtttttctcccagtgatcctttcctacgtggggcctgacgtcaatcctgccctcgccttagagcaaaagcgcgcggaggaggctgtggcagcagtgatggtcgcctcctgcccaaaccaccctagtagagtttccaccgctgacaacatctatgtgaatcactcattcgaggggtccattaagggcgcaggggctatctcgaattttctgcccaataatggacgccaattctag

SEQ ID NO: 126746 - DNA, 3861 bp, synthetic construct
  misc_feature 1..3861: note = Description of Artificial Sequence: Synthetic coding sequence
  source 1..3861: mol_type = other DNA
atggcagaagccggcctgcggggatggctcttatgggccctcctgctgcgcttagctcagagtgagccctataccaccattcatcaaccggggtactgtgcattttatgacgagtgtggcaaaaaccccgagctgtcgggctccctgatgaccctgtccaacgtcagttgcttatcaaatacacccgcccgtaagattacaggagatcatttgattttgttgcagaagatatgcccaagactttacaccgggcccaacacccaggcatgctgctctgccaaacaattggtgagtctggaggcgagcctctcgattacaaaagccttgctgactcggtgtccggcctgctccgacaactttgttaatctgcactgccataacacatgtagtcccaaccaaagcctcttcatcaatgtcacccgcgttgctcaactgggagcagggcagcttcctgcagtggtggcctatgaagcattttaccagcactccttcgccgagcaaagctacgactcctgcagcagagtgagggtacctgctgcggctacactggccgttgggacgatgtgcggcgtatacggaagcgcactgtgtaacgctcagagatggctgaattttcaaggagataccggtaacggcttggcgcctcttgacattacattccacctgctcgagcctggccaggccgtaggttccggcattcagccactgaacgaaggcgtcgcccgatgcaatgagagtcagggggacgacgtggctacttgctcatgtcaggattgcgctgcatcttgccccgcaatagcaaggccccaggcactcgacagtacattttatctgggccagatgcccgggtcactggtgctgataatcatcctgtgctctgttttcgccgtggttaccatactcctggtcgggtttcgagtcgcaccagcccgggataaaagcaaaatggtggatccaaagaaagggacctccctgtctgacaaattatcattttccacccacacactgctcgggcagtttttccaaggatggggcacttgggtcgctagctggccactcactatcctagtcttaagcgtcattccagtggtcgctttggccgctgggctggtgtttacagaactcacgaccgaccccgttgagctctggtctgccccaaacagccaggcccgctcagagaaagcttttcacgatcaacatttcggcccttttttcaggaccaatcaagtgatcctcaccgcgcctaacaggtcttcttacaggtatgacagtctcctgctgggtcctaagaatttcagtggtattctcgacctggatctcttactcgagcttttggaactgcaggagagattaagacacctgcaggtgtggagtccagaagcccagcgcaatatttctcttcaggacatttgttacgcgccgttgaatccggataatacatccctgtatgattgttgtattaactccctgttgcagtattttcagaacaatcgaacactcctcctcctcaccgctaaccagaccctgatgggccaaacatcgcaggtggactggaaggaccacttcctgtactgtgcaaacgcaccactcacattcaaggacggcacagctttagcgcttagttgcatggcggactatggagcgccagtgttcccatttctggccataggagggtacaaggggaaagattactcagaggccgaggcccttattatgaccttttcacttaacaactatccggcaggtgacccccgtttagcgcaagcaaaactatgggaagaagcctttttagaggaaatgcgtgcattccagcgaaggatggctggaatgttccaggtcacttttatggcagagcgcagcctagaggacgagatcaaccgaaccactgccgaggaccttccgattttcgctacaagctacatcgtcatttttctctacatttccctggccttgggatcatacagctcctggagtcgggtcatggtggactctaaagctacccttggactgggcggcgttgctgtggtgctaggtgcagtcatggccgccatggggtttttctcttacctgggcatccgaagttcactagtgattttacaggttgttccctttctggttctttctgtgggtgccgacaacatctttatcttcgtccttgagtaccaacgtctcccccgacggcctggtgagcctcgagaggtccatatcggcagggctctgggccgggttgcaccatctatgctattgtgcagccttagcgaagccatctgcttttttctgggagcgctgactcctatgcccgccgtcagaacattcgccttgacctcaggacttgccgtgatcctagactttctattgcagatgtcagcttttgtggctctgctgtctcttgattcaaagcgccaggaagcttcacgattagatgtgtgctgctgcgttaagcctcaggagttgcccccgcccgggcagggcgagggtctgctgttgggattcttccagaaagcctatgccccgtttctcctgcattggattacaaggggagtggtggtgggggcgcctgtttactttgtgacaacgctggggtataacttcagcagtgaagccggcatgaacgccatctgttccagcgctggttgtaacaatttttcctttactcaaaagatccagtatgctacggagtttcctgagcagagctacctcgcaatcccagccagctcctgggtggacgatttcattgactggctcacacctagctcttgttgtagactgtatattagcggtcctaacaaggataagttctgccccagcactgttaatagtctgaactgtctgaagaactgcatgtcaattacaatggggagtgtgaggccctccgtagaacagttccacaaatacttgccatggttcctgaacgataggccaaatattaagtgtccaaagggtggactggctgcttacagcacaagtgtgaatctcacctccgacggacaggtgctggcaagccgcttcatggcgtaccataaacccctgaagaactcacaggattatacagaagccttaagagctgcgcgggaactggccgcaaacatcactgcagatttacgtaaggtgcctgggactgaccctgcctttgaagttttcccctatacgatcaccaacgtgttttacgagcagtatcttaccattctgccagagggcctttttatgctctctctctgcctggtaccaacattcgcggtttcatgcctcctgctcggtctagatctcagatctgggctgctgaacctgctgtctatcgtcatgattctggtggacacagttggcttcatggccctgtggggtattagctataacgccgtcagcctgattaacctcgtcagtgccgttgggatgtcagtggaatttgtgtcacacatcactcgaagcttcgcgatctctaccaagcctacctggctggaacgtgcgaaggaggccactatctcaatgggaagcgcggttttcgccggcgtagctatgaccaatctacccgggatcctggtgctcggactggctaaagcacaactaattcagatattcttttttagactcaatctcttgatcactctcctcggccttctgcatggcctggtgtttctgcctgtgattctgagttacgttggccccgatgttaacccagccctggccctggagcagaagagagccgaggaagcagtggccgccgtgatggtggcttcctgccctaaccaccctagcagagtcagcaccgccgataatatctacgtcaaccacagctttgagggtagcatcaagggagctggcgccatctctaactttctgccaaataatggacgccagttctag

SEQ ID NO: 126747 - DNA, 783 bp, synthetic construct
  misc_feature 1..783: note = Description of Artificial Sequence: Synthetic coding sequence
  source 1..783: mol_type = other DNA
atgcctcagaatgaatacatcgagctgcaccgcaagcggtatggttatcggctcgattaccatgagaagaaacgcaaaaaggaaagccgcgaagcccatgaaagatccaagaaggccaagaaaatgatcggtcttaaggcgaaactgtatcataaacaacgacatgccgaaaagatccagatgaagaaaactatcaagatgcatgagaaacgaaatactaaacagaagaatgatgaaaaaacaccccagggcgccgtcccagcttatctcttggacagagaaggtcagagccgcgctaaggtgttatcgaatatgatcaaacagaaacgaaaagaaaaggccggcaaatgggaagtaccgctacccaaagtgcgggcacagggagaaaccgaagtcttaaaggtcattaggactgggaagaggaagaagaaggcctggaagagaatggtgaccaaggtgtgttttgtgggagacggattcacgcggaaaccccctaaatacgagcgcttcatccgccctatgggcctgagattcaagaaagcgcatgttacacacccagaacttaaggctaccttttgcctgccgattctcggtgttaagaagaatccatcctcacccctgtacacaacactcggtgtgattaccaagggaacagtgatcgaagtcaatgtgtctgagctcggcctggtaacccagggcggcaaggtcatctggggaaagtacgcacaggtaactaacaatccagaaaatgacggatgtattaatgcagtgctgctcgtgtag

SEQ ID NO: 126748 - DNA, 1509 bp, synthetic construct
  misc_feature 1..1509: note = Description of Artificial Sequence: Synthetic coding sequence
  source 1..1509: mol_type = other DNA
atgagctgtccagtgccagcctgctgcgccctgctcttagttctcggcctgtgccgggccagaccaaggaacgctctgttgctgttggccgacgacgggggtttcgagtctggcgcttataacaattcagccatagcaaccccgcatctggacgctctggccagaaggagtctgctattcaggaacgcttttacctctgtctcctcatgcagcccctctcgggctagtctgcttacaggtctgccccaacaccaaaatgggatgtatggcttgcaccaggatgtgcaccattttaactcctttgataaggtgcggtcccttcctctgcttctgtcccaggctggcgtgagaacaggcatcattggaaagaagcacgtcggcccggaaacggtttaccccttcgactttgcgtacacagaggagaatggttcagtcctgcaggtaggccgtaacatcactcgcatcaaactcctggtaaggaagttcttgcaaacgcaggatgatcgccccttctttctgtacgtggccttccatgatccacacaggtgtggtcactctcaacctcagtacgggaccttttgcgaaaaatttgggaacggagagtccggtatgggtaggatcccagactggacgccacaggcatatgatccactggatgtcctcgtgccatatttcgtgccaaacacccccgccgcccgcgctgacttggcagctcagtataccaccgtagggcgcatggatcagggtgtggggctggtccttcaagagctcagagacgcaggagttctgaatgacactctggttatttttacttcagataacgggatccccttcccttccggccgcacaaacctgtattggccaggtacggctgagccgctgcttgtatcttcccctgaacatccaaagcggtggggacaggtctcggaggcttatgtatctcttctcgacttaacaccgacaattcttgattggtttagtattccgtatcctagttacgccatcttcggcagcaaaacaatacacctgactggtaggtccttgttaccagcattagaagccgagcccttatgggcgacagtattcgggtcgcagtcccatcacgaagtgaccatgtcttatccgatgcgtagcgtacagcatcgccactttcgtttagtgcataatttgaactttaaaatgccattccccattgatcaagacttttacgtctccccaacattccaagatctgcttaacaggacaacagcaggacaacccactggatggtacaaggatttgcggcattattattaccgagcgcggtgggagctttacgaccgctccagagacccacatgagacacaaaacctggccaccgacccgcggttcgctcagcttctggagatgctccgggaccagctcgccaagtggcagtgggagactcacgatccctgggtatgcgctcccgatggcgtactggaagaaaagctgtctccccagtgccagcctctgcacaatgaactgtag

SEQ ID NO: 126749 - DNA, 900 bp, synthetic construct
  misc_feature 1..900: note = Description of Artificial Sequence: Synthetic coding sequence
  source 1..900: mol_type = other DNA
atgggccggattccggactggacaccacaggcgtacgatcccctcgatgtgcttgtgccatacttcgtgccaaacacgcccgctgctagggctgacctggcagctcagtataccaccgtcggtagaatggaccagggggtgggcctggtgttgcaagaacttagagatgccggtgtactgaacgacaccctggtaatattcacctcagacaatggaataccttttcctagcggccgcactaacttgtattggcctggtaccgccgaacccctgttggtttcttcaccggagcaccccaaacgctgggggcaggtgtctgaagcttatgtatctctgttggacctgacacctacaatcctagattggttctccatcccttacccttcatacgcaatctttgggagtaaaacgatccacctgactgggcggagcttgctgcctgctttggaagccgagcccttatgggcaactgtctttggaagtcagagccaccatgaggtgactatgagttaccccatgcgaagtgtacagcacagacattttcggctggtgcacaacctaaatttcaagatgcctttccctatcgatcaggacttctacgtgtcacctacttttcaggatctgcttaatcgcacaaccgccgggcaaccgaccggttggtataaggatctacgccattattattatagggctcgatgggagctttacgaccggagtagggatccgcacgagacccagaacctagcaaccgacccacggttcgctcagctgctggaaatgctgcgtgaccagcttgcaaaatggcagtgggaaacgcatgatccctgggtctgcgcccccgacggagttctcgaggagaaactgtcccctcagtgccagcccctgcacaacgaactgtag

SEQ ID NO: 126750 - DNA, 618 bp, synthetic construct
  misc_feature 1..618: note = Description of Artificial Sequence: Synthetic coding sequence
  source 1..618: mol_type = other DNA
atgagctgcccggtgcccgcctgctgtgccttactgctcgtgctgggcctttgtagagcgagaccccggaacgcgctcctcttgctggcagacagagcgctttcggtgtctcacttgactcagagaatgacggaagcgctcagagtggcacgcaccacaacggccccaagtccaccccggacgtggacgccctggccagctgccgccagcagttttgccatgccctccccacgctccgcagcagctctacctgccgcaccagcttcctccctggcttgtccctccatccgaatgggatgcacagggtgtacccggacttgtaccacttccacccccagtacacggtgcggagcctgtaggtgttgttccgctaagctcgtttgcgctcaggccagctcggggcgatccacatggggccggaggccgtgcacaagacttacgcttcgcactaggcgcagaatggctcctagttcccggtggggcgggacctccctggagttgtcatgtagctctggcaattcctgtcggctgcgcatgaccggcctgagtagttcgactagcccctccactacaccgaccctgtgggctttgcccgctccggtgaggaacctgttatag

SEQ ID NO: 126751 - DNA, 1191 bp, synthetic construct
  misc_feature 1..1191: note = Description of Artificial Sequence: Synthetic coding sequence
  source 1..1191: mol_type = other DNA
atggcgtgtgcggggcttctcaccgtttgcctgcttcgtccccccgccccccagcctcaaccccaaactccacggcacccacagcttgcgcccgaccccggccccgctggccacaccctttttcaggacgtgtttagaagagcggacaagaatgacgatggaaaactgtcgttcgaggagtttcaaaattatttcgctgacggtgtgttgagcttgggggagttgcaggagctcttctctggaatcgacggccatctcaccgacaacttggagaccgaaaagttatgtgactatttttccgagcacctgggggtttacagacctgtcctggccgcactcgagagtctcaatcgggctgtgcttgccgccatggatgcaactaaattggagtacgagcgagcatccaaagtcgatcaattcgtcactcggtttctactcagagagaccgtctcccagctgcaggccctccagagctctctggaaggggccagcgatactctggaagcccaggcccacggatggcggtcagatgcggaaagtgtggaggctcagagccggctgtgtggaagccgccgggcaggccggcgcgcccttcgcagtgtgagcagatcctccacttggagccctggatcgtccgataccggccggtcaagcgaggcggaaatgcagtggcgcctgcaggtcaatcgtttacaggagcttattgatcagctcgagtgtaaagttcgggccgtgggtccagggccccacaagggagggccctcttggtatccccccgaaccaggaccatgttggcgcccagggccacacagcgtgcccagtcaggccccaaggttggagcccctgcgtgaggaagatttggctaagggccccgacctgcacatcctgatggcacagaggcaggtgcaagtggcggaggaagggttacaagactttcaccgggcgctacggtgttatgtggatttcacaggcgctcagtctcactgtttgcacgtgtctgcccagaagatgcttgacggcgcatccttcaccctttacgaattttggcaagatgaggctagctggcgccgtcaccagcagtcccccggttctaaggcgtttcagagaattctgattgaccaccttcgcgctcctgataccctgaccactgtctttttccccgcctcctggtggattatgaataacaactag

SEQ ID NO: 126752 - DNA, 1089 bp, synthetic construct
  misc_feature 1..1089: note = Description of Artificial Sequence: Synthetic coding sequence
  source 1..1089: mol_type = other DNA
atggcctgcgctggtcttctgaccgtgtgtctgctcaggccacccgcccctcaacctcagccgcaaacacctcgccatccccagctcgctcccgaccccggtcccgccggtcataccctgttccaggacgtcttccggcgagcggacaaaaacgatgatgggaagctctcattcgaggagtttcaaaactactttgctgacggcgtgctcagtttaggcgaattgcaagagctgttctccggcatcgatgggcacctaactgacaacctagagaccgaaaagctatgcgattacttctctgagcacctaggagtttataggcctgtgctggccgccttggagagcctcaatagagctgtgctggccgccatggatgcgaccaagctggagtacgaacgggcctccaaagtggatcaatttgttacgcggtttctcttacgggaaacggtgtcccaactgcaggccttgcaaagtagtctggagggggcctccgatacactcgaagcacaggctcatggatggaggtccgacgctgaatccgtggaggcccaatccagactgtgcggctctcgtagagccggccgtagagctctgcgctccgtgagtaggtcttctacctggtcacctggttcttccgacacgggtcgaagcagcgaggcagagatgcagtggcggttacaagtgaaccggctccaggagctaattgatcagttggagtgtaaggccccgcggctggaacccctgagagaagaagatttggctaagggacccgacttacacatcttgatggcgcagcgacaggtgcaggtggctgaggaaggacttcaggattttcacagggcactgaggtgctatgtggactttacaggcgcccagtctcattgtttgcacgtctcggcccaaaagatgctggacggtgccagtttcaccctttatgaattttggcaggacgaggcctcatggaggcggcaccagcaaagccctggcagtaaggcattccagagaatcctgatagaccatctccgcgcccccgatactctgacgaccgttttcttccccgccagctggtggatcatgaacaacaactag

SEQ ID NO: 126753 - DNA, 870 bp, synthetic construct
  misc_feature 1..870: note = Description of Artificial Sequence: Synthetic coding sequence
  source 1..870: mol_type = other DNA
atggcttgtgctggtttgttgaccgtctgtctattgagaccacctgccccacagccacagccccagacacccagacacccacagctggctcccgatcccggccccgcaggacacaccctgttccaggacgtgttccgcagagcagataagaatgacgatggcaagcttagctttgaagaatttcagaactattttgctgacggagttcttagcttaggtgaactccaagagttatttagcggcatcgatgggcacctgactgataacttggagactgagaagctctgcgattacttctcggaacatttgggagtctatagacccgttctggcagctttagagtccctgaatagagctgtcttggctgccatggatgccacaaaactcgaatacgagagggctagtaaggtagaccagttcgtcacacgcttcctgttgcgagagacagtgagccagctgcaggctctgcagtctagtttggagggagcttcggatacactggaagcacaggcacacgggtggagatcagatgcggaatcagtagaggcacaatccagattatgcggcagccgcagagccggacgccgggctttgcggtctgtgtctaggtcttccacctggagtcctggctcatcggacacagggaggtcaagcgaggctgagatgcagtggcggctacaggtgaaccggctacaagaacttatagatcagctcgaatgcaagcatattctgatggcacagcggcaggttcaggtggccgaggagggcctgcaggactttcatagggcccttagatgttatgtggactttactggtgcccagtcccattgtctgcatgtcagcgcgcagaaaatgctggacggcgcgtag

SEQ ID NO: 126754 - DNA, 423 bp, synthetic construct
  misc_feature 1..423: note = Description of Artificial Sequence: Synthetic coding sequence
  source 1..423: mol_type = other DNA
atggcctctgtcgattttaaaacctatgtggaccaggcctgccgcgcagccgaggaatttgtcaacgtttactacactacgatggacaagcggagaaggctcctatcgaggctttacatgggtactgccactcttgtatggaatggtaacgctgtgtccggccaagagtccctttcggagttcttcgagatgctgcctagctctgagttccagatcagcgtcgttgactgccagcccgtgcacgacgaagctactccttctcagactaccgtgcttgtggtgatctgcggaagcgtcaagtttgaggggaataagcagcgcgacttcaatcagaacttcatactgacagcccaggcctccccctctaatactgtctggaagatcgcctccgattgctttagattccaggactgggctagctag

SEQ ID NO: 126755 - DNA, 984 bp, synthetic construct
  misc_feature 1..984: note = Description of Artificial Sequence: Synthetic coding sequence
  source 1..984: mol_type = other DNA
atggccgtacctgctaagaagcggaagatgaatttttccgagagagaggtcgagatcatcgtggaggagctcgaattaaaaaagcacctgctcgtgaaccatttcaacgctggtgtccccctagctgctaagtctgctgcctggcacggcattctccgtagagttaacgcagtggccacctgcagacgggagctgcctgaggtgaaaaagaagtggtccgatctcaaaaccgaagtccgccgtaaagttgctcaagtgcgagctgcggtggagggaggggaggccccgggccctacagaggaggatggggccggaggccccggaacgggagggggctcgggcggagggggacctgccgtggcgcccgtcctactcacccccatgcagcagcgcatctgcaatctgcttggcgaggctactatcatctccctaccatctacaaccgagatccatccggttgctctgggtccatcggccacggccgccgcagcgacggtgaccctaacacagatcccaacagagacgacctaccacacactcgaggagggggtcgtggagtactgtaccgctgaggcaccaccaccactcccacccgaaacacccgtggatatgatggcccagcacgccgacactagcgtcaagcctcaggctctcaaaagcagaatcgcactgaactctgcaaagctcatacaggagcaacgagtgacgaacctgcacgttaaagagattgcacaacacttggaacaacagaacgacctactgcagatgatccgaagaagtcaggaagttcaggcatgtgcgcaagagaggcaagcacaagcaatggaaggtacccaggctgccctaagcgtattgatccaagttctacgccccatgatcaaggacttcaggcggtatctccagagtaataccgcaaatcctgcccctgcctcggaccctggacaagtggcccagaatggacagcccgacagcattattcagtag

SEQ ID NO: 126756 - DNA, 1485 bp, synthetic construct
  misc_feature 1..1485: note = Description of Artificial Sequence: Synthetic coding sequence
  source 1..1485: mol_type = other DNA
atggaggtggtggaagcggcagcggctcagctcgagactctgaagttcaacggtaccgacttcggggtgggcgagggaccagctgccccatctcccggctctgccccggtgccggggacacagccacctctccagtcttttgaagggtctccagatgcgggtcaaactgtcgaagtgaaacccgcaggggaacagcccctgcagcctgtgctcaacgcagtcgcagctggaacgcctgcaccacagccacagccacccgcagagagtccagcctgtggtgactgtgtgactagccccggtgctgctgagcctgctcgtgcacccgactctctggagactagtgactccgattccgactctgacagtgagaccgacagcgattcatcgagtagctccagcagtagctcctcaagcagcagtagcagttcgtcttcatgtatctcactgccacctgtgttgtctgacggtgatgacgatctccagattgaaaaggagaacaagaatttccctctgaaaaccaaggacgagctcctgctaaacgagttgccgtcagtggaggagctgacaattatcctccctgaagatatcgagttgaagcccctgggtatggtgtcttctatcatcgaacagctcgtgattatcgagtctatgaccaatctgccccccgttaatgaggagacagttatttttaagagcgaccgccaggctgccggaaaaatattcgagatttttggtcccgtagctcaccccttctacgttctcaggtttaatagttctgaccatatcgagagtaaaggtattaaaattaaagaaacaatgtactttgcacccagtatgaaggattttactcagtacatttttactgagaaactcaagcaggataagggcagtgacgccagctggaagaatgatcaggagcctcctccagaagccctagattttagcgatgacgagaaggaaaaagaagcaaaacaaaggaaaaaatctcagattcaggggagaaagaagctaaagtccgaattcaacgaaccaggggaagatttcacagaggtccatcagaactggaatgcccactcctcggcttccgaacatgctaaaggctacagaaaccgggagtttaccagaggctttagtagagctcgttacccccgaagctgccacggtagaccacctcctcagcacttctataactctgaacatatggtgagtcaggagacctcaggttttccttctcaaagacagaacaacccaatcatgcctcaatatccctttcccctcccggttttcgacatgcataacttcccgctgcggccccctccaccacctccacctcctcctgtgaacatgggctgggccacgccaaacatggcagcccacccactactgaatcttccgtattcgctgccaccccccccaccgcccccaccacttccccccccccctagctccggagatagtaactcccacttcgggccctactactag

SEQ ID NO: 126757 - DNA, 1170 bp, synthetic construct
  misc_feature 1..1170: note = Description of Artificial Sequence: Synthetic coding sequence
  source 1..1170: mol_type = other DNA
atggaggttgtggaggcggcggccgcacagttggaaaccctaaaattcaacgggacagactttggagtgggggagggccccgccgcaccctcaccagggagtgcacccgtccccggaactcagcccccacttcagagtttcgagggctctcccgatgccggacagacggtagaggtaaaacctgccggcgaacagcctcttcagcctgtacttaatgctgtagctgcaggaactcccgctccacagccgcagccccctgccgagtcacccgcctgcggagattgtgtaacttcccctggtgccgccgaacctgcccgagcacctgacagcctggagacttccgatagtgactccgacagcgacagcgagactgattcagattcaagctcgagctcaagctcctcttcctcatcatctagcagctcttcttcctcatgtatcagcctgccacctgtgctgagcgatggggacgacgacttacagattgaaaaagagaataagaattttcccctgaagaccaaggatgagctcctgcttaatgaactgccctccgtggaagagttgacaattatccttcctgaagacatagaacttaaacccctggggatggtgtcatccatcattgaacagctcgtgatcatcgaaagtatgacaaatctaccccccgtaaacgaggaaaccgtgatattcaagtctgatcggcaggccgcagggaaaatttttgagatctttgggcctgtggctcaccccttctacgtgctcagattcaattcgtctgatcatatcgaatctaaagggattaaaatcaaagaaacaatgtacttcgcaccttccatgaaagacttcacacagtacatatttactgagaaactcaagcaggacaaggggtctgacgcgtcctggaagaatgaccaggagccccccccagaggcactggatttttctgacgacgagaaagagaaagaagccaagcagcgcaagaagtctcagattcagggcagaaagaagctgaagagcgaattcaatgagcccggcacaggcatctcccatcggtactgcggactaggcagcaggccattgcaatctagcgagagtcacaagctgtttggctttcagatgcacatcaaggttaccttcacttgctactttagtctactgtccatgcagtag

SEQ ID NO: 126758 - DNA, 345 bp, synthetic construct
  misc_feature 1..345: note = Description of Artificial Sequence: Synthetic coding sequence
  source 1..345: mol_type = other DNA
ctggcatcacggcttgggccagtctccacagctaacatgtcccgtccagtccggaaccgcaaggttgtggactactctcagtttcaggagagtgatgatgctgattttgaatccgaggacagcgaggacaaagatgttaagactaagaaggatgactcacacagcgccgaggactccgaggatgagaaagaagatcataaaaacgtgcgacaacagagacaggccgcctctaaagcggcctctaagcagcgtgagatgctcatggaggatgtgggcagcgaggaggagcaagaggaagaggatgaggccccatttcaggaacgaaaggacagcttctcacagtag

SEQ ID NO: 126759 - DNA, 732 bp, synthetic construct
  misc_feature 1..732: note = Description of Artificial Sequence: Synthetic coding sequence
  source 1..732: mol_type = other DNA
atgtccagaccagtgcgaaaccgtaaggtggttgactactcccagttccaggagtcggatgatgccgatgaggattacggaagggattctggccccccaacaaaaaagatcagaagttctccccgggaggcgaaaaataagaggcgcagtggcaagaactctcaagaggacagcgaagattctgaggacaaagacgtcaagactaagaaagacgacagtcactccgcagaggactctgaagatgagaaggaggaccataagaacgtgaggcagcagcgtcaggcagcgtcaaaagctgctagtaagcagagagagatgctaatggaggacgtgggttctgaggaggaacaggaagaggaggatgaagccccgtttcaggagaaggattctggatctgatgaggattttctgatggaggacgacgatgattcagactacgggagttctaagaagaagaataaaaagatggtgaaaaaatcaaagccagaaaggaaggagaaaaagatgcctaagcctagactgaaagccaccgtaacacccagccccgtcaagggcaagggcaaagttggaaggcccacagcatccaaagcctccaaagaaaagaccccttcgcccaaggaggaagatgaagaacccgagtcgcctcccgagaaaaagacctctacttcccctccacctgaaaaatccggcgacgaggggtcggaagacgaggctccctccggggaggactag

SEQ ID NO: 126760 - DNA, 1122 bp, synthetic construct
  misc_feature 1..1122: note = Description of Artificial Sequence: Synthetic coding sequence
  source 1..1122: mol_type = other DNA
atgtcaccatgcccaccacagcagtccagaaaccgtgtgatccagctgagcaccagtgagcttggcgagatggagctgacctggcaggagatcatgtccattaccgaactgcagggacttaacgctccttcagaaccatcatttgaaccccaagcaccagctccatatctgggtcccccaccccccacaacctactgtccctgctccatccatcccgatagtggattccccctccctcctcctccatatgagttgcctgcctcaactagccacgttcctgatcccccctattcctacggaaacatggcaatccctgtatcgaagcccctaagtctctctggcctgctgtccgaaccattgcaggacccactggctctgctcgacataggcctcccagctggcccaccaaagcctcaggaagatcctgaaagcgatagtggcctgtcactcaattattcagacgcggagagcctcgaactggagggaaccgaagccgggcgcagacgcagcgagtatgttgaaatgtaccctgttgagtacccatattcactgatgcctaactcgctcgcccattccaactatacattgcctgctgcagaaactcccctggccctcgagccctctagcggacctgtcagggcaaaacccactgcgcgcggggaagctgggagccgcgatgagcgcagggctctggccatgaagattccattccctactgacaaaattgtcaatctgcccgtggacgattttaacgaacttctggctaggtacccactcacggaatcccagttggcgctggtgcgcgatatccgcagacgtggaaagaacaaagtggccgcacaaaattgtcgtaagcgcaagctggagacaatcgtgcagcttgagcgcgaactggagagacttaccaatgaaagagaacgtctgctgcgcgctcggggagaggccgataggaccctagaagtaatgcggcagcagctgactgaactgtatcgagacatttttcagcacctgcgcgacgagagcggaaactcttatagtcccgaagaatacgccctgcaacaagcagccgacggcactatcttccttgtccctagaggtacaaagatggaggccactgattag

SEQ ID NO: 126761 - DNA, 1122 bp, synthetic construct
  misc_feature 1..1122: note = Description of Artificial Sequence: Synthetic coding sequence
  source 1..1122: mol_type = other DNA
atgagcccatgccccccacagcagtctcggaatagggtgatacagttgtcaacatcagagcttggcgagatggaactgacatggcaggaaatcatgtctatcaccgagctgcagggcctgaatgccccttcagaacctagcttcgagccacaggcccccgcgccttatctgggcccgcctccaccaactacatattgtccatgttccattcatcccgactccggattccctctgccgcctccgccgtacgaactaccggcctccacaagccatgtgcccgaccccccttatagctatggaaatatggctataccagtgagcaaacctctgtctttaagcggcctgctgtctgagccactgcaggatcccctggctctgctcgacatcgggctaccagccggcccacctaaacctcaggaggacccagaatcagactccggtctgagtctgaattacagtgacgcagagtctttggaactcgagggaactgaggctggccgcaggcggtcagagtatgttgagatgtatccagtagagtatccttacagcctcatgccaaacagcctggcccactccaattatactctgcctgcggccgagactcccctcgctttagaacccagctccggccccgtgcgggcaaaacctacagctcggggagaggctggcagccgagacgaaaggagagctcttgccatgaaaattccatttccgactgacaagatcgtgaacctccccgtagacgacttcaatgagctgctagctcgttacccgctgaccgagtctcagttggcccttgtccgtgatattcgccggcgcgggaaaaacaaagttgccgcacagaattgtaggaagcgcaagctggagactatcgtccagctcgagagagagctggaaagactgaccaatgaaagagaacgccttttgagagcgcggggggaggccgaccggacgctggaggtcatgagacagcagcttactgagctttatagggatatcttccaacacctgagagacgagagcggaaattcatattcccctgaagagtacgccttgcagcaggccgccgatgggacaatctttttggttccaagaggcacaaaaatggaagccacagactag

SEQ ID NO: 126762 - DNA, 1122 bp, synthetic construct
  misc_feature 1..1122: note = Description of Artificial Sequence: Synthetic coding sequence
  source 1..1122: mol_type = other DNA
atgagcccatgtccaccgcagcagtcgcgaaatagagtgatacagctgagcacatcagaactcggtgagatggagctgacctggcaggagatcatgagtatcactgagctgcagggcctcaatgccccttccgaacctagctttgagcctcaggcacctgcaccttatctggggccccccccgcccaccacctactgtccatgttcgatccatcccgattctggatttccactgcctcctccaccatatgagctacccgccagtactagccatgtgccagatcctccttattcttacggtaacatggccatacccgttagtaagcctctgagcctttcagggcttttgtctgagccgctccaggatccgctggcacttttagatatcggactccctgctgggcctccaaaaccccaggaggacccggagagtgattctggcctgagtctaaattatagtgacgcagagagtttagagttggagggcacagaagcaggaagacggcggtcagagtacgtcgaaatgtatcccgttgagtacccatacagtcttatgcctaacagtcttgcacacagcaactacaccctccccgccgcagaaacaccacttgctctcgaaccaagctctggtcccgttagagctaagcctactgcgcggggggaggccggatcaagggatgaacgacgagctcttgcaatgaagattcctttcccgacggataagatagtgaacttgcccgttgacgatttcaacgaactgctcgcccggtaccctctaaccgagagtcagctggcactggtgagggacatcaggaggaggggcaaaaacaaggtggctgcacagaattgtcgcaagcgcaagctcgagacaatcgtgcaactggaacgtgagctggaacgcctgaccaatgaacgtgaaagactcttgcgcgctaggggggaggccgaccggacactcgaggtgatgcgccagcagctgactgagctgtaccgggacatcttccaacatctgagggatgagagtgggaacagctactctcccgaggagtatgcattacagcaagctgcggacggtacaatctttctggtgccaagggggactaagatggaagccaccgattag

SEQ ID NO: 126763 - DNA, 1122 bp, synthetic construct
  misc_feature 1..1122: note = Description of Artificial Sequence: Synthetic coding sequence
  source 1..1122: mol_type = other DNA
atgagtccctgccctccgcagcagtcccgcaatcgtgtgatacagttgagcacaagtgagctgggggagatggaactcacttggcaggagattatgagcataaccgagctgcaggggcttaatgctccttccgagccttcatttgaacctcaggccccagctccttatctgggtcctccacctcccacaacatactgcccatgctccatccatccggactccggattcccactgccgcctcctccctacgagttgccagcgagtacaagtcacgttccagacccaccttactcatacggcaatatggcaattccagtatcaaagcccctaagcttgtccggcttattgagcgagcccttgcaggacccactggcactgctcgatatcggactgccagcaggcccgccgaagccacaggaagatcccgagtccgactcaggattatcactcaactattcagatgctgagagcctggagcttgaaggtaccgaagccggtagaaggcgtagcgaatatgtcgaaatgtatccagtagagtacccgtacagcttgatgccaaattccttagcgcatagcaactacactctgcccgctgcggagacccccctggccctggagcctagcagtggcccagtgcgagcaaagcccactgccaggggagaagcaggctctagggacgagcggcgtgccctggccatgaaaattccttttcctaccgacaagatagtcaacctgcccgtggatgactttaatgagctactggctaggtaccctctgacggagtcacagctcgccctagtgcgcgatattcgcagacgagggaagaacaaagttgctgcgcaaaactgccgcaagcggaagctggaaacaatcgtgcagcttgagcgcgaacttgaaaggctaactaatgagagggaacgtctgttacgcgctagaggtgaggctgataggaccctggaagtaatgcgccagcagcttaccgaactttatcgcgacatcttccagcacctgcgcgatgagagtgggaacagttacagccctgaagagtacgctctccagcaagcagcagacgggaccattttcctggtgccccgcgggaccaagatggaggccaccgactag

SEQ ID NO: 126764 - DNA, 1032 bp, synthetic construct
  misc_feature 1..1032: note = Description of Artificial Sequence: Synthetic coding sequence
  source 1..1032: mol_type = other DNA
atgtcaccctgcccaccgcagcagtcacggaatagagtcatccagctttccacatctgagttgggcgagatggaactgacgtggcaagaaatcatgtcaatcaccgagctgcagggtctaaacgccccatccgagccttcttttgaaccacaagcccctgcaccgtacctgggtccccccccgcctacaacttactgcccatgttccattcatccggattccggcttccccctgcccccacccccgtacgaactgcccgccagcacatctcacgtacctgatcctccttactcctacggtaacatggctattccagtgtcgaagccgctcagtctgtctggcctcctaagcgagccacttcaggatcccctagctctcctagacatcgggctgcccgcaggcccccccaaacctcaggaggatcctgagtcggactccgggctgagcctgaactatagtgacgccgagtcactggaactggagggcactgaagctggaagacgtagaagtgagtacgtggagatgtaccccgtggagtatccatatagcttgatgccaaacagcttggctcatagcaactataccttacctgccgccgagacaccactcgcactggagccaagctctggacccgtgcgggcaaaacctacagcccggggagaggccgggtcacgtgacgagcgcagggccctggctatgaagatcccatttcctacggacaagattgtaaacctccccgttgatgactttaacgaactgctagcgcgatacccactcactgagagtcagcttgccctagttcgggatatcagaaggcgtggcaaaaacaaggttgctgctcagaactgtaggaagcgtaagctggaaacaatagtacagcttgagcgtgagctcgaacgcctgaccaatgagagggaaagactgctgcgcgctcggggggaagcagataggacacttgaggtaatgcgacagcagctgaccgaactgtatcgggacattttccaacacctgagggacgaatctggaaactag

SEQ ID NO: 126765 - DNA, 2229 bp, synthetic construct
  misc_feature 1..2229: note = Description of Artificial Sequence: Synthetic coding sequence
  source 1..2229: mol_type = other DNA
atgttgagcctgaagaagtacctcacggagggcctcttacaatttaccattctgctgtccctcattggcgtgagggtggacgtcgacacctatctgacatcccagctgccccccctgcgcgaaataatattggggccatccagcgcctacacccagacacagttccataacttacgtaatacactggacggatacggcatccatcccaaaagtattgacttggacaactatttcacagcccgtcggctgctgagccaggtccgcgcattagacaggttccaggtgccaactacagaggtgaacgcctggttagtgcatagagacccagagggctccgtgtcaggatcacagccaaacagcggcctcgctcttgaatcatcttcaggactgcaggatgtgaccggcccagataatggcgttcgagagtctgagacggagcaggggtttggcgaagacctggaggatctcggcgctgtggccccccccgtatcaggcgatctgaccaaagaagacatagatctgatcgacatcctgtggagacaagacatcgatctcggcgctggaagggaagtgtttgattactcccaccgccagaaggagcaagacgtggagaaagagctgagggatgggggggaacaggacacatgggcaggcgaaggagcagaagcactggctcgaaaccttctggtggacggggagaccggcgaatcttttccagcccagtttcctgccgatatcagctccataacagaggctgttccctctgagtccgagcccccagccctccagaataatctactttcccccctgttgaccggcactgagtcaccgttcgacctcgaacaacagtggcaggacctgatgagcataatggagatgcaagcaatggaagtgaacacctctgcctccgagattctttacagcgcgccgccaggggatcctctttcgaccaactattctttggcccctaacactccaattaatcagaacgtgtccctacaccaggccagcctgggaggctgttcacaggacttccttcttttctcacctgaggttgaaagccttccagtcgcgtccagtagtactttgttgccattggctccctccaattcaaccagccttaattctacctttgggagcacaaacctgactggcctgttctttcctccacagctaaacggtaccgccaacgacaccgccggccctgagctccctgacccgctgggagggctattagacgaagcaatgctcgacgagatcagcttgatggatttggcgatcgaagagggctttaatcccgtgcaggcttcgcagctggaagaagagttcgacagcgactccggcctgagcctagattcatcccatagtccttccagcctttccagttctgaggggagctcttcctcaagcagttcctcctcatcctcatcatcttctgctagttcgtccgctagcagctcattcagcgaagagggcgccgtgggctacagctcagacagcgaaaccctggacctggaagaagccgaaggggcggtgggctatcagccggaatactcaaagttctgtcggatgtcataccaagaccccgcacagttgtcctgtctgccttatctcgagcacgttgggcacaaccacacctataacatggcaccctccgctctcgactcggcggatcttccccctccatcagctttgaagaaaggctctaaggagaaacaagccgacttcctcgataagcaaatgtcaagagatgaacatcgggcccgagccatgaagataccatttacgaacgacaagattattaacctcccagtggaggaattcaacgaattactgagtaaatatcagttatcagaggcacagctcagtttgataagggatattagacggcggggcaagaacaaaatggcagcccagaactgtagaaagcgtaaactcgacaccatcctcaacctggaacgggatgtggaggacctgcagagagacaaagcccggcttctccgggaaaaagtggagtttctcagaagtctgaggcaaatgaagcagaaggttcagagtctctaccaggaggtctttggacgtcttcgcgacgagaatggtcgtccttactctccttcacagtatgccttgcagtacgctggcgacggttcagtgttattgatccctcgcaccatggccgaccagcaggcccgacgccaggaacgcaagcctaaggatagaaggaaatag

SEQ ID NO: 126766 - DNA, 2319 bp, synthetic construct
  misc_feature 1..2319: note = Description of Artificial Sequence: Synthetic coding sequence
  source 1..2319: mol_type = other DNA
atgctgagcctgaagaagtatctaaccgagggattactgcagttcactatcttactgagcttaataggtgtgagggtggatgtggatacttatctcaccagtcagctgcctcccctgcgggagattatcctcgggccatctagcgcctacacccagacccagtttcacaatctccgcaacactctggacggttatgggatacacccaaaatccattgatctggataactactttaccgcccggcgacttctcagccaagtaagggctttggacagattccaggtccctactaccgaagtaaacgcttggctcgtgcatagagatccggaagggagtgtttccggctctcagcccaatagtggactggctctggagtccagtagtggtttgcaagacgttacaggcccagataacggcgtccgggagtctgagacggagcagggttttggtgaggatctcgaggacctgggggctgtagctcctcccgtgtcaggagacctaactaaagaggatattgatctgatcgacatcctgtggaggcaggatattgacctcggcgcagggagagaggtgtttgactatagccataggcaaaaagagcaggatgtcgaaaaggagctcagagacggaggggagcaggatacttgggctggggagggcgcagaagccctcgcacgcaacctgctggtcgacggcgagaccggcgagagttttcctgcccaggtgcctagtggcgaggaccagacggcccttagcctagaggaatgcctccggctactggaagccacctgcccttttggtgaaaatgcagagttcccggccgacatctctagtatcacagaggcagttcccagcgaaagcgagccaccggccctgcagaacaaccttctgagtcctctgcttactggtaccgagtccccgtttgaccttgaacagcagtggcaggacctcatgagcataatggagatgcaggcaatggaggtgaacaccagcgcctctgaaattctctacagtgctcctccaggagacccattgtccaccaactatagcctcgctccaaacacacccataaatcagaatgtgtccttgcatcaagcctccctgggtgggtgcagccaggatttcctgttattcagccccgaagtagaatccttaccagtggccagttccagcacactgttgccactggccccatctaattcaacttcactgaattcaactttcggaagtaccaacctcaccgggttattctttcctccacagctgaacgggaccgcaaatgacactgcaggccccgaactgccagatcccctcggtgggctgcttgatgaggctatgttggatgagatatcactgatggacttggccattgaggaaggttttaatccagtgcaggcatcccaattggaagaggaattcgacagcgacagcggattatcactcgattcaagccactctccctctagtctgagcagtagtgagggctctagtagttcctcaagttccagttcctcctcatctagcagtgctagtagctctgcgtctagtagttttagcgaggagggggcagttggatacagcagcgactctgagacactggaccttgaagaagctgaaggagccgtgggataccaacccgagtattctaagttctgccgtatgagttaccaggaccccgcccagctatcctgtttaccttatctggagcacgttggtcacaaccacacttacaatatggcgccgtcagccctggattcagccgacttacctccaccttctgctctgaagaagggttcaaaggaaaagcaggccgacttcctggacaaacagatgagtagggatgaacaccgagccagagcgatgaagattccctttaccaatgataagataatcaacttgccggtggaagagttcaacgagctcctgtcaaagtaccagctctctgaggcccagttgtcattaattcgcgacattcggagacggggcaagaataagatggccgctcagaactgtcggaagagaaagctcgataccatcttaaacctggagagggatgtggaagatttgcagcgggacaaggctcggttactgcgggagaaagtggagtttctgcgcagcttgaggcaaatgaagcagaaggttcaatccctgtaccaggaggtgttcggaaggctcagagatgagaatggcagaccttattctcctagtcaatacgcgttacaatacgcgggggatgggtccgtgctcctgataccacgaaccatggcggaccagcaggccagacgccaggagcggaagcctaaagacagaagaaaatag

SEQ ID NO: 126767 - DNA, 2376 bp, synthetic construct
  misc_feature 1..2376: note = Description of Artificial Sequence: Synthetic coding sequence
  source 1..2376: mol_type = other DNA
tttgtgttctggaaaattttaaagaccaagaagcacaagcatagcgggcctagcgctatgttaagtctaaaaaaatatctgactgaggggttgctgcagttcacgatactactatcattgattggcgtacgggtggatgtggatacatatcttacctcccagctgccaccattgcgagagatcattctcgggccctccagtgcctatacccagacccaattccacaatcttagaaacactcttgatgggtacgggattcatcctaaatctatcgatctggacaactactttacagcccggaggttgctcagtcaggtacgcgctttagaccgcttccaggtcccaaccacagaggtcaatgcctggttggtgcatagggatccggagggctcagtttcggggagccagcctaactcagggttagctcttgagagctccagcgggctgcaggatgttactgggcctgacaatggggtgcgcgaatcggagactgagcaaggctttggtgaggatctcgaggatctgggcgctgtggccccccccgtctccggagatctgactaaagaagacatagatctcattgacatcctatggagacaggatattgatctgggtgcaggcagagaggtgttcgactattcccatcggcagaaggagcaggacgtagagaaagaactgagagacggaggtgagcaggacacgtgggctggcgagggggccgaggccctcgccagaaacttgttagtcgacggcgagaccggggaaagcttccccgcgcaggtcccctccggggaagaccagactgcgttgtcgttggaggaatgcttgagactactcgaggcgacttgtccgttcggcgaaaatgctgagttccctgccgatatctcgtctatcactgaggccgtcccatctgaaagtgagccaccagcgcttcaaaataatcttctctcacctcttcttaccggaaccgagtcgccttttgatctcgaacagcagtggcaagatttgatgtccattatggaaatgcaggctatggaggttaacacctcagctagcgagattctgtacagcgcccctccaggcgatcccctttcgaccaactactcattggccccgaatacaccaataaaccagaacgtgagcctgcatcaggcttccttgggcggctgcagccaagacttcctgctgttctccccagaagttgagagcttgccagtggcctcatcttccaccctcttgcctctggcaccatccaacagtaccagtctcaactccacttttgggtccacaaatctgacgggccttttttttccaccacagctcaacggaaccgcaaacgacactgcaggtcccgaactgcccgatcccctgggagggctacttgacgaggctatgctggatgagatttccctgatggaccttgctatcgaggaggggttcaaccccgtgcaggcaagtcagctggaagaggagttcgacagtgatagtggactctcgctcgattctagccactctccgtcgtccctgtcctccagtgaaggcagctccagtagcagttcgagctcatcttcatccagtagcagcgccagcagctctgctagttcttcgttttctgaggaaggtgctgtaggctactcaagtgactctgaaacattggatttggaagaagccgagggcgctgtcgggtatcagcccgagtattccaaattttgtcggatgagttatcaggatcctgctcagttgtcctgtctgccatacctagagcacgtgggtcataatcacacttataacatggcaccctctgccctggattctgccgacctgccccccccctctgccttgaagaaaggcagtaaagagaagcaagcagacttcttagataaacaaatgtcccgcgacgaacaccgcgcgagagcaatgaagatcccattcactaacgacaaaatcattaatctgcctgtcgaggaattcaacgaacttttgtccaagtatcagctcagtgaggcccagttgtcgttgatccgtgatattagaaggagaggcaagaataaaatggcagcacagaactgtcggaaacggaaactcgataccattctgaacctcgagagagatgtggaggatcttcaaagagacaaggccaggctgctgcgtgagaaggtcgaattcctgcggagcctgcgccaaatgaagcaaaaggtgcaatccctgtatcaggaggtgtttgggagactgcgcgatgagaacggccgaccttactccccaagccagtatgccctgcagtacgcaggcgacggctcagtccttctaatcccgagaacgatggccgatcaacaggctcgacgacaggagagaaagcctaaggacaggaggaaatag

SEQ ID NO: 126768 - DNA, 1851 bp, synthetic construct
  misc_feature 1..1851: note = Description of Artificial Sequence: Synthetic coding sequence
  source 1..1851: mol_type = other DNA
atgacccgactggatcgctccagtcattctggcggcggacatgcaaaagggagccggcctctgaactcacttctggccggacatcgcgtggcgcaaccggcaagtgcaccaggctccagggcctccgtccaggatatcgacctaatcgatatattgtggcgacaggacatcgacttgggtgccggccgagaggtgttcgattattcccaccgacagaaagagcaagatgtggaaaaggagctccgcgatggaggagagcaagacacctgggcaggagaaggtgccgaggcgctggcacgcaatctgcttgtggatggagaaacaggggagtcttttcctgctcaattcccagccgatatctcttccatcactgaggccgtacccagcgagagtgaaccaccagccctgcagaacaatctgctaagtcccctactaacaggaactgagagcccctttgacttagaacaacaatggcaggatctcatgtccatcatggagatgcaagcaatggaagtgaacacgagcgcaagtgaaatcctgtacagcgctccccccggcgatccactgtctactaattactctctggcccctaatacacctataaaccagaatgtcagcctgcatcaggccagcctcggaggttgtagccaggatttccttctgttttccccagaggtggaatctctgcctgttgctagctcctccactctgttgcccctcgctcctagcaactctacatccctgaactcaacgtttggcagcacaaatttgacaggactattctttccgccccagctcaacggcaccgccaatgacacagccggcccagagttaccagatccactgggcgggttacttgacgaggcaatgcttgatgaaatttcgttaatggatttagccattgaagaggggtttaatcccgtgcaggcctcccaattggaagaagagttcgattcagatagcggactgagcctggactcgtcccactcaccatcaagcctcagttcttctgaaggctctagttccagctcttccagcagtagttcttcaagctcatccgccagcagctccgcctccagctcctttagtgaggagggcgccgtgggatactcttctgatagcgaaacgctggatcttgaggaggccgagggggccgttgggtaccagcccgagtactctaagttctgccgcatgtcctaccaggaccccgcacagctcagctgcctgccttacctggaacatgtgggacataaccacacctacaacatggcaccaagcgctctggactccgctgatcttccccccccctccgccctcaagaagggaagcaaagaaaagcaggcagattttttagataaacagatgtctcgtgacgagcacagggccagggcgatgaaaatcccatttaccaatgataaaatcatcaacttaccggtggaagagtttaatgaactcctgtctaaataccaattgtccgaagcccagctgtcactgattcgcgacattcgccgcagggggaaaaacaagatggccgctcagaactgccgtaaacgtaagctggacaccatcctgaacctggaaagggacgtggaagaccttcagcgggacaaagcaaggcttcttcgcgagaaggtggaatttctccgaagcctgcgacaaatgaagcaaaaagtacaatcactctatcaggaggtgttcgggcgcctcagagatgaaaacggccggccatatagcccgtcccaatacgctctccaatacgccggcgacgggtctgttctacttattccacggactatggcagatcagcaagccagaagacaagaaaggaaacctaaagaccggcggaagtag

SEQ ID NO: 126769 - DNA, 1818 bp, synthetic construct
  misc_feature 1..1818: note = Description of Artificial Sequence: Synthetic coding sequence
  source 1..1818: mol_type = other DNA
atgatggacctggaactgcccccgcccggcctgcccagtcaacaggacatggacctgatcgacatcctctggcggcaagacattgatctcggtgtttcccgggaggtctttgatttcagtcagcggaggaaggagtacgagctggaaaaacagaaaaagctcgagaaagagagacaggagcagctgcagaaggagcaggagaaagctttcttcgctcagctgcagcttgacgaagagaccggggagtttctgcctatccaacctgcccaacacatccagagcgagaccagcggctctgccaattattcccaggtcgctcacatcccaaaaagcgacgctctgtattttgacgactgcatgcaactgctcgcccagactttcccattcgttgacgacaatgaagttagttctgccacgtttcagtcactagtgccggacattcccgggcacatcgagtcacctgttttcatcgccaccaatcaggctcaaagtcctgagacaagcgtggctcaagtcgccccagtggatctagatggaatgcaacaggacatcgagcaggtctgggaagagctcttgtcaatccctgaactacaatgcctgaacatcgagaatgacaagttagtggagactaccatggtgccctcccccgaggccaagttaactgaagttgacaactaccacttctattcctcaatcccaagcatggagaaagaggtcgggaactgtagccctcacttcctgaatgcttttgaagacagcttttcctccattctgtctaccgaagatccaaaccagctcacagtgaattccctcaactcagatgctaccgttaatacggacttcggggatgaattctattctgcttttatcgctgagccaagtatttcaaactctatgccttcgcccgcaactctttcccactcgttgtctgaactgctcaacggaccaatagacgttagcgacttgagcttgtgtaaggcgttcaatcagaaccacccagaatccactgctgaattcaacgatagcgatagtggcatctctctgaacacctctccttccgtagcctctcccgaacactccgtcgagtcctcatcctacggagatacactactcggactttcagattctgaggtcgaggagcttgacagcgcaccgggctccgtgaagcaaaacggacccaagactcccgtgcactctagtggcgacatggtacagcctctgagtccaagtcagggccagtccactcacgtccatgatgctcagtgtgaaaatactcctgagaaagagctgcccgtgagcccaggccataggaaaacgccttttactaaggacaagcattcaagccggttggaagcccatctgactcgggatgagcttagagcaaaagctttgcatatcccatttcccgtggagaagattatcaatctgccagtggtggatttcaacgaaatgatgagcaaggagcagtttaatgaggcccagctggccctgattagagacatccgcaggcgtggtaaaaataaagtggctgcccagaattgcagaaagcggaagctggagaacatagtggagctcgaacaagatctggaccacctgaaggatgaaaaagagaagcttctgaaggagaaaggggaaaacgacaagtcccttcacttgctgaaaaaacaactgtcaaccttatatctggaagtattttcgatgcttagggatgaagacggcaaaccctatagcccatccgagtactccctccagcaaaccagggatgggaacgtgtttttagtgcccaagagcaaaaaacctgacgtcaagaaaaattag

SEQ ID NO: 126770 - DNA, 1770 bp, synthetic construct
  misc_feature 1..1770: note = Description of Artificial Sequence: Synthetic coding sequence
  source 1..1770: mol_type = other DNA
atggatcttatagacattctgtggcgtcaggatatagacctgggggtcagtcgtgaggtttttgactttagtcagcgaaggaaggaatacgagctggagaagcagaagaagttagaaaaggagagacaggaacagttgcagaaagagcaggaaaaggccttttttgcccagttacagctggacgaggaaactggtgagtttctgcctatccagcccgctcagcacatccagtcggaaaccagcgggtccgccaactattcacaggtggcccatataccaaaatctgacgctctgtattttgatgactgcatgcagctgctggcacagacttttccgttcgtggatgataacgaggttagctctgctactttccagtctctggtgcctgatatacccggccacatcgagtcccccgtttttatcgcaaccaaccaagcccagagccccgagacctccgtggcccaagtcgccccagtggacttggacggtatgcaacaagatatcgaacaagtctgggaagaactcctgagcattcccgagctgcagtgtctgaatatcgagaatgacaaattagtagagaccacaatggtgccctctccagaggctaagctgacagaagtagacaattaccacttctattctagcattccaagtatggaaaaggaggtgggaaactgctcaccgcattttctgaatgcttttgaggactccttcagttccattctcagtactgaggacccgaatcaattaacagttaacagtttgaatagcgacgccacagttaatacagattttggcgacgagttctacagcgcattcatcgctgagccctccatatctaacagcatgccttctcccgctacgctgtcacacagtctcagcgaactgttgaacggaccaattgatgtgagcgacctttccctttgcaaagcgttcaaccagaatcaccccgagtctacagctgagtttaacgactcggacagtgggatatccctcaacacctccccttcggtagcgagccctgaacatagtgttgaaagctcttcgtatggcgacaccctcctaggtctctccgattcagaagtcgaggagctggatagtgctccgggctcggtgaagcagaacggaccaaaaacccctgtgcatagcagcggagacatggtgcaaccacttagccctagccaaggacagtccactcatgtgcacgatgcccagtgcgagaacacccccgagaaagagctgcccgtctctcccggtcatcggaaaacccctttcaccaaggacaagcatagttctcggctcgaagcgcatttaacccgggatgagctgcgtgccaaggccctgcacattcctttccccgtggagaaaataatcaatctcccggtggtggatttcaacgagatgatgagcaaagagcagttcaacgaggcccagttggcactgatacgagatatcaggagaagaggcaagaataaggtggccgcgcagaactgcaggaaacgaaagctggagaatattgtggagctggaacaagacctggatcacctgaaggacgagaaggagaaacttctgaaggagaagggcgaaaatgataaatctctgcacctgctaaaaaagcaactctctacgctgtatctggaagtgttctccatgctccgagatgaagacgggaagccctatagccccagtgagtactctctccagcagacgagagacggtaatgttttcctagtgcctaaatcaaaaaaacctgatgtaaaaaagaactag

SEQ ID NO: 126771 - DNA, 705 bp, synthetic construct
  misc_feature 1..705: note = Description of Artificial Sequence: Synthetic coding sequence
  source 1..705: mol_type = other DNA
atggacctgatcgacatcctgtggcgccaggacatcgatttgggggtctcgagggaggtgttcgatttctcacagcgccgcaaagaatacgagcttgaaaagcaaaaaaaactcgagaaggagagacaggagcaacttcagaaagaacaagaaaaggcattttttgcgcagctacaacttgacgaggagaccggggagttcctaccgatccagccagctcagcatatccagagcgaaaccagcgggtccgccaattattctcaagtggcccatattccgaagagcgatgccttgtattttgacgattgtatgcaactgctggcccaaacattcccattcgtggacgataatgaggtgtctagcgccaccttccagagtttggttcctgacataccaggccacattgagagcccagtgtttatagccaccaaccaggcgcagtctccagaaacgtccgttgctcaggtggccccagttgacctggatggaatgcagcaggacatcgaacaggtgtgggaggaactgttatctatcccggaactgcaatgcctgaacatcgaaaatgacaagctagtggagaccaccatggtgccatccccggaggctaaactgactgaggtcgataattaccatttctattcttctataccttccatggagaaggaggtcggaaactgtagcccacactttctcaatgcattttag

SEQ ID NO: 126772 - DNA, 843 bp, synthetic construct
  misc_feature 1..843: note = Description of Artificial Sequence: Synthetic coding sequence
  source 1..843: mol_type = other DNA
atggatctcatcgacatcctctggcgccaggatatcgaccttggcgtgtcgcgagaagtattcgacttcagccaacggaggaaagagtacgagttagagaaacaaaaaaaattggagaaagaacgccaagaacagttacagaaggaacaagagaaagccttctttgcccagctccagttggatgaggaaacaggagaatttctgcctattcagccggctcaacacatccagagtgaaacctctgggtccgctaattattcccaggtggcacacattcccaagagcgacgcgttgtatttcgacgactgtatgcagcttcttgcccagacatttcccttcgtcgacgacaacgaggtaagtagcgctacatttcaatctctggttccggatatcccaggccatattgaaagtcccgtgttcatcgcaacgaatcaggcacagtcgcctgagactagcgtggcccaggtggcccctgttgacctggatgggatgcagcaggatattgaacaagtctgggaagagcttctctctattcctgaactgcagtgtcttaacatcgagaacgacaagctggttgaaactacgatggtccccagtcctgaagccaaactcaccgaagtggataactatcacttctatagcagtattccgtcaatggaaaaagaggtcggcaactgcagccctcatttcctgaacgccttcgaagactctttttcatctatactgagtaccgaggatcccaaccagttaacagttaattcactgaatagtgatgcgactgtgaacacagactttggagacgagttttattccgcttttatcgccgagccttctatttcctag

SEQ ID NO: 126773 - DNA, 1749 bp, synthetic construct
  misc_feature 1..1749: note = Description of Artificial Sequence: Synthetic coding sequence
  source 1..1749: mol_type = other DNA
atggatttgattgatatcctctggcgtcaagatattgacctaggcgtgtcaagggaggtgtttgactttagccaacggcggaaggaatatgagttagaaaaacaaaaaaaattagagaaagagcgccaggagcagctgcaaaaagagcaggaaaaagccttcttcgcccagttgcagctggatgaagagaccggggaattcttgcccattcagcctgcccaacacatccaatcggagaccagcggaagcgccaactattctcaggtggctcatatccccaagtcggatgctttgtacttcgacgattgcatgcaactactagcccagacatttccattcgtggatgacaatgagtcgctggtgcccgacataccggggcatatcgaatcccccgtcttcatcgccactaaccaggcccagagccctgagacctctgtggcacaagtggccccagtcgacctggacgggatgcagcaagacatcgagcaggtttgggaagaactactttctatccccgagcttcagtgtctgaatatcgaaaacgacaagctggtcgaaactactatggttccctcacctgaggcgaaactgaccgaggtagacaactaccacttttactcctccatcccttctatggaaaaagaggtcggcaactgttcccctcatttcctcaacgcttttgaggattccttctcaagcattttgtctacagaggatccaaaccagctgaccgttaatagcctgaatagtgacgcgaccgtgaacacggatttcggcgacgaattttactcagcgttcatagccgaaccatccatatccaattccatgccgtcccctgcgactttgagtcactcactttcagagctgcttaatgggcccattgacgttagtgatctgtcgctgtgcaaagctttcaatcaaaaccatcctgaaagcacagcagaattcaacgattctgatagcggcatctcactgaatacaagcccgtcagtggccagccccgagcactctgtggagtcctcaagctacggggataccttgttaggtctgtcggactctgaagtggaagaactggattccgcacctggtagcgtcaagcaaaatggacccaaaacccctgtgcactctagcggcgatatggtacagccattgagcccttcccaaggccagtccacacacgttcacgacgcacagtgtgagaatacacccgaaaaagaactgccagttagccctggtcacagaaaaactccctttaccaaggataagcactcaagcaggttagaggcgcacctgacgagggacgaactgcgagccaaggcactccacatcccattccctgtggagaagattataaaccttcccgtggtagactttaacgagatgatgtctaaagagcagttcaacgaggcccaactcgccttaattagagacattcgacggagagggaagaataaagttgccgcccagaattgtcggaagcgaaaactcgaaaacatcgttgaacttgaacaggaccttgaccatctcaaggatgagaaggagaaactactgaaagagaagggagagaatgacaagtccctgcacctgcttaagaagcagttgtccaccctgtacctcgaagtgttcagcatgctgcgcgacgaagacggaaaaccttactccccttcagagtacagcctgcagcagacccgcgacggcaatgttttcctggtcccaaaatccaagaagcccgatgtgaaaaagaattag

SEQ ID NO: 126774 - DNA, 2085 bp, synthetic construct
  misc_feature 1..2085: note = Description of Artificial Sequence: Synthetic coding sequence
  source 1..2085: mol_type = other DNA
atgaagcacctcaaacgatggtggtccgcaggtggtggactgcttcatttgacgcttctgttgtctctggccgggctgcgggtggatttagacctgtatttgcttttaccgcctcctaccttgctgcaggacgaactgcttttcctcggagggcccgcctcctcggcctacgccttgtcaccctttagtgcgtccggaggctggggtcgggccggacacctgcaccccaagggacgggagctggaccctgcggctcccccggaaggccaattgctcagggaagtgagggctctaggggtgccctttgtgccccggacaagcgttgatgcttggcttgttcattccgtcgcggctggctctgccgatgaagctcacggcctgttaggagccgccgctgcgtcgagtaccggcggcgcgggcgcgtcggtcgatgggggctcccaggctgttcagggaggcggaggcgacccaagagccgccaggtctggtccattagatgctggcgaggaggagaaagctcctgctgaacctaccgctcaagtgccagacgccgggggatgcgcctccgaagagaacggcgtgctccgcgagaagcatgaggccgtagaccactcctcgcagcacgaagaaaacgaggaaagggtaagcgctcagaaggagaatagcttgcaacagaatgacgacgatgagaataagatcgccgagaaacctgattgggaggcagagaaaaccaccgagagccgcaacgaaaggcacctgaatggtaccgatacgtcctttagccttgaggatctttttcagttgctttcttcccaaccagagaatagccttgaggggattagtttgggtgacatccctttgcctgggagcatctctgatgggatgaattcttctgcgcactaccacgtgaacttcagccaggctatatcacaagacgttaacctccatgaggcaattctgttgtgccctaacaatacatttagacgggaccccaccgcacgcacctcccagtcacaggaacctttcctgcagctcaactcccacaccactaaccccgagcaaactctacctggaacaaatctcacaggatttctgtctcctgtcgataatcacatgagaaatctgacaagccaagatcttctgtatgacctggacatcaacatcttcgatgagattaatctaatgtctttggccacagaagacaacttcgaccctatcgatgttagtcagctttttgatgagcccgatagcgactcgggtctctctcttgactcatcacacaacaacacatccgttatcaaaagcaactcctcacactcagtgtgcgacgaaggcgccatcggctattgtactgaccacgaatcgagttcccatcacgaccttgagggcgccgtgggaggttattaccctgagccatctaaactatgtcacctggatcagtcggatagtgatttccacggcgacctgacattccagcacgtattccacaatcacacgtaccaccttcagccgacagcgcctgaatctacatctgagccgttcccttggcccgggaaatcccagaagattcggtccaggtacttagaggacaccgataggaacttgtcacgcgacgagcagcgcgctaaggcactgcatatcccattctcggttgatgagattgtgggaatgcccgtggacagcttcaattccatgctaagtcgctattacctgacagatctgcaagtgagcctcatcagggacattcggcgccggggaaagaataaagtggccgcccagaattgccggaagagaaagctcgacattatactgaacctcgaagacgacgtatgcaatctgcaggcaaaaaaagaaacccttaagcgggagcaagcacagtgcaacaaagctattaacatcatgaagcagaagctgcacgatctgtatcacgatatctttagtagactgcgcgacgatcagggacggcccgtcaatccgaaccactacgccctgcaatgtacacatgatgggtcaatccttatcgttccaaaggaactggtggcaagcggacacaagaaggaaacccaaaagggtaagcgaaaatag

SEQ ID NO: 126775 - DNA, 1200 bp, synthetic construct
  misc_feature 1..1200: note = Description of Artificial Sequence: Synthetic coding sequence
  source 1..1200: mol_type = other DNA
atgaattcctctgctcattatcatgtcaatttcagtcaagctatttcccaggatgtgaatctgcatgaggctattctgttgtgtcctaataacacattcagacgcgaccccaccgccaggactagccaatcccaggaaccatttctgcagctgaatagccacactacgaaccccgaacaaaccctccctggaacaaacctgacaggctttctctcaccggtggataatcatatgagaaacctgacaagccaggacctgctgtacgacttagatatcaatatctttgacgaaataaatctaatgtccctggccactgaagacaactttgaccccatagatgtaagccagttgttcgacgagcctgactccgatagcggtcttagcctggactctagtcacaacaatacctcggtcattaagtccaattcctcacactccgtttgtgacgaaggtgcgatcggttactgcacagaccatgagtcttcttctcaccacgacctggagggggccgtgggagggtactacccagagccgtctaaattatgtcatctggatcagtctgacagcgattttcatggagacttgacctttcaacacgttttccacaaccacacatatcacctgcagccaaccgcgccggagagcacgtcaaacctgtttcgcccagggaagagccagaaaatcagatcgaggtatcttgaagataccgatcggaatctcagccgagacgaacagagagccaaagctctgcatatacctttttctgtggacgaaatcgttggaatgccagtggactccttcaatagcatgctgtccaggtactacttgaccgacctccaggtgtccctgataagggacatccgccggagaggcaaaaacaaagttgccgcacagaattgtcgtaagaggaagctggatatcattctcaatctcgaggatgacgtgtgcaatctgcaggcaaaaaaggagaccctgaaaagagagcaggcccagtgcaataaggctattaacattatgaagcagaaattgcacgacctgtatcatgatatattctcccgcctgagggatgaccaggggcgtcccgtcaacccgaaccactatgccctgcagtgtactcacgacggctcgattctgatcgtgccaaaagagctggtggcaagcggccacaagaaggagactcagaaggggaagcgcaagtag

SEQ ID NO: 126776 - DNA, 1143 bp, synthetic construct
  misc_feature 1..1143: note = Description of Artificial Sequence: Synthetic coding sequence
  source 1..1143: mol_type = other DNA
atgtatagtcccttatgcctgacccaagatgagttccacccattcattgaggccttgcttcctcacgtgcgcgctttcgcctatacctggttcaatttgcaggccagaaaaaggaagtacttcaaaaagcacgagaaaaggatgtctaaagaagaggagagagctgtcaaagacgagctgctctctgaaaagccggaagttaagcagaagtgggccagcagactgcttgccaaactgaggaaggacattaggccggaataccgagaggacttcgtgctcacggtcactggtaagaaacccccatgctgtgtcctttccaatcccgaccaaaaaggcaagatgcgcagaatagactgcctgcggcaggcagataaggtatggagactcgatctggtcatggtaattctgtttaaaggaattccactggagagcaccgatggagaaagattggtgaaaagtccacagtgttccaatcctggtttgtgcgtccaaccccaccatattggcgtgtcagtcaaagagctggatttatacctggcctacttcgtgcatgctgccggaatgccttcacctacaaccctgaagaagtccgaaaagtccggctttagttcaccatcgcctagtcagacaagcagtctaggcaccgccttcacacagcaccacagacccgttatcacaggaccccgagctagcccccatgctaccccgagcaccctgcacttcccgaccagccctattattcagcagcccggcccttatttcagccaccctgctatcaggtaccacccccaagaaaccctcaaagagtttgtgcaattagtctgtcccgacgccgggcagcaggccgggcaggtcggttttttaaaccctaacggcagctcccaggggaaagtccataatccattcttgccaactccaatgctgcccccccctccaccaccacctatggcacgccccgtcccacttcctgtcccagatactaagcctcctaccacctctacagagggtggagcggcaagcccaacctcccccacctattcaacaccaagcacatctcctgcaaatcggttcgtcagcgtgggaccaagagacccctccttcgtcaatattccgcagcagacccagtcatggtacttggggtag

SEQ ID NO: 126777 - DNA, 1464 bp, synthetic construct
  misc_feature 1..1464: note = Description of Artificial Sequence: Synthetic coding sequence
  source 1..1464: mol_type = other DNA
atgtactcccctctctgcctgacgcaagatgagttccacccatttatcgaagcactgctcccccacgtcagagcttttgcctatacatggttcaatttacaagctcggaaaagaaaatatttcaaaaagcatgaaaagaggatgtccaaggaagaggaaagagccgtcaaagatgagcttctgtccgaaaaacccgaggtcaaacaaaagtgggccagcaggttgctggccaagttaaggaaagacattagacctgaataccgtgaggacttcgttctcacggtgacaggaaaaaagcccccttgttgtgttctgtcaaatcctgatcagaaagggaaaatgcggcgaatcgactgccttaggcaggccgacaaagtgtggaggctggatttagtaatggtcattctttttaaaggaatcccactcgagtccaccgacggcgagagacttgtgaaatctccccagtgtagtaatccgggactttgtgtgcaaccacaccacataggcgtgagcgtaaaggaattggatttatacctcgcctactttgtccacgcggccggtcacctaggatttcaggactccttcgtaaccagtggagtgttttccgtcaccgaactggtgagagtgagccagactcctattgccgcgggcaccggcccaaacttcagcctgagtgaccttgagagtagctcatactacagcatgagccctggagctatgcgacggagcttgccaagcacatcatctacctcatcaacgaagaggctgaagtccgtagaagacgagatggacagtcccggcgaagaacccttctacaccggtcaagggcgatcaccaggcagcgggagccagagcagcggctggcatgaagttgagcctggaatgccatctccaaccactctaaagaagtctgaaaagtcaggttttagctctccctccccttcacagacttcaagcctgggaaccgcctttacccaacaccacagacccgtgattacaggaccccgggctagccctcacgccactcccagcacacttcactttcccacctcaccaataattcaacaaccaggaccgtatttttcacatccagcaatccgttaccacccccaggaaaccctgaaggaattcgtgcaactggtatgtccagatgccgggcagcaggccgggcaagtggggtttcttaaccccaatggcagtagccaggggaaggtacataatccgttcttgcctacccccatgctgcccccccccccacccccacccatggcgcggcccgtaccattaccggtgcctgacactaaaccacccacgaccagcaccgaaggaggagccgccagcccaacatccccaacctattccactccctcaacctcgcccgctaataggtttgtgtctgtgggtccccgggacccctcctttgtcaacatcccacagcagactcaaagctggtaccttggatag

SEQ ID NO: 126778 - DNA, 1401 bp, synthetic construct
  misc_feature 1..1401: note = Description of Artificial Sequence: Synthetic coding sequence
  source 1..1401: mol_type = other DNA
atgtacagcccgctctgtttaacccaggatgagttccatccgttcattgaagccctattgccacacgtccgcgccttcgcttacacatggtttaatctacaagccaggaaaagaaagtatttcaagaagcatgaaaaaaggatgtcgaaggaggaggagcgcgccgtgaaggatgagctcttaagtgaaaagcctgaggttaagcagaaatgggcatcccgattgctggcaaagctccggaaggacattagaccagagtatagggaagatttcgttctgacagtgaccggcaaaaaaccaccctgttgcgtgctgtccaatcccgatcagaagggaaagatgaggcgaatcgactgtttacggcaggctgacaaagtatggcgcctagacctggtcatggtgatcctgttcaaaggaatcccactggagtcaacagatggggaaagattggtgaaatccccgcagtgttccaatcccggcctgtgtgtgcaaccacatcatattggggtctctgtgaaagagctcgacctctatttggcatacttcgtccacgctgccgatagctcacagagcgaaagtccttcccagccgtccgacgcagatattaaagaccagcctgagaacgggcacctggggttccaggatagcttcgtcaccagcggtgtgtttagtgtaactgaattggtgagagtgtctcagactcctatcgccgctggaacaggccccaacttttcccttagtgatttggaatcttccagctactactccatgtctcctggggccatgcgcaggtcactgccttccacgtcgtctacgtcttccacaaaacggctcaagagcgtcgaagatgagatggacagcccaggtgaggaacctttctatactgggcagggtcgaagtcccggttcgggttctcagagctctggctggcacgaggtggagcccgctagccctcacgcaaccccaagcactctccattttcctacctcccctattatccagcagccaggtccatacttctcacacccggcaattcgctaccaccctcaggaaaccctcaaagaatttgttcaacttgtttgcccagacgcaggacagcaggcgggacaggtaggattcctgaatccaaatggttccagtcaaggaaaagttcataatcccttcctccctaccccaatgctcccgccaccacccccccctcctatggcgcgccccgttcccctgcccgtcccggacacaaaaccccctactacctctacggagggcggcgccgccagcccaacaagccctacttactccacacccagcaccagcccagccaacagatttgtctcggtgggcccaagagacccaagctttgttaacatccctcagcagactcagagctggtatctcggttag

SEQ ID NO: 126779 - DNA, 1665 bp, synthetic construct
  misc_feature 1..1665: note = Description of Artificial Sequence: Synthetic coding sequence
  source 1..1665: mol_type = other DNA
atgcagatgtgtagacctgcatccagtagtgtgttatacgtgcccacacgatggcccggtgggtgtggggcgacttggcaaagctgtccctcccccccaccccgcagaacccgcataccgcaacgtccagccgtcatgtatagcccactgtgcttaacgcaggacgagtttcatccattcattgaggctctgctgcctcacgttagagcttttgcttacacatggttcaacctccaggccagaaagcggaagtatttcaagaaacatgaaaagaggatgtccaaagaagaggagagagctgtgaaggatgagctgttgagcgagaaacctgaggtgaaacagaagtgggcatcaagattactcgcaaaactcagaaaggacatcaggcccgagtacagagaggactttgtcttgacggtgactggcaaaaagcccccttgttgtgttctctctaaccctgatcagaaagggaaaatgcgccgcatcgactgtcttcgccaggccgataaagtgtggaggctcgatctggtcatggtgatcctcttcaaggggatccccctggagagtacggatggggagcgtttagtgaaaagccctcagtgcagcaatcctggcctgtgtgtccaaccccaccacatcggtgtctctgtgaaggagctggacttgtacctggcctactttgtgcacgccgccgatagctcccagagtgagtctcctagccagcctagtgatgcagacattaaggaccagccggaaaacggccatctgggcttccaggattccttcgtcacctccggcgtgttctcagtaactgagcttgtgcgcgtgtctcagacgccaatagctgctggtacaggtccaaactttagcctctccgacctggagtcctcctcatactactccatgagtcccggcgcaatgcgccgcagcctcccctctacctcgagtacttcctccactaaacgcttgaaatctgtggaggatgaaatggacagccccggagaagagcccttctataccggccagggaaggtctcccggatccggtagccaaagttccggatggcatgaagtggagcccggaatgccatcaccaaccacgctgaagaaaagcgagaagtcaggcttctctagccctagccctagccagacttcaagtctggggacagcattcactcaacaccataggccagtcataaccggtccacgcgcgtcccctcatgctactccctccaccttacattttccaaccagccctattatccagcagcccggtccctatttctcgcatccggctatcagataccacccacaggaaaccctgaaggagtttgtccagttagtttgccccgatgctggacagcaggcaggtcaagtagggtttcttaacccaaatggatcttcacaaggtaaggttcacaaccctttcttgccaactccgatgctgccacccccccctccgccacctatggcccgtccagttccccttccagtgccagatacaaaaccacccacaaccagtacagaaggtggcgccgcgagtccaacctcccctacatatagtacacccagcacctctccagccaataggttcgtgtccgtggggcctagggacccatcattcgtcaacatccctcaacagacacagtcatggtatctcggctag

SEQ ID NO: 126780 - DNA, 1599 bp, synthetic construct
  misc_feature 1..1599: note = Description of Artificial Sequence: Synthetic coding sequence
  source 1..1599: mol_type = other DNA
atgaaactggccgactccgtcatggccgggaaggcgagtgacggctccatcaagtggcagctctgctacgatatatccgccaggacttggtggatggacgaattccacccttttatcgaggccctcttgcctcacgtgagggcgtttgcttatacgtggtttaacctccaggctcggaagcggaaatactttaaaaaacacgagaaaaggatgagcaaggaagaagagagggccgtgaaggacgaactcctatccgagaaacctgaagtcaagcagaaatgggcctcacgcctgttggcaaagctgagaaaagatatccggcccgaatatagggaggatttcgtcctgacagtcacgggcaaaaaaccaccttgctgcgtgctaagtaaccccgatcagaaaggcaagatgcggaggatcgactgcctgcgccaggctgataaggtgtggagattagatcttgtgatggtgattcttttcaaaggcattcctcttgagtcaacagacggcgagcgcctagtgaagtctcctcagtgcagcaaccctgggctttgcgttcagccacaccacattggcgtttccgtgaaggagctggacctgtatctagcgtactttgtgcacgcagcggatagctctcagagcgaatcaccgtcccagccatccgacgctgacatcaaagaccagccggagaatgggcacttgggctttcaagatagctttgttacttcgggagtgttctcagtgacagaactggttcgcgtatctcaaacacccatcgctgctggcacaggcccaaatttctccctcagtgacctggagtcatcctcttattactcgatgagtcctggagccatgcgcagatctctgccctcaacctcttcgactagttccacaaaacgcctcaagtcagtggaagatgagatggatagccccggcgaggagcccttttacacaggccagggcaggagtccaggatctggaagccagtcttctggttggcatgaggtcgagcccggtatgccgtcccccactactctgaagaagagtgaaaaatccggcttctcttctcctagccccagccaaaccagcagtttgggcacggcttttacacagcaccatagacctgtaattacaggtcccagggcgtcccctcacgcgactccatctactctgcactttcccacttcgcccatcatccaacagcccggcccgtattttagtcaccctgctatacggtaccaccctcaggaaacactaaaggaattcgtgcagctcgtgtgtccagatgccggccagcaggccggtcaagtcgggttcctcaacccaaatgggtcgtctcagggcaaggtccacaacccgttcctcccaacccctatgttgcctccgcctccacctccacccatggcgcgtcccgtgccactgcccgtgcctgataccaagccacctactacatccactgaggggggggcagcatcccctacaagcccaacttattccaccccgagtacaagtccagccaatcggttcgtgagcgttggcccacgtgacccttccttcgttaatatcccacaacaaactcaatcttggtatttgggatag

SEQ ID NO: 126781 - DNA, 1530 bp, synthetic construct
  misc_feature 1..1530: note = Description of Artificial Sequence: Synthetic coding sequence
  source 1..1530: mol_type = other DNA
atgtactccccactgtgcctgacccaggacgaattccatcctttcatagaagctttgttgccgcatgtgagggccttcgcctacacctggtttaacctgcaggcacggaaaagaaagtatttcaagaagcacgagaagagaatgagcaaggaagaagaaagggctgtgaaggatgagctgctgtccgaaaaacctgaagtgaagcaaaaatgggcatcccggctgttggctaagttgcgcaaagatatcagaccagaatatcgagaagacttcgtgctcaccgtcaccggcaagaagccgccctgttgtgtgctgagtaaccccgaccagaagggcaagatgcgacgcattgattgcctgcgacaagctgacaaggtttggagactggatctcgtcatggtgatactgtttaaaggaatccctctcgagtcgactgacggggagagactcgtgaagagtcctcagtgttctaatccgggactgtgtgtccaacctcaccacattggcgtttcggtgaaagaattggatctctacctcgcctactttgtgcacgccgccgatagtagccaaagtgagtccccgagccaaccaagcgacgccgatataaaggaccaacctgagaatgggcaccttggctttcaagattcttttgtaactagtggcgtcttctcagttacagagctggtccgagtcagtcaaacacccatcgccgctgggaccggccctaatttttctttgagtgacctagagagttcatcgtactattccatgagccccggcgctatgagacgtagcctaccttcgacctccagcacctctagcaccaagcgtctaaaaagcgtggaggacgagatggactcaccgggcgaggaaccattttacaccgggcagggccgctccccaggcagcgggagccaatcaagcggatggcacgaggtggaaccaggcatgccgtctcccacgacccttaagaaatccgagaagagtggcttctcatctccttccccctctcagacctcctccctgggaaccgccttcacacagcaccatcgacctgttatcaccgggccgcgcgcctcccctcatgcaaccccatctacactacattttcccacctcacccattatccagcagccggggccgtacttttcccatcctgctatcagataccacccccaagagacacttaaagagttcgttcagctggtttgccctgacgccggccagcaagcgggtcaagtgggattcctcaacccaaacggctctagccaagggaaggtccataatccattcctgccaaccccaatgctgccacccccccccccgcccccgatggctaggccagtacctctcccggtccccgatacaaagcctccaactacctctacagagggaggcgccgcttccccaacttctcctacctattcaaccccttcaacgagcccagccaaccgcttcgttagtgtgggccccagggacccctcttttgtaaacatccctcagcagacacagtcatggtaccttggttag

SEQ ID NO: 126782 - DNA, 1506 bp, synthetic construct
  misc_feature 1..1506: note = Description of Artificial Sequence: Synthetic coding sequence
  source 1..1506: mol_type = other DNA
atggatgagtttcatccttttatcgaagccctgctacctcatgtgagagcctttgcctacacgtggttcaatcttcaagccagaaagcgcaaatactttaaaaagcatgagaagcgaatgtcgaaggaggaggagagggcggttaaagacgaactgctttcagaaaaacccgaggtgaaacaaaaatgggcctcaagactgctggcgaagctaagaaaagacattcgcccagaatatagagaagatttcgtgctgacagtaacaggtaagaaaccaccttgctgtgtgttatcaaaccccgatcagaaaggaaagatgcggcgtattgactgtcttcgccaggctgacaaggtctggcggctagatcttgtgatggttatcctgttcaaagggattccactggagtcgaccgatggcgagcgactggtgaagagcccgcaatgctctaaccctggcctgtgcgtccaaccccatcatatcggcgtttctgtgaaggagctcgatctgtacctggcctacttcgtgcatgccgcagattctagccagagtgagagtcctagtcaacctagcgatgcagatattaaggaccagccagagaatggacatctcgggttccaggactccttcgttacctcaggggttttcagtgtaacagagctggtgcgcgtctcacagacacccatcgcagcaggcactggcccgaacttctcgctgtcggacctcgaatccagctcatactatagcatgtctccaggggcgatgcgaagatccctgcctagcacctcctcaacgtccagcaccaaaaggctcaaatcagtggaggacgagatggatagtccgggagaagagcccttctatacaggccagggaaggtccccgggaagcggcagtcaaagcagcggctggcatgaagtcgagcccgggatgccaagtcccactacactaaagaagtccgagaagagtggcttcagctcgcctagcccatcccagacgagcagcctggggactgcctttacgcaacatcaccggcccgttattaccgggcccagagcctccccacacgccaccccctcaacgctgcatttccccaccagcccgataattcaacagcctggaccatacttttctcacccggccatccgctaccatccccaggagacccttaaggaatttgtgcagctggtgtgccctgacgcgggccaacaagccgggcaggtcggttttttaaatccgaatggcagcagtcaagggaaggtgcacaacccattccttcccactccaatgctccctccacctccaccccctccaatggctagacctgtgcctttgccagtgcctgataccaaaccccccacaacctctactgaggggggagctgcatcccctaccagcccgacctactcaaccccatcaaccagccccgcaaatcgttttgtgtccgtgggacctcgcgaccctagcttcgtgaacatcccacagcagacccagtcatggtatttagggtag

SEQ ID NO: 126783 - DNA, 1497 bp, synthetic construct
  misc_feature 1..1497: note = Description of Artificial Sequence: Synthetic coding sequence
  source 1..1497: mol_type = other DNA
atgtatagtcccctgtgtctaacgcaagacgagtttcacccctttatagaggcgctgctacctcacgttcgcgctttcgcctacacttggtttaatctgcaggcgcggaaaagaaagtatttcaagaaacacgagaaaaggatgtcaaaggaagaggagcgggcagtgaaagatgagttgctgagtgagaaacccgaggtgaaacagaagtgggcctcacgattgctggcaaaattgcgcaaagacatcaggcctgaataccgcgaagacttcgtactaacagtgacgggcaaaaaaccgccatgctgcgtactgtcaaatcctgaccagaaaggaaaaatgcggcgcatcgactgcttgcgacaggcagataaagtttggagactggacttggtcatggtcattttgttcaaaggcatccccctcgagagtacggacggcgagagattggtaaaaagcccccagtgttccaatcctggactctgcgtgcaaccgcatcatatcggagtctccgtcaaggagcttgacctgtatctcgcttactttgtgcacgctgctgatagcagccaaagcgagtccccctcccaaccctctgacgcggacatcaaagatcagccggagaacggacatcttggctttcaggacagcttcgtcaccagcggtgtcttctcagtgacagagctggtgcgagtgtcgcagaccccaatcgccgctggcaccggccctaattttagtctttccgacttagagtcctccagttattatagtatgtcgcccggcgccatgcgacggagtcttccctccacaagctctacatcatctacaaaacggctgaaaagcgtcgaagacgagatggacagccccggtgaagagcctttttataccggacagggaaggtctcccgggtccgggtctcagtcctctggatggcatgaggtggagccggggatgcctagccctactaccctgaaaaaaagtgagaagtccggctttagctctccatccccatcccagacatctagtctcggaactgcctttacgcagcatcatcgcccagtgattaccggaccaagggcctcacctcacgccacacctagcacactgcactttcctacgtctcccatcatccagcagccaggcccgtacttcagccatcctgccatcagataccacccacaggagacgctgaaagaatttgtgcagctggtgtgccccgatgccgggcaacaggccgggcaggtggggttccttaatcccaatggatcaagccagggaaaggttcataatccctttctcccaacacccatgttaccccccccaccaccgcctccaatggcgcgacccgtgcctctgcccgtgccagataccaagcccccaaccacttccaccgaggggggcgccgcaagtcctacgagtccaattttagtgcccggcataaaagtggcggcttcccaccatcccccggacagacctcctgacccattctcaaccttgtag

SEQ ID NO: 126784 - DNA, 603 bp, synthetic construct
  misc_feature 1..603: note = Description of Artificial Sequence: Synthetic coding sequence
  source 1..603: mol_type = other DNA
atgatgtacagcccaatttgccttacgcaggatgagtttcatcctttcatcgaggcattgttgccccacgtcagggctatcgcctatacctggtttaacttgcaggccagaaaaagaaaatacttcaagaaacacgagaagcgtatgtctaaggacgaggagcgagcagtcaaggacgaactcttgagtgagaagcctgagatcaaacagaaatgggctagcaggctgctggcaaaactgcggaaggatatacgtcaggagtaccgggaagactttgtcctcacagtcaccggcaaaaagcacccatgctgtgtgttgtctaatcctgatcagaagggaaaaatacgtaggattgactgtctgaggcaggctgataaggtgtggcggttggatctggtcatggtcattctgttcaagggaatcccactggaatccaccgacggcgaacgacttatgaagagcccacactgcaccaatcccgccttgtgcgttcagccacaccacataaccgtttctgtgaaagagctagacctctttctggcctattacgtacaggaacagggcaaaaatttcttctccagtaacaagtgcataaaaatctag

SEQ ID NO: 126785 - DNA, 507 bp, synthetic construct
  misc_feature 1..507: note = Description of Artificial Sequence: Synthetic coding sequence
  source 1..507: mol_type = other DNA
atgaatagcggcgttaatctacagcggtctttgtcatccccccccagttcaaagcggccaaagacgatcagcatcgatgaaaacatggagccttccccaacaggagacttctacccaagcccatccagcccggcagccgggtcacgcacctggcatgagagagatcaggacatgagtagtcccaccaccatgaaaaagccggaaaaaccattgtttagcagcgcatccccacaagactcatcacctagactgtctacattcccccagcaccaccaccctgggattcctggcgtggctcattcggtaatctctactcggactccaccacccccatctccactccctttccctacacaggccatactcccgcccgcaccgagctcctacttcagccatcctacgatcaggtaccccccacacttgaacccccaggacactctgaaaaactacgtaccctcttacgacccctctagcccccagacctcacaatcctggtaccttggctag

SEQ ID NO: 126786 - DNA, 1341 bp, synthetic construct
  misc_feature 1..1341: note = Description of Artificial Sequence: Synthetic coding sequence
  source 1..1341: mol_type = other DNA
atggagcggattccggtgagtgtggacttttgggtggtctgctgtgctgtgctgaaatgcaaccccggtatcccgaaacggatgagtaccctgtgctttggatttagcgatgagtttcatccgttcatagaggcactcctcccacacgtccgcgcgatcgcatacacctggtttaacttgcaggcgcggaaaaggaagtactttaagaaacacgagaaacggatgtcgaaagacgaagaacgcgctgtcaaagacgagctgctctccgagaaaccggagatcaaacagaaatgggcatctcgtctgctggctaagctgaggaaggatattcggcaagagtatcgagaggatttcgtgctgactgttactgggaagaaacacccttgctgtgtgttgtcaaaccccgatcagaaaggtaagatccggcgaatcgactgcctaagacaggccgacaaggtatggcggctcgacctggtcatggttatactctttaaagggatcccactagaatccactgacggtgaacggctgatgaagtcaccacattgtacaaatccggccttatgcgtgcaaccacaccacataaccgttagcgtcaaagagctggacttgtttctggcttactatgtgcaagaacaagattcaggtcaatctggaagtccgtctcataatgacccggccaagaacccacccggctatttggaagacagttttgtcaaaagcggagtcttcaacgtttctgagttggtgcgtgtctcccgcactcccatcacccagggaaccggcgtgaacttcccgataggggagattcccagtcagccgtattaccatgacatgaattcaggtgtcaatctacagaggtcgctgtcttccccaccttcatctaaacgcccgaaaacgatctcaatcgacgagaacatggaacccagccctaccggggacttctatccgagccccagctccccagcagcaggctcaagaacatggcatgagcgagaccaggacatgagctcacccacaacgatgaaaaaacccgagaaacctttattctcctcagccagtccacaggactccagccccaggctgtccacattcccacagcatcaccacccaggaatccccggagtcgctcatagcgtgattagtactcgaactccaccccctccttctcccctgccgtttcccactcaggctattctgccacctgcgcctagtagctacttttctcatcccaccatccggtacccgccccacctgaacccccaagataccttaaagaactacgttccttcgtatgacccatccagtccacagacatcccagtcatggtacttgggatag

SEQ ID NO: 126787 - DNA, 1485 bp, synthetic construct
  misc_feature 1..1485: note = Description of Artificial Sequence: Synthetic coding sequence
  source 1..1485: mol_type = other DNA
atgatgtattcgccgatttgcctgacgcaggacgagttccaccccttcattgaagctttactgccccacgttcgcgctattgcttatacatggtttaatctgcaggcaaggaagcggaagtattttaaaaagcacgagaagagaatgtccaaagatgaggagagagcggtaaaggacgaactgctgagtgaaaaacctgagattaagcaaaaatgggcctcccgccttcttgcgaaactgcggaaagacatcagacaggaatacagagaagatttcgtgctgacagtaactggaaaaaaacatccctgttgcgtccttagtaaccccgaccaaaaaggcaagattcgcaggatagattgcttacgccaggccgataaggtgtggagactcgacctcgtcatggttattttgtttaagggcatccccctcgagagtactgatggggaacgactcatgaaaagccctcactgtaccaaccctgcactgtgcgttcagccacatcatattaccgttagcgtcaaagagctggacttgttcctggcttactatgtccaggaacaagatagcgggcaatccggaagtccaagtcacaacgacccagccaagaaccctccaggttatttggaggatagttttgtcaaatccggggtgttcaatgttagcgaactggtccgcgtctcacgtactcctataacccaggggactggcgtcaactttccaatcggagagatcccgagtcaaccatactatcatgacatgaatagcggcgtgaatctccagagaagcctaagtagccctccttcctccaagcgccctaagaccattagtatcgacgagaacatggagcctagccctaccggggacttttatccgtctccaagttcaccagcagcaggatcacggacctggcacgagcgagatcaggacatgtcttcgccgacaaccatgaaaaagcctgaaaagcctctgttcagtagcgcatctccacaagatagctcccctaggctgagcacctttccgcagcaccatcatcctggcatccccggggttgcccactcagtcatatcaactcgcacccctccccccccctctcctctcccttttcctacacaggcaatccttccacccgctccttcttcctacttctctcaccccaccatcagataccctccacacctgaatccccaggatacacttaaaaactatgtgccaagctatgacccgtcatccccacaaacctcacagcccaacggatctggccaggtcgtcggcaaggtgcccggacattttacaccagttctagccccttcgccacacccctctgccgtaaggcccgtgaccttgtctatgactgacaccaagccgatcaccacaagcaccgaagcctatacagcttcgggcacgtctcaggctaaccggtatgtcggtcttagccccagagatccctccttcctgcatcagcagcagtcctggtatcttggatag

SEQ ID NO: 126788 - DNA, 1263 bp, synthetic construct
  misc_feature 1..1263: note = Description of Artificial Sequence: Synthetic coding sequence
  source 1..1263: mol_type = other DNA
atgatgtactcccccatctgcctgactcaagacgagtttcacccctttattgaagcactgctccctcatgtcagggcaatcgcatatacatggttcaatctacaagccaggaaacgtaagtactttaagaagcatgaaaaacgcatgtccaaggacgaggagagagcagtcaaagacgaactcctctccgaaaagccagaaataaagcagaaatgggcaagtagacttctggcgaagctgcggaaagacatccgccaggagtaccgggaggatttcgtgcttactgttacaggaaaaaaacacccttgctgtgtgctatcgaacccagaccagaagggcaaaataaggagaatcgactgcctcagacaagccgataaggtttggagactggatctggttatggttattctgtttaaagggatccctctcgaaagcacggatggtgaacgcctaatgaagtccccacactgtacgaaccccgccctttgtgtccaaccccaccacatcacagtgtcagtaaaagaactcgatcttttcctagcttactatgtgcaggagcaggacagcggtcagtccggtagtcctagccacaacgatcctgcaaaaaatccccccgggtacctggaggattcttttgtgaagtccggcgtcttcaacgtgagtgagctcgttcgggtgtctcgcacccccattacacagggaactggtgtgaatttccccattggcgagatcccatcacagccttactaccacgatatgaatagcggtgtgaaccttcaacggtcattgtctagcccccctagctctaaaagacctaaaacgatttccattgacgagaacatggagccttcccccactggagatttttatccctctcccagtagtcccgccgcggggtccaggacctggcacgaacgagaccaagatatgtcctccccgactactatgaaaaagccggaaaaacccctgtttagttctgcaagcccccaagacagctctccacggctcagcacattcccccagcaccaccacccaggcatccctggcgtggcccatagtgtgattagcacccgcaccccaccaccccctagccccttacccttcccaacgcaggccatactgcctcctgccccttcctcctatttctcccatcccaccatccgctatccaccacatcttaatccacaggacaccttaaagaactatgtgccatcctatgatcccagttctcctcagacgtcacaaagctggtacctaggctag

SEQ ID NO: 126789 - DNA, 1686 bp, synthetic construct
  misc_feature 1..1686: note = Description of Artificial Sequence: Synthetic coding sequence
  source 1..1686: mol_type = other DNA
atgatgtactccccaatctgtctaacacaggacgaattccaccctttcatcgaggccctgcttccgcacgtcagggccatcgcttatacctggtttaatttacaggctcggaagcgaaagtattttaaaaagcacgagaaacgcatgtctaaggatgaggagcgcgcggtgaaggatgagcttttgtctgaaaaaccagagatcaagcaaaagtgggctagcagactgttggccaaattgcggaaagacataagacaggagtatcgtgaagattttgtcctcactgtaaccggtaagaagcatccctgttgcgtcctctcaaaccctgaccagaagggcaaaattcgtcgcattgactgcctgaggcaggcagataaggtgtggagacttgatctggtgatggtaatattgttcaagggaatccccttagagagcaccgatggtgaaagactcatgaaaagtccccactgtacaaatccagccctgtgcgttcagccccaccacataaccgtgtccgtaaaggaactagacctgttcctcgcctactatgtgcaagaacaagacagcggccaatcggggtctccaagtcataacgatcctgctaaaaatccaccaggatatcttgaggactctttcgtcaagagcggcgtgtttaacgtctcagaactggtaagggtgtctaggacacctattactcagggaacaggggtgaacttccccattggggaaattccctcacagccatactaccacgatatgaatagtggagttaatctgcagagaagcctgagctcacccccatccagcaaaaggcctaagacaatttctattgacgagaatatggagcccagccctacgggcgacttctatccatcgcctagttcaccagcagcgggatcacgcacctggcacgagcgcgaccaagacatgtcaagtcctacaacaatgaaaaagccagaaaagccactatttagctcagcttcgcctcaggactcatcacctagactttctacctttccacagcaccatcaccccggtattcccggtgtcgcccattcagtgatcagtacaaggactccaccgcctccatctcccctcccctttccaacccaggccatactcccgcccgccccctcgtcatacttctctcatcccaccataagatatcctcctcacttaaaccctcaggacactctgaagaattatgtgccctcctatgatccaagttctccccagacttcgcaaccaaacggttccggacaagtcgtaggaaaagtacccggtcattttactccggtcctcgcgccttctccacacccctccgccgttaggccggtgactctgtctatgaccgacacaaagcctattaccactagtaccgaagcctacaccgcaagcggaacgtctcaggctaacagatatgtcggactcagcccaagagatccctctttcctacatcagcagcagttaagaatctgcgactggacaatgaatcagaacggccggcacttgtacccttctacatcggaggacactctgggcatcacctggcagtctcccgggacctgggcttctctggtgccattccaagtttccaaccggacccccatcctacccgcaaacgtgcagaattacggcctcaatatcattggggaacctttcctacaagccgagacatctaattag

SEQ ID NO: 126790 - DNA, 1464 bp, synthetic construct
  misc_feature 1..1464: note = Description of Artificial Sequence: Synthetic coding sequence
  source 1..1464: mol_type = other DNA
atgatgtactcacccatttgtctaactcaggacgagtttcacccctttattgaggcgctcctccctcacgtgcgcgcaatcgcctatacgtggttcaatctgcaggcaagaaaacgtaagtatttcaagaaacatgaaaaacggatgtccaaggatgaggagagggctgtgaaggacgaactgctgagtgagaagccagagatcaagcagaaatgggcaagcagacttcttgctaaactcagaaaagacatacgccaggagtatagggaggactttgtgcttaccgttaccggaaaaaagcacccctgttgcgtgttgagcaaccctgatcagaaaggcaaaatccgtcgaattgattgtctgaggcaggcggacaaagtgtggcgattggacctggttatggtcattctgttcaagggtatcccactggaaagcactgatggagagcgtctaatgaagagccctcactgcaccaatccagccctttgcgtgcaaccccatcacatcacagtgtcagttaaggagttggacttattcctggcatactatgttcaagagcaagactcagggcaatctgggagtccctcccacaatgaccccgccaagaacccacccggctatctggaggactcctttgtgaagtcaggggtttttaatgtgagcgaactggtgcgggtgagcaggacacccattactcaggggaccggagtaaacttccccattggagagatcccatcacagccctactaccatgacatgaactccggagttaacctccagcgctccctgtctagccccccttcatcaaaaagaccaaagacaatatcaatagatgagaacatggaaccttcccctaccggagacttctatcctagtccttcatcacccgctgctggaagtcgtacgtggcacgagagggaccaggatatgagttccccgacaacgatgaaaaagcccgaaaaacctctgttttccagtgctagtccccaggactctagcccacggcttagcacattccctcaacatcaccatcccggcattcccggggtagctcattctgtgatttcaacgcggactccgccaccgcccagccctctgccgttcccgacccaggcaatcctgcctcccgcaccgtctagctactttagccatcccaccatccggtatcctccgcacctcaacccccaggacactctgaaaaactatgttccatcctatgacccctcgtccccgcagacctcccagctccggatatgcgattggacaatgaatcaaaacggtaggcatctgtatccatctacatcagaagatactctgggtatcacatggcagtcccccgggacgtgggcctccttggtgccgttccaggtttccaatcggacccctatattaccagcgaacgttcaaaactacgggctcaacatcatcggcgagccattcctgcaggctgaaacgtccaattag

SEQ ID NO: 126791 - DNA, 1713 bp, synthetic construct
  misc_feature 1..1713: note = Description of Artificial Sequence: Synthetic coding sequence
  source 1..1713: mol_type = other DNA
atgatgtactcaccaatctgcctgacgcaggatgagttccacccattcatagaggccctgctgccacatgtgcgggccatcgcatatacatggttcaatctgcaggcccgaaagagaaaatattttaagaaacacgagaagagaatgagtaaagatgaagaacgagctgtcaaggacgagctgctcagcgaaaaaccagagatcaagcagaagtgggcttcacgcctgctggcgaagctgaggaaagacattcgccaagagtatagagaagattttgtccttacagttaccggcaagaaacacccttgctgcgtgctgtccaatcctgaccagaagggcaagatcaggcgcatcgactgcctgagacaggccgataaggtgtggaggttagacctggtgatggtgatactctttaaaggtatccccttggagtctacggacggagaaaggctgatgaaatccccccactgtacaaaccccgcactgtgcgtccaacctcatcacataaccgtcagcgtcaaggaacttgacctgttccttgcctactatgtccaggagcaggattctggccagagtggctccccttcacacaacgacccggccaaaaatcccccgggttatctagaggatagctttgttaagtccggggtgtttaacgtgtcagagctggtacgagtgtccagaacccccatcacgcaagggactggagtgaactttcccatcggggaaattccttcccaaccatattaccacgacatgaactccggggtgaacctgcagagatctctgagttctcccccatccagcaagcgccccaaaactatcagcattgatgaaaacatggagccatcacctaccggggacttttatccaagtccttcgtcacccgctgctggttctaggacctggcatgagcgcgaccaggatatgagcagccctaccactatgaaaaagccagaaaagcccctcttctctagcgcttctccacaggactccagtcccagactgtcaacattccctcagcaccaccaccctggtatcccaggcgtggcacacagcgtgatctccacacgcactcctccacccccttcaccgctcccctttccaactcaggcaatcctgccccctgcccccagtagctatttttcacacccaactatcaggtacccccctcacctcaacccacaagacacccttaagaattatgtcccgagttatgatccatcaagcccacaaaccagtcagccaaacggttctggacaggtggttggcaaggtgccagggcattttactccagtcctagcaccttctcctcatcctagcgcagttagacctgtgacgctcagtatgaccgatactaagccaattaccacctccacagaaggcgaggctgccagccccaccgccactacgtacacggcttccggtacctctcaggctaatagatacgttggcctctccccaagggatcccagtttccttcatcagcagcaactcagaatttgtgattggacaatgaaccaaaacggaagacacttatacccttctacatccgaggatacgctgggcattacgtggcagagcccagggacctgggcatctctggtccccttccaagtatcaaaccgaacccccatactccccgctaatgtacagaattatggccttaacattattggtgagccctttctgcaggccgaaactagcaattag

SEQ ID NO: 126792 - DNA, 930 bp, synthetic construct
  misc_feature 1..930: note = Description of Artificial Sequence: Synthetic coding sequence
  source 1..930: mol_type = other DNA
atgaacagtggcgtgaacctccagagaagtctgtcttcacccccctcctctaagcgcccgaaaacaattagcattgacgagaacatggagccttcccccacgggcgacttttacccatcaccctccagtcccgctgccggttccaggacttggcacgaaagggaccaggacatgtcgtcaccgacaaccatgaagaagccagagaaacccctcttttcctccgccagtccgcaagattccagccctcggctcagtacatttccccaacaccatcatcctggcataccgggtgtggcacacagcgttatcagtacacgtacccctcctcccccaagcccactcccgttccctactcaggctattttacccccagccccaagtagctactttagccaccccacgatccgctatccaccccatctcaacccccaggacacactcaagaattatgtcccatcatacgacccttccagcccacagaccagccaacctaatggatcaggacaggtcgtgggtaaagtgcccggtcacttcacccccgtgctggctccgtccccacatccatctgcggtgaggcccgtcaccttgagcatgactgacactaagcctattacgacgtccaccgaggcatatacagcatcaggaacatcgcaggctaatcgatacgtaggattgtccccgcgagacccaagcttcttgcaccagcagcagttgaggatctgcgactggactatgaaccagaacggacggcacctttatcccagtacttctgaagacaccttagggatcacatggcagagccccgggacgtgggctagtctggtcccgttccaggtatcgaataggacccccatattgccagctaatgttcagaactatggcctgaatatcatcggtgagcccttccttcaggccgagacatctaattag

SEQ ID NO: 126793 - DNA, 1272 bp, synthetic construct
  misc_feature 1..1272: note = Description of Artificial Sequence: Synthetic coding sequence
  source 1..1272: mol_type = other DNA
atgtattcctctccgttatgcctaacacaggacgaattccacccttttattgaagccttgctgccgcatgtgagggcctttgcgtatacttggtttaatctgcaggcccgtaaacggaagtacttcaaaaagcatgaaaaaagaatgagcaaggatgaggaaagagctgtgaaggacgagcttctgggtgaaaagccagaggtgaagcagaaatgggcttcccggctcctcgctaagctccggaaggacatccgtccagaatgtcgagaagactttgtgctgtctatcacagggaaaaaagctccgggatgtgtgctttctaatcctgaccagaaggggaagatgagaaggatcgactgcctgcgacaggctgacaaagtatggaggctagacctggtgatggtgatccttttcaagggcattccattagaatcaactgatggtgagaggttagtcaaagccgctcagtgtggacaccctgtactgtgcgtgcagccccatcatattggtgtggcggtaaaggagttggatctgtatttggcctacttcgtgagggagagggacgctgagcagtctgggtccccgcgcactgggatgggtagcgatcaggaggacagcaagcctattactttggacaccaccgactttcaggagtcatttgtaacctcgggcgtgtttagtgtaactgaactaatccaggtttcaagaactccggttgttactggcaccggcccaaacttttcgctcggcgagctgcagggacacctggcatacgatcttaaccccgccagcacaggcttacggaggacactgccctccacttcatcctccggctctaagcggcacaagtctggctccatggaagaggacgtggacacatctcctgggggagattactatacttcaccaagttcccccacgtcatctagcagaaactggaccgaggatatggaaggcgggatctctagccccgttaagaaaacagagatggacaagtcacccttcaactcacccagccctcaggatagcccccggctgtctagtttcactcagcaccaccgccctgtaatcgccgttcacagcggtatagctcgttctcctcacccaagcagcgcgttgcacttccccactacatctatcctgccccaaacagctagcacatacttcccgcacaccgccataagataccccccccatcttaatcctcaggaccctttaaaggatttagtgagtctggcgtgtgatccggcgtcccaacagcccggaccctag

SEQ ID NO: 126794 - DNA, 1287 bp, synthetic construct
  misc_feature 1..1287: note = Description of Artificial Sequence: Synthetic coding sequence
  source 1..1287: mol_type = other DNA
atgtattcttcccccttgtgccttactcaggatgagttccatccttttatcgaagccttactcccacatgtgcgagcttttgcatacacgtggttcaacctgcaagcccgcaaaaggaaatacttcaaaaagcacgagaaaaggatgtctaaggacgaggagagggccgtgaaagacgagctcctgggggaaaagccagaggtcaagcaaaagtgggccagtcgattgcttgctaagctcaggaaagacatcagacccgagtgccgagaggatttcgtcttgtcaatcacaggcaagaaagctcccggttgtgtcttgagcaatccagaccagaaggggaagatgagaaggattgattgcttacgccaggccgacaaggtttggcggctggatctggttatggtaatcctgttcaaaggcattcccttggagagtacagatggagagaggctcgtgaaggccgcacagtgtggacacccagtgctctgcgtccaaccccatcacatcggggtagccgtcaaggaactggatctgtatctggcctatttcgtgcgggaaagagacgcggagcaatcaggatcacccaggaccgggatgggaagtgaccaggaggatagcaagccgataactctggatacaaccgactttcaggaaagttttgtaacatccggcgtgtttagtgtcacggagctaatacaggttagcagaacccctgtggtcacaggaacaggaccaaatttcagcctgggcgaactgcaggggcacctcgcttacgatcttaaccctgcgtccacaggcctccgacgaaccttgccgagcacatcttcctccggaagcaaaaggcataagagtggcagtatggaggaagatgtggatacatcccccggcggtgattactacacaagcccctcaagtccaacctcaagctctcggaactggactgaagacatggagggcggtatcagctcgccggtgaagaaaactgagatggataaatccccctttaacagccccagtccacaggattcacctcggttgtccagttttacacaacaccataggcccgtaatcgctgtgcattcaggtatcgctcggagccctcatccaagctctgctctccactttcctaccacaagcattctccctcagactgcgtccacatatttccctcatactgcgattcgatatccgccacacctgaatccacaggaccccctgaaagacctggttagcctggcctgcgaccccgcttcccagcagccaggaccctcatggtatctgggctag

SEQ ID NO: 126795 - DNA, 1527 bp, synthetic construct
  misc_feature 1..1527: note = Description of Artificial Sequence: Synthetic coding sequence
  source 1..1527: mol_type = other DNA
atgtatagcagccccttgtgcctaactcaggacgaattccacccattcatcgaagcccttctgcctcatgtgagagcatttgcttatacatggttcaacttgcaggccaggaagcgaaagtactttaaaaaacacgagaagagaatgtctaaggacgaggagagggcggtaaaagacgagctgctgggcgagaagccggaggtgaagcagaaatgggctagcagactgctggcgaagctgaggaaagatataagacccgagtgtcgcgaagattttgtgctgtctatcacaggcaagaaagcaccgggctgtgtcctctcgaatccggatcagaaaggtaagatgaggcgtatcgactgccttaggcaggcagacaaggtgtggagacttgacctagtaatggttatactatttaaaggtattccgctagaatcaacagacggcgagcggctggtgaaggcagcccagtgcgggcatcccgtgttgtgtgtacagcctcatcacattggtgtagccgtgaaggaactggacttatatttggcctatttcgttcgcgagcgggacgcggagcaatctggatcaccaaggaccggcatggggtcagaccaggaggactctaagcccattactctcgatactactgactttcaagagtctttcgtcacaagcggggtattcagtgtaactgaattgattcaagttagccgtaccccggtggtgaccggaacagggcctaatttttcactcggtgagctccaaggtcatctcgcttatgaccttaaccccgcatcgacaggactgcgaaggactctgccctctacatcaagttctggctcaaagcgtcacaagtcaggctcaatggaagaggacgtagacacctctccaggcggggattattatactagcccctcctcacccactagtagcagtcgcaactggacagaggacatggaaggtggaatatcctcacccgtaaaaaaaactgagatggataaatcccctttcaacagtcccagcccccaggactcaccccggttgagctccttcacccaacatcaccgtcctgtgattgctgtccattcaggcattgcccggagccctcacccttcatccgctcttcacttccctacgacaagtatcttaccccagacggcctccacctattttcctcatactgccatccgctacccgccccacctaaacccacaagatccacttaaagatctcgtgtcactcgcttgtgatccagcatcgcaacagcctggacctctcaacgggtccggtcagctgaagatgccttcccattgcctgtcagcccagatgctagctcctccacctcctggactgccacggttggccctgccacccgccactaagcccgccactaccagtgagggaggcgccacatcaccaacgtcaccttcttattcccctcccgacaccagccctgcaaaccggagctttgtcggtctgggacctagagatccagccggcatatatcaggcacagtcatggggcgacggttag

SEQ ID NO: 126796 - DNA, 1221 bp, synthetic construct
  misc_feature 1..1221: note = Description of Artificial Sequence: Synthetic coding sequence
  source 1..1221: mol_type = other DNA
atggatgagttccatcctttcattgaagcactactcccccacgtgcgcgcctttgcctatacttggtttaacctgcaggctagaaaaagaaaatatttcaagaaacacgagaaacgtatgagcaaggacgaagaaagagctgtcaaggacgaactgctgggtgagaagcctgaggttaagcagaagtgggctagccgcctgctagctaaactgcggaaagatataagacccgagtgtcgggaggacttcgtcttgtctatcacagggaaaaaagcccctggctgtgtgttgtccaacccagaccagaagggcaaaatgcgaagaatcgattgtctgagacaagctgataaagtgtggcggctggatctggttatggtcatcctgttcaaagggatcccactggagtcaacggacggagaacgcctagtaaaagccgcccagtgcggacaccctgttctgtgcgtgcagccccaccatattggggtcgctgtgaaagaactcgacctatacctggcctacttcgtgagggagcgcgatacaacagacttccaggagtccttcgtcaccagcggtgtgtttagcgtgaccgaactgatccaggtaagccggacgcctgttgttacaggcaccggccccaatttcagtctaggcgaattgcagggccatctggcttatgacctcaacccagcttctactgggctgcgcaggaccttgccgtcaacttccagcagcggatctaagagacataaatccggttcgatggaagaagatgtggatacatctcccggcggggattactatacttcacccagcagtccaacttcaagtagccgcaattggactgaagacatggaaggcggcatttcgtcccctgtgaagaaaacagaaatggataaatccccgtttaactcaccctcccctcaagactccccacgactgtcaagcttcactcagcatcacaggcctgttattgcagtgcactctggcatcgcccgatccccacaccctagcagtgcccttcactttccaacgacatctatcctgccacagacagcctcgacctatttccctcataccgcaataagatacccgcctcatctcaatccacaggatcctcttaaagatcttgtcagtcttgcctgtgatccagcatcccagcaaccaggccctcctaccctgcgccctaccaggcctctgcagacagtgccgctgtgggactag

SEQ ID NO: 126797 - DNA, 1293 bp, synthetic construct
  misc_feature 1..1293: note = Description of Artificial Sequence: Synthetic coding sequence
  source 1..1293: mol_type = other DNA
atggacgagtttcacccttttatagaagcccttctaccccacgtgagagcttttgcgtacacctggtttaatttgcaggctcgcaagagaaagtactttaaaaaacatgaaaagaggatgtcaaaagacgaagagagagccgttaaagatgaactgctgggcgagaagcccgaagtcaagcagaaatgggcaagcagacttttggcgaagctcagaaaagacatcagaccagagtgccgggaggactttgtattatccataaccggcaagaaagctccaggctgtgtgctgagtaatcctgaccagaaggggaaaatgcggagaattgattgtctgcggcaggccgacaaggtctggagattagatctcgtaatggtgattctctttaagggcatccctctggaaagcactgacggggagcggcttgtcaaggcggcccaatgcggccaccccgttctgtgcgtgcagccccaccatatcggagtggctgtcaaggaattggatctttatctggcgtattttgtccgtgaaagggatgctgaacagtccggttccccccggaccggtatggggtctgaccaggaggattccaaacccattaccctggacactactgattttcaagaatctttcgtgacctcaggcgtcttttctgtcaccgagcttattcaagtatcccgaacccctgtggttacagggacaggacccaacttttcattgggtgaactccagggtcacttggcttacgacctcaacccggcctccacaggtttacgcagaactctgccaagcaccagttctagtgggagcaagcgacacaaatcgggcagcatggaagaagacgtggatacatctcccgggggcgattattacactagtcccagtagccccacctccagttctcgtaattggactgaggacatggagggaggtatttctagccccgtcaagaagacagaaatggacaagtctccttttaattccccatcaccccaagatagccctcgactgagctcattcactcagcatcaccgacccgtgattgccgtgcatagcggtatcgccaggtccccccaccccagcagtgctttgcatttcccaactacgtccatcctcccccagaccgctagcacttactttccccacactgcaatccggtaccccccccacctcaaccctcaggacccgcttaaggacctcgtatccctggcatgcgatcctgcctctcagcagcccgggccgccaaccctgcgcccaaccagacctctccagaccgtgcccttgtgggattag

SEQ ID NO: 126798 - DNA, 1500 bp, synthetic construct
  misc_feature 1..1500: note = Description of Artificial Sequence: Synthetic coding sequence
  source 1..1500: mol_type = other DNA
atggacgaatttcaccccttcattgaagcactcctaccgcacgtaagggcctttgcctatacttggtttaacttgcaggcaagaaaacgaaaatatttcaaaaaacatgagaaaaggatgtctaaggacgaggagagagccgtgaaggatgagctccttggcgaaaaacccgaggtcaaacagaagtgggctagtagattgctagcaaagctgcgtaaggacatccgccccgagtgtcgtgaggattttgtattgtcgattactggcaagaaagctcccggatgcgttctttctaaccctgatcagaaaggtaagatgcgccgcattgattgcctccgccaggcggacaaagtgtggcgcctggacctagtgatggtgatcctcttcaaggggatccccctggagagcaccgacggagagagattggttaaagcggcccagtgcgggcatcctgtcctctgcgtgcagccccaccatataggtgtcgcagtcaaggaactggacttataccttgcctactttgttagggagcgagatgctgagcaaagcgggtctcccaggactggcatgggttcggaccaggaagacagcaaaccgattacactcgatacaacagacttccaggaaagctttgtgacctccggggtcttctccgtgacagaactaatccaagtctctcggacgccggtggtcaccggaaccggaccaaacttttcattgggcgagctccagggtcacttggcttatgaccttaatcctgcctccacaggacttcgcaggactttgccgtccacatcttcctcaggtagcaagagacacaagtcggggagcatggaggaagatgtggacaccagcccggggggggattactatacctctccttcttcgcccactagtagctcacgcaactggaccgaggacatggagggcggcattagcagtcctgttaagaagacagagatggacaagtctcccttcaattcgccctccccccaggacagtcctcggctgagctccttcacccagcatcaccgtccagtgattgccgtccactcgggcattgctagatctccccatccttcctctgctttgcacttcccaactacctccattctgcctcagacggcgagcacctactttccccacacagcgattcgctatccaccacacctgaacccccaggatcccctgaaagaccttgtgtcccttgcttgtgatcccgcctcccagcagccaggtcccctgaatgggtcaggccagctcaaaatgccgagtcattgcctatctgcccagatgctggcacctccgcctcccgggctcccaaggctggctcttcctcctgccacaaagcctgccaccacaagcgaaggcggagctacatccccaaccagcccctcctactctccgcccgacactagcccagctaatcgatccttcgttggactcggcccccgggacccagcaggtatttaccaggcacaatcctggtatctagggtag

SEQ ID NO: 126799 - DNA, 1500 bp, synthetic construct
  misc_feature 1..1500: note = Description of Artificial Sequence: Synthetic coding sequence
  source 1..1500: mol_type = other DNA
atggatgagtttcatccattcatagaggcgttgctgccacacgtaagagccttcgcttatacctggtttaacctgcaggcccggaagcggaagtactttaagaaacacgagaagagaatgagcaaagacgaagagagggcagtgaaggacgagctgctgggcgagaaaccagaggtgaagcagaagtgggcatcccgcctgttggctaagctgcgtaaagatatccgcccggaatgtcgagaagactttgttctctctatcacaggaaagaaagctcccggctgcgtactttccaatccagatcagaaaggaaagatgcgtcgaatagattgcctgcgtcaggcagacaaagtgtggagattagatttggtcatggtcattttattcaagggaattccactcgagtcaaccgacggggagcgcttggtcaaggctgcccagtgtggccaccccgtgctctgcgtgcaacctcaccacatcggtgtcgcagtaaaggagctcgacctgtacttggcttactttgttcgcgagcgtgatgcggaacagtcggggtctccaaggaccggaatgggttctgatcaagaggattccaaacctattaccctagatactacagatttccaggagagcttcgtgacaagcggcgtgttcagcgtgactgaactgatccaggtaagcaggaccccagtggttaccggaacaggccctaatttctctttaggtgaattacaggggcacctggcttacgatctaaatccagcctccacgggccttcgccggacactgccaagcacttcatctagcggaagtaaacgacataaatccggcagtatggaggaggacgtggatacaagccccggaggcgattactacaccagcccgtcctcacccacctcttcttccagaaactggacagaagacatggaggggggcatcagttccccggtaaaaaagaccgaaatggataagtctcccttcaattcacctagcccacaggacagtccccgactgtcgtcctttactcagcaccaccggcccgtgattgccgtccactcaggaattgcccgctctccccatcctagctccgcgctgcattttcccaccacctccatacttcctcagaccgctagcacctacttcccacacaccgcgatcagatacccgccacatcttaatccacaggatcctcttaaggatctggtgagcctcgcctgtgacccagcttcccaacagcctggccccctgaatgggtccggccagctgaaaatgccaagccactgtctaagcgctcaaatgctagcacccccacctccaggactgcccagactggccctgcctcctgcgactaagcctgcgacaacatccgagggcggggctacttctcccacctccccatcctactccccacccgacacaagtcctgccaacagatccttcgtgggcctgggaccccgtgatccggctgggatataccaagctcagagttggtatctaggatag

SEQ ID NO: 126800 - DNA, 1212 bp, synthetic construct
  misc_feature 1..1212: note = Description of Artificial Sequence: Synthetic coding sequence
  source 1..1212: mol_type = other DNA
atgggggcaaccgagccgggtggggacacgtcctcagatgagttccatccctttatcgaggcactccttccccacgtgcgcgcctttagctatacctggttcaatcttcaagctcgaaaacgtaagtactttaaaaagcatgagaagcggatgagcaaggacgaggagagggccgtgaaagacgagcttctcggcgagaagcccgaaatcaaacagaagtgggcatccaggcttcttgcgaaacttcggaaagacatacgcccagagttccgtgaagatttcgttctgactataaccggcaaaaaacctccttgttgcgtgctgtccaacccagatcagaaaggaaagataagacggatcgactgtctaaggcaggcagataaagtatggcgcttagatctggtaatggtgattctgttcaagggtatacccctggagagcacagatggggaaagactgtacaagtccccccagtgtagcaaccccggcctttgtgtgcagcctcaccacatcggcgtaacaattaaggaactggacctctatctcgcgtacttcgtgcatacacctgagtcgggacagtcagacagctccaaccagcagggggacgcggacatcaaaccgctgccaaacggccatctatcctttcaggactgttttgtaacaagtggggtgtggaatgtaaccgaactcgttagggttagccaaacccctgttgctacagcaagtgggcctaatttttccttggcggacctggagagcccatcatactataacatcaatcaggtgacactggggaggcgcagcatcacaagtcccccttccacaagcactactaaaagacccaaaagcattgacgattctgagatggaatcgccagttgatgatgttttttacccaggtactggaagaagtcctgcggcagggagttctcagtcaagcggctggcccaacgacgttgatgcaggcagccctagagctaccgccagcgcgctgcacttccctagtacctccataatccagcaaagtagcccatacttcacccatccgacgattaggtaccaccatcatcacggacaggactcccttaaggaattcgtgcagttcgtgtgctctgacgggagcggccaggctaccggacagcactctcagcgccaggctccgcccttacccactggcctgtcagcttctgatcctggaacagccacattctag

SEQ ID NO: 126801 - DNA, 1383 bp, synthetic construct
  misc_feature 1..1383: note = Description of Artificial Sequence: Synthetic coding sequence
  source 1..1383: mol_type = other DNA
atgctccctgcatgtcgccttcaagacgaatttcacccgtttatcgaggccctcctgccccatgtgagagctttttcctacacttggttcaatttgcaggcccggaaacgtaagtatttcaagaaacacgagaaaaggatgtcaaaggacgaggaacgcgccgtcaaggacgaattactcggggagaaaccggaaatcaagcaaaaatgggcaagcaggctgttggccaaattgcgtaaagatatccgtcctgaatttcgcgaagacttcgtgcttaccattacagggaagaagcccccgtgctgcgtgctgtctaacccagaccaaaaaggcaagattcggagaatcgattgtctgagacaggccgataaggtgtggcgcttggatcttgtcatggtgattttatttaagggtatccctcttgaatccaccgacggtgagaggttgtacaagtcaccccagtgttctaatccaggcctgtgcgttcagcctcaccatattggcgtgactattaaagaattagacttatatttggcctatttcgttcatacgcctgaatcagggcagagtgactcctctaatcagcaaggggacgccgatataaagcccctaccgaacggccacctgtcattccaagattgctttgtgacctcaggggtgtggaatgttacggagctggtgagagtgtcccagactcctgtggccacagcaagtggtccaaattttagcctcgccgacctggaaagtcctagctactacaatatcaaccaagtgacacttggcagaaggtcaattaccagtccaccaagcacctcaacaaccaagaggccaaagtcaatcgatgattcagaaatggagtcgccagtcgacgatgtgttttaccccgggactgggagaagccccgcagccggttcttctcagagcagcggctggcctaacgacgtggacgccggctctcctagggccacagctagcgcattgcactttcctagtacgtccataattcagcagtcttccccttattttactcatcctacgattcgctatcaccatcaccatggtcaggattcgctgaaagaatttgtccaattcgtgtgttcagatggcagtggacaggccaccggtcaacccaacggtagtggacaaggcaaggtcccaggctcttttcttttacccccgcctccgcctgtggcgaggccagtgcctctgccaatgcctgacagtaaatcaacaagtacagcccccgatggcgcggcccttacgcctccatcaccttccttcgccaccaccggagccagctccgctaaccgattcgtgtccatcggcccccgcgacggcaactttctgaatatccctcagcagagccagtcatggtttctctag

SEQ ID NO: 126802 - DNA, 1326 bp, synthetic construct
  misc_feature 1..1326: note = Description of Artificial Sequence: Synthetic coding sequence
  source 1..1326: mol_type = other DNA
atgtacagtccctactgccttacgcaagacgagttccatcccttcatcgaagcccttctcccccatgtcagggctttcagctacacatggttcaacctgcaggctaggaagagaaaatattttaagaaacacgaaaagagaatgagcaaggacgaggagcgagccgtcaaggacgaactgctcggcgagaagccagaaattaagcaaaaatgggcttctcgcctcctggcaaaacttcggaaggacattagaccagaattccgggaggactttgtgctgaccatcaccggtaaaaagccaccctgttgcgtcttatctaatcctgatcagaaaggtaaaatccgcagaattgactgcctccgccaggcagacaaggtctggagactggacctggtgatggtgattctgttcaagggaattcccctggagtctacagatggggaacggctgtataaaagcccccagtgcagtaatcccgggctatgtgtgcagccacaccatatcggagtaacgataaaagaactggatctctacttagcgtatttcgtgcatacccctgagagtgggcagtctgactcctctaatcagcagggagatgccgacattaagcccctgccaaatggtcacctgagctttcaagattgcttcgttacctcgggcgtgtggaacgtgacagagctggtgcgggttagccagacccctgttgccactgcctcggggcccaacttctccctcgccgacctggagtccccttcttactataatattaaccaggttacactgggtcggcgtagtatcacgtcacccccttccacgtctaccaccaaaaggccaaagtctattgacgattcagagatggagtctcccgtggacgatgtcttctatcctggcacaggcagatcgcccgccgcgggctcatcccaaagctccggctggcctaatgacgttgacgctggaccagcaagtctgaaaaagtcgggtaagctggacttctgcagcgccctgagctctcagggaagttcacccagaatggcctttacccatcacccattaccagtattggctggcgtgagacccggatctccacgcgccacagcatctgccctgcactttcctagcacttcaatcatccagcagtcatctccctactttactcaccccaccatacggtaccatcatcaccacggccaggacagtctgaaggaattcgtccagttcgtctgctccgacggatcaggacaggctaccggacagcattcccagcgccaggctccccctctgccaaccgggctgagtgcctctgatcctgggacagccacattttag

SEQ ID NO: 126803 - DNA, 1509 bp, synthetic construct
  misc_feature 1..1509: note = Description of Artificial Sequence: Synthetic coding sequence
  source 1..1509: mol_type = other DNA
atgtattctccttattgtctaacccaggatgagtttcacccatttatcgaagccctcttgcctcacgtgcgcgctttttcgtacacctggttcaacctacaagcccggaagcgcaagtacttcaaaaaacatgagaaacgtatgtctaaagatgaggagcgggcggtgaaggatgaactcctcggagagaagcccgagattaagcagaagtgggctagtcggctcctggccaagttgaggaaggacatccgccccgagttcagagaagactttgtgttgacgattactggaaaaaagccaccatgttgcgtactgtcaaaccctgaccagaagggtaaaattagacgcattgattgcctgcggcaggccgacaaggtgtggcgcttggatctcgtgatggtgattcttttcaagggcatccctctggagtctacagatggggagagactatacaagtccccccagtgttcaaatccggggctctgtgtgcagcctcaccacataggcgtcacaatcaaggagctggatctgtacctggcttatttcgtgcacactcccgaatccgggcaatctgactccagtaatcaacagggggatgccgacatcaagccgctgcccaacggccacttgagctttcaggactgttttgtgacatctggagtgtggaatgtgacagagctcgtcagagtgagccaaacccccgtggccactgcatccggcccaaacttttctttggccgaccttgaaagtccgagttattataacatcaatcaggtcacactgggtaggaggtcaattactagtccgccaagcacctccactactaagcggcccaaaagtatcgacgattctgaaatggagagccctgtcgatgatgtgttctatcccggaactgggcggagcccagccgcaggttccagccagagttccggctggccaaacgatgtggatgcaggaccggcctcccttaagaaaagcgggaagctggacttttgctctgcattgtcctctcaggggtcctctccacgtatggctttcacccaccaccctctccctgtactcgctggcgtgcggccaggctcaccacgtgctactgcaagcgccctgcacttcccctccacatcaataattcagcagtcatcgccctatttcacccaccctaccatccgttatcaccaccatcacgggcaggactctttgaaagagttcgtgcagttcgtgtgctcagacggctctggccaggctaccggacagccaaatggctctgggcaggggaaagtaccagggagcttcctgctcccacctcctccgccagtggctaggccagtgcctctgccaatgccggacagtaagagtacctcaaccgcccctgatggcgctgccctgactccaccttcaccgtccttcgctactaccggcgctagcagtgccaacagattcgtgagtattggtccccgagatggtaacttcctcaacatcccccagcagtcccagagttggttcctgtag

SEQ ID NO: 126804 - DNA, 633 bp, synthetic construct
  misc_feature 1..633: note = Description of Artificial Sequence: Synthetic coding sequence
  source 1..633: mol_type = other DNA
atgtccaaggacgaggaacgcgctgtaaaggatgagcttctgggcgagaagccagagatcaaacaaaaatgggctagccggctgctggctaagctaagaaaagacatcagaccggaattcagagaggacttcgttctgactatcactggtaagaaacccccgtgctgtgtgttaagcaacccagaccaaaagggcaagatccggagaatcgattgcttgcggcaggccgacaaggtctggcgcttggacttagtcatggtgatcctcttcaagggtatcccattagaatcaaccgacggggaaaggctttataaaagcccacagtgctcaaacccaggcctgtgcgtccaacctcatcacatcggagtgacaatcaaggaactggatttatacctggcctactttgttcacacccctgagagcggtcaatccgactcttctaaccagcagggtgacgccgacattaaacccctaccgaacggacacttatcattccaagactgcttcgtgacttcaggcgtgtggaatgtgacagaactggtctaccacagacttctgttacaacaacatcaaggccccactagcccctggaggacttggagagtgccagccaccacgaccagtaccagatag

SEQ ID NO: 126805 - DNA, 1071 bp, synthetic construct
  misc_feature 1..1071: note = Description of Artificial Sequence: Synthetic coding sequence
  source 1..1071: mol_type = other DNA
atggcaggtgtagcctgtctcggaaaggccgcagacgcagatgaatggtgcgactcaggactgggttcccttggcccagacgccgcagcccccggcggccctggtctcggggccgagctcgggcctggcttgtcttgggcgcccctggtattcgggtatgtgactgaggacggcgatactgccctgcacctggctgtaatccaccagcatgaacctttcctcgactttctccttggtttcagtgccggcaccgagtacatggacctgcagaatgatctgggtcagaccgcactgcatttggcggcgatattaggggaaacctccacggtcgagaagttgtacgcggccggggctggcttgtgcgtggcagaacggcgcggacacacagccctgcaccttgcatgtagagtgggcgcccatgcgtgtgcccgggccctgctgcagccacgtcctaggcggccccgggaagctcctgacacctatctggctcagggcccagacaggacgcctgatacaaaccacacgccagtcgctctataccccgactctgacctggaaaaggaagaggaagaatccgaggaagactggaagctgcagctggaagccgaaaattatgagggccacacccctcttcacgttgccgtcatccacaaggatgtcgagatggttaggctgttgagagatgccggcgctgacctggacaaacccgagcctacctgcgggcggtcaccgctacatctcgcagtggaggcccaggccgccgatgtgcttgagcttctcctccgtgctggtgccaatccagcggctcgaatgtacggggggagaacaccactcgggagtgccatgctccgccctaatccaattcttgcccgattgcttcgcgcacatggggctcccgagcccgagggagaagatgaaaaatccgggccgtgcagtagctcctccgattctgacagtggtgacgaaggcgacgagtacgacgatatcgtcgtgcattcctcacgctcacagacccggctgccccctacgccggcttccaaaccacttcccgatgaccctagacctgtttag

SEQ ID NO: 126806 - DNA, 921 bp, synthetic construct
  misc_feature 1..921: note = Description of Artificial Sequence: Synthetic coding sequence
  source 1..921: mol_type = other DNA
atgaatggagccaccgccgcctgggccccttgggttcgcacacagcgaccacccgaggacttaggctgggcccgctcgtgggctcgcggatgccggggcctcccgtcttccagtgccacgtcactgcgtatgggcacacggttctctgcaggaactgagtacatggaccttcagaacgatctaggccaaaccgcactacatctcgctgctatcttgggggaaacgtcgactgtggagaagttgtacgcagcaggggccggtctgtgcgtagctgagcgaaggggtcacacggcacttcacctagcctgccgcgtcggcgcacatgcctgcgctagggcactcctgcagcccagaccccggcgcccaagggaagcccccgatacatacctcgcgcaaggccccgatcgtacacccgatacaaaccataccccggtagctttgtatccggatagcgacctcgagaaggaagaggaggagtcagaagaagattggaagctgcagttggaggccgagaactacgagggccacactcctttgcatgtcgcagtgattcataaggacgttgagatggtgcggcttctgcgtgacgctggggccgacttagataaacccgaaccaacctgtggccgctcacctctgcacctcgctgtggaagcgcaggccgctgatgtgctagagctcctcctgcgagctggcgcaaatccagctgcgcggatgtacggtggacgcacgccactgggcagcgccatgttgcgccctaacccaattctggcccgtctcctgcgggcccacggagcccccgaacccgagggcgaagacgagaagagtggaccatgctcttcaagctccgatagcgacagcggcgacgagggtgtgagccaggaagagcggcaggggagtcccgctggcggctcggggtag

SEQ ID NO: 126807 - DNA, 1086 bp, synthetic construct
  misc_feature 1..1086: note = Description of Artificial Sequence: Synthetic coding sequence
  source 1..1086: mol_type = other DNA
ctgcagaatagccgccagtccccagcgaccggcgggcgattgaggggtgccccagaagccgccggcgccatggcaggcgtagcttgtctcggaaaagccgccgatgctgacgagtggtgtgattccggactagggagtctaggccctgacgctgccgcgccagggggcccgggcttaggcgcagaacttgggcccgggctcagttgggctccgttggtctttgggtacgtaacagaggatggcgatacagcacttcatcttgccgtgattcatcagcacgagccgttccttgacttcctgcttggtttttccgcgggtacagagtatatggatcttcagaatgacctcggccagactgccctgcacctggctgccattctcggggagaccagcacagtggagaaattgtacgcagccggagccggtctgtgcgttgccgagagacgtgggcataccgctttgcacttagcctgccgggtaggagcacatgcatgtgccagagccctgctacagcccagaccacgaagaccgcgggaggcccctgatacctacttggcacaggggcctgatcggacccccgacaccaaccatacccccgtcgcactgtaccccgattctgatctcgagaaggaagaggaagagagcgaagaggactggaaactgcaacttgaggctgagaattacgagggtcacacccccctacacgtagcagtcatccataaggatgtggaaatggtgcggctgttgcgtgatgccggggccgacctggataagcctgaacccacgtgcggccgatctccactgcacctggctgtagaggctcaggctgccgatgtcctggagctattgctgcgggcaggggctaatcctgctgcccgaatgtatggtggtaggacaccgctcggctcagccatgctgcgaccaaatccgattctcgcacggctactccgggctcacggtgcacctgagcctgagggggaggatgagaaaagcgggccgtgtagtagttccagcgattctgactccggcgacgagggcgtgagccaagaggagagacagggcagccccgctggcgggtccgggtag

SEQ ID NO: 126808 - DNA, 1791 bp, synthetic construct
  misc_feature 1..1791: note = Description of Artificial Sequence: Synthetic coding sequence
  source 1..1791: mol_type = other DNA
atgatagttgacaagttgctggatgactccagaggtggcgaaggacttagggatgctgccggtggatgtgggctgatgacttccccactgaatctgagttacttctatggagcttcacctcccgcagctgccccgggcgcctgtgacgcctcctgcagcgttctgggccctagtgcccccggtagccctgggtctgatagctctgatttctcttctgctagcagcgtttcctcctgtggcgcagtcgagtccagaagcagggggggcgcacgcgcggagcgccagcccgtggaacctcacatgggcgttgggcggcagcaaaggggtcccttccagggagttcgggtcaaaaatagtgtgaaggagctcctgcttcacataaggagccacaagcagaaagcttcaggccaggctgtagacgacttcaagacccaaggcgtgaacattgagcaattcagagagctgaaaaatactgtctcttatagtgggaagagaaagggccccgattctctgtctgacgggccagcgtgcaagagacccgcactccttcattcgcagttccttaccccaccccagactcctacacctggcgagagtatggaggatgtacacctcaatgaaccgaagcaggagtcctcagccgacttgttacagaatatcatcaacattaagaacgagtgttcacctgtctcgctcaacacagtgcagacatctagttccgttcagcagcaaaacgatgctcatctgcacagctttagtatgatgccgtcttcagcttgtgaagcaatggtcggacatgagatggcatcagactcctctaatacaagcctccctttctcgaatatgggtaatccgatgaatacaactcagctggggaagtccttgtttcagtggcaggtggagcaagaagaatcgaagcttgccaatatcagccaggaccaatttctctctaaggatgcggatggtgacacatttctgcatattgccgtagctcagggtcgccgtgctctctcttacgtgctggcccgcaagatgaacgctttacatatgttggacataaaggaacataacgggcagtcagcctttcaggtcgcagtggctgccaaccaacaccttatagtccaagatcttgtcaacatcggggcacaggtcaatacgactgattgttggggccggacaccattacacgtgtgtgcagagaaaggccattcgcaagtcctgcaggccattcagaagggggccgtgggcagtaaccagtttgtcgacctggaggccaccaattacgatggattaacacccctgcactgtgccgttatcgcacacaacgctgttgtacatgagctgcagcgcaatcagcagccccattctcccgaggtgcaggagctcctcctgaaaaataaatctctagtcgatactatcaagtgtctcatccagatgggcgcagcagtggaggctaaagataggaaatctggcaggaccgccttgcacttggcagctgaggaagctaacctggagctaataaggctttttctcgagctcccttcttgtctctcttttgtgaacgccaaagcctataatgggaacacggctttacacgtcgccgcatccctgcaatatcggctaactcaacttgatgcagtgagactgctgatgagaaagggcgcagatccttcgaccagaaacttggagaatgagcagcctgttcatctcgtacccgacggccctgttggagagcagatccggcggatcctgaaaggtaagagcattcagcagagagcgcctccctactag

SEQ ID NO: 126809 - DNA, 2157 bp, synthetic construct
  misc_feature 1..2157: note = Description of Artificial Sequence: Synthetic coding sequence
  source 1..2157: mol_type = other DNA
atgatcgtggataaattactcgatgacagtcgcgggggagaagggctgcgtgatgccgccgggggatgcgggctgatgacttctccccttaacctgtcttacttctatggcgcctccccccctgccgcagccccaggagcttgtgacgcgtcctgctccgtcctcggaccctcagctcccggctcccctggctctgatagctctgacttttcctccgcatcctctgtcagtagttgcggtgcagtggagagcagatccagggggggggccagagccgaacgccaacctgtggagccccatatgggggtgggcaggcagcagcgaggcccatttcagggagtgcgagtcaaaaatagcgttaaggaactgcttctacacatacgcagtcataagcaaaaagccagtggacaagctgttgacgacttcaaaacacagggcgtaaacattgagcagttcagagaactgaagaatacagtgagttatagcggcaaaaggaagggacctgactctctctctgatggccctgcttgcaagagaccagccttgttacacagtcaattcctgacccccccacagacacctacccccggcgagagtatggaggatgttcacttaaatgagcccaaacaagagagctccgctgatctgttgcaaaacatcatcaatatcaagaatgaatgtagtccagtgagcctgaacaccgtgcaggtgagctggctgaatcctgtggtggttccacagtctagccctgcggaacagtgtcaggacttccacggaggacaagtgttttctcctccacagaagtgccagcctttccaggtgaggggatcacaacaaatgatcgatcaagcctcattatatcagtattcacctcagaaccagcatgtggagcagcagccccactatacccataagccgaccttggagtattcaccgttccccatccctcctcagagccctgcctacgaaccaaatttgtttgacggccccgagagccagttctgtccaaatcagtccctggtttctctactgggagatcagcgcgagtcagagaatattgcaaacccaatgcaaacgtcttcttctgtccagcaacagaatgatgctcacctccattccttcagtatgatgcccagtagcgcatgtgaagccatggtgggccacgagatggcaagcgattccagcaacacctccctaccgtttagcaatatggggaatccaatgaacacgacgcagctggggaaatctctgttccaatggcaggtagagcaggaggagtctaagctcgccaatatctctcaggaccaatttctgtccaaggacgccgatggagatactttcctccacattgccgtggcccaaggaagaagagccttaagctatgtgttggccagaaaaatgaacgccttacatatgctggacataaaagagcacaatgggcagtctgcatttcaggtggccgttgctgccaaccaacacttgattgtgcaggatctcgtgaatattggcgcacaggtgaataccactgactgctggggaagaactcccctacacgtttgcgccgagaaaggacacagccaagttctgcaagctatccagaagggagcggtaggatctaaccaatttgtggatcttgaggctacaaattacgacggacttacccctttacattgcgccgtgattgctcacaatgccgtagtgcacgagctgcagcgcaatcaacagccccattcacctgaggtacaggaactgcttttaaaaaataagagcctcgttgacaccataaagtgcctcatccagatgggggccgccgtagaagccaaggacagaaagagcggaaggaccgctttgcaccttgctgccgaggaggcaaatttagagctcatcaggctttttctcgaacttccttcctgtctgagtttcgtcaatgccaaggcttataatggcaataccgccttgcacgtcgctgcatcactccagtatcgcctgacacaacttgacgcagtcaggctcctcatgcggaagggcgctgaccctagcacgcgaaaccttgaaaatgagcagcccgttcaccttgtgcccgatgggccagttggagagcagatcaggaggattctgaagggaaaatctatccagcagagagcgcctccatattag

SEQ ID NO: 126810 - DNA, 1857 bp, synthetic construct
  misc_feature 1..1857: note = Description of Artificial Sequence: Synthetic coding sequence
  source 1..1857: mol_type = other DNA
atgggtgttggccgacagcagagagggccttttcagggggtgcgcgtgaaaaactccgtgaaggagttgctcctccacatacgaagtcacaaacagaaagcctccgggcaggccgttgacgattttaagacacagggagtgaacatcgaacagttcagagagttgaaaaatacagtgtcctacagcggtaaacgcaagggacctgactccctgtccgatggacctgcgtgtaaaagacccgctctgttgcactcccagtttctcacccctccccagacacctacacctggggagtctatggaagatgtccatcttaacgaacctaaacaggaaagtagtgccgacttactccaaaatataatcaacatcaagaatgagtgcagcccagtgagcctcaatactgtccaggtgtcgtggttgaatccagttgttgtgcctcaatctagccccgccgagcagtgccaggattttcatggcggccaggtgttctcaccaccccagaaatgtcagccattccaagtgcgggggagccaacagatgatcgaccaagcctcgctataccagtacagtcctcagaaccagcacgtggagcagcagccacattatactcacaaaccaaccctggagtattcacccttcccaatccctccccagtctcctgcgtacgagcccaatctgtttgatgggcctgaatcacagttctgtcccaatcaatccctggtttccctcctgggggatcagcgcgagtcagaaaatatcgccaatccgatgcagacaagctcatccgtccagcagcaaaatgatgcccacctgcacagtttctctatgatgccgagtagtgcgtgcgaggccatggtcggacacgaaatggcttcggacagctcgaacacttccctgccatttagcaacatgggaaacccaatgaacaccacccaattgggaaagagtctctttcagtggcaagtggagcaggaggaaagcaagctggcaaacattagccaggatcagttcctcagcaaagacgccgacggcgacacattcctccacatcgcggtggcgcaaggaagacgagctttaagctacgtcctggctcgcaagatgaacgcgctccacatgctggacatcaaggagcataacgggcagtcagcctttcaagtcgcggtcgccgcaaatcagcaccttatcgtgcaggacttggtcaacatcggcgcccaagtgaacacgactgattgttggggtagaacccccctgcacgtgtgtgccgaaaagggacattctcaggtcctgcaggcaatacagaagggggccgtcggctccaatcagttcgtagacctggaagccaccaattatgatggcttaacacctctgcactgtgcggtgattgctcacaacgccgtggtgcatgagctacaaaggaatcaacagcctcacagccctgaagtgcaggagctgctgctaaaaaacaaatcactcgttgacactataaaatgtctgatccagatgggggcagccgtcgaagctaaggaccgcaaatcaggacggactgccttgcacctggcggccgaggaggccaacctggagttaatcagactgtttctggagctccccagctgcctcagtttcgtgaatgctaaggcctataacggaaataccgcccttcatgtggctgccagtctgcagtataggctcacacaattagacgccgttcggctcctcatgaggaagggcgcggacccttctactagaaacctcgagaacgagcaaccagttcatctggttcctgatggacccgtgggagagcagattcgacggatcctcaaaggcaagagcatccagcagagagctcctccatactag

SEQ ID NO: 126811 - DNA, 333 bp, synthetic construct
  misc_feature 1..333: note = Description of Artificial Sequence: Synthetic coding sequence
  source 1..333: mol_type = other DNA
atgatcgtcgataagctgctcgatgatagcagaggcggagaaggtctcagggacgcagccggagggtgcggtctgatgacctctccactgaatctgagctacttctacggggcaagcccgcccgcagccgcccccggtgcctgtgatgctagctgttccgtcttaggaccaagcgctccaggatcaccaggaagtgatagttctgattttagttctgctagcagtgtctcttcatgcggggctgtcgaatcccggagccgtggcggggcccgggccgagcgacagcccgttgaaccacacatgggcgttggacgtcagcagcggggcccttag

SEQ ID NO: 126812 - DNA, 1806 bp, synthetic construct
  misc_feature 1..1806: note = Description of Artificial Sequence: Synthetic coding sequence
  source 1..1806: mol_type = other DNA
atgggggtgggtcgccagcaacgaggcccatttcaaggagttagagtgaaaaactctgtgaaagaattacttctgcacattcgcagccataagcagaaggcctctggacaggccgttgatgacttcaagacacagggggtgaacatcgaacagtttcgggagttgaaaaacactgtgagctacagtgggaaaaggaaaggtcctgattcgctgtctgatggcccagcgtgcaaacgacctgccttactgcattcccagttcttgaccccaccacagacaccaactcccggtgagagcatggaggatgtgcacctcaatgaacctaaacaagaaagtagtgccgacctccttcagaacatcataaatattaaaaatgagtgcagccctgtcagtctcaacaccgtgcaggtctcctggctgaatcctgttgttgttccgcagtcaagcccagcagaacagtgccaagattttcatggagggcaggtcttcagccccccacagaaatgtcaaccgttccaggtccgtggttctcaacagatgattgaccaggcttccctgtaccaatattcgccccaaaaccagcatgtggagcagcagccccactatacacataaacctactctggagtacagcccgtttcccatacctcctcagtctcctgcctacgagcccaatctctttgacggcccagagtcccagttctgccccaaccagtcgctcgtatccctgctgggggaccaacgggagtccgaaaatattgccaacccaatgcaaacctccagtagcgtacagcagcagaatgacgctcatttgcattcattctcaatgatgccaagtagcgcatgcgaagcaatggtcgggcacgagatggcctctgactcatctaatacaagcctccccttctctaacatgggaaacccgatgaacacaactcaacttgggaaaagtctgttccagtggcaggtcgagcaggaagagtctaaactcgccaacatcagccaggatcagtttttaagcaaagatgcagacggcgataccttcttgcatatcgctgtagcccagggacggagggccttgagttatgtgttagcaagaaagatgaacgcactccacatgttggatatcaaagaacataacggtcagagcgctttccaagtcgccgtggcagcaaaccaacatctgatcgtgcaagacctagttaatataggggctcaagtgaatacaaccgactgctgggggcgaacacccctgcacgtatgcgcagagaagggacacagtcaggtcctgcaggctattcagaaaggtgcggttggcagcaatcagttcgtagacctggaggcaacgaattacgatgggctgactcccctccactgcgcagtaatcgcccacaatgcagtcgtgcacgagctgcagagaaaccaacagccccattcccccgaagttcaggagttacttctgaagaacaaatcactcgtggataccatcaaatgtctgatacagatgggagcagccgtggaggctaaggaccggaagagtgggaggaccgccttgcacctggccgcggaggaagctaatctggagctcattagactcttcctcgagctcccgtcttgtttgtcatttgtgaatgcaaaggcctacaacggaaacaccgcactgcacgtggcagcaagtttgcaataccgcctgactcagttagacgcagtgagactgcttatgagaaaaggtgcagacccttcaaccaggaatctcgaaaacgagcagccggtgcatttggtgccagacgggcctgtgggagagcaatag

SEQ ID NO: 126813 - DNA, 393 bp, synthetic construct
  misc_feature 1..393: note = Description of Artificial Sequence: Synthetic coding sequence
  source 1..393: mol_type = other DNA
atgggcgtaggccgtcagcagcgcggcccatttcagggagtgagggttaaaaattccgtcaaggagctcctgttgcacatccgttcacacaagcagaaggcttccggccaagctgtcgacgacttcaaaacccaaggggtgaacattgagcagtttcgggagttaaagaataccgtgtcctattcaggaaagaggaagggaccggattccctgagtgacggcccagcctgcaagagacccgcccttcttcatagtcaattcctgacaccaccccagacacccacccctggcgagagcatggaagatgtgcacctgaatgaaccaaaacaggagagttctgctgatttacttcagaatatcatcaacatcaagaatgaatgttcacctgtgtag

SEQ ID NO: 126814 - DNA, 1101 bp, synthetic construct
  misc_feature 1..1101: note = Description of Artificial Sequence: Synthetic coding sequence
  source 1..1101: mol_type = other DNA
atgtctaacccaagcccacaggtgcccgaagaagaagcatctacctccgtgtgccggcctaaatccagtatggcttctaccagtaggcgtcagaggcgcgaaaggaggttccgacgataccttagtgcaggtcgacttgttcgtgcacaagcgcttttgcagagacaccccggactggacgtcgacgctggccagcccccccctctgcaccgcgcttgcgcccggcatgacgcacctgctctgtgtctcctgctacgattgggcgccgatcccgcgcaccaagatcggcacggggataccgcactgcacgccgctgctagacagggacccgacgcttatacagacttctttctgccacttctttcccggtgtccctccgcaatggggattaagaacaaggacggtgagacgccagggcagattttgggctgggggcccccgtgggactcagccgaggaggaagaagaagatgatgcttccaaggagagagaatggcgccaaaaattacagggggatgcctcccacgagacacaggagccagaaagtttctcggcctggtcggatcggctagcaagagagcatgctcagaaatgtcaacaacaacaaagagaggccgaggggtctaggcgccctccaagggcggagggaagttctcagagctggcggcagcaggaggaggaacagcggctgttccgcgagcgcgctcgtgcgaaagaagaggagctcagggagtcccgggcacgccgagcccaggaagctctaggggaccgcgagccgaaacccacacgcgccggcccgcgcgaggagcacccccggggtgcaggtcggggctccctctggcggtttggcgatgttccctggccatgccccgggggaggtgacccagaagcaatggccgccgccttagtggctagaggaccacctctcgaagagcagggtgccctcaggcgctacctacgcgttcaacaagttcggtggcacccagatagattcttgcaacgctttagatctcaaatcgaaacttgggagctcggccgcgtcatgggtgctgttaccgccctgtctcaggctctcaacaggcatgccgaggctttaaaatag

SEQ ID NO: 126815 - DNA, 1077 bp, synthetic construct
  misc_feature 1..1077: note = Description of Artificial Sequence: Synthetic coding sequence
  source 1..1077: mol_type = other DNA
atggctagcacctcccggaggcagcggcgagaacggcgatttcgaagataccttagcgccggccgcttggttcgtgctcaggcccttctacagcggcatcctggcctggatgtggatgccggccagccaccacccctgcacagggcgtgtgccaggcacgatgcccctgccctttgcctgcttttgcgcctcggggccgatcctgcccatcaggatcgacatggagatactgcacttcatgccgctgcaagacagggtcctgacgcgtacacggatttttttttgcccctgctctccagatgcccgagtgctatgggaatcaagaataaggatggcgaaacgcctggacagattctcggatggggaccaccatgggactctgcagaggaagaggaagaggatgacgcctctaaagaaagagagtggagacagaaacttcagggagaattggaagacgagtggcaggaggttatgggccgcttcgaaggagacgcctctcacgagacccaggagcctgagtctttctctgcatggtccgaccgtcttgctcgggagcatgcacagaagtgccagcagcaacagagggaagccgaggggagccgcagacctccgcgtgcagagggaagctcacagtcatggcgccagcaggaggaggagcagcggctgttcagagagcgagccagggctaaggaagaagaactacgagagagcagagccaggcgcgcccaagaggccctgggagatagagaacctaagccgacccgtgcaggaccacgcgaggaacaccccaggggggccggccgaggaagcctatggagatttggtgatgtcccatggccatgccctgggggcggcgaccccgaggcaatggctgcagccttggtggcgagggggccccctctcgaagaacaaggtgccctgcgcaggtatctgcgagtccagcaggtgcgctggcaccctgaccgctttctccagagatttcgcagccagatcgaaacttgggagctaggacgcgttatgggtgccgtcactgccctgagccaggctcttaacaggcacgccgaggctctaaaatag

SEQ ID NO: 126816 - DNA, 1146 bp, synthetic construct
  misc_feature 1..1146: note = Description of Artificial Sequence: Synthetic coding sequence
  source 1..1146: mol_type = other DNA
atgtctaaccctagtccccaggtgcctgaggaagaggcctcgacctcggtgtgccgccccaagtccagcatggcatccacgtccaggagacagaggagagagcgcagatttagaagatacctctctgcaggtaggctggttcgcgcgcaggccttgctgcaaagacaccctgggctagacgtcgacgccgggcagccccccccacttcacagggcctgcgctcggcacgacgctccagcactctgtcttttgttgcgactgggggccgacccggcccaccaagataggcatggggataccgcgctacacgcagctgctcggcagggacctgacgcctacaccgacttttttctcccactcctttctaggtgccctagcgccatggggatcaagaacaaggatggagagaccccaggccagatcctggggtggggcccaccatgggattcagctgaggaagaagaggaggatgatgcatcgaaagaacgggaatggcggcagaagttacagggtgaattggaggatgaatggcaggaagtaatgggacgattcgagggagatgcttctcatgagacgcaagagccagagagcttttcagcatggagtgaccgactggcacgagaacacgctcaaaagtgtcagcagcagcagagggaggccgaggggtcgcgcaggccacctagagcagaaggttcctcgcagtcttggagacagcaggaggaggaacagcgtctgtttcgggaacgcgccagagctaaggaagaggaactgagagaatcacgagcacgcagggcgcaggaggccttgggcgacagggaacctaaacctactagggcaggcccaagagaggagcatcctcgaggagccggacgaggatcactgtggcgattcggggatgtcccctggccttgccccggtggcggcgatcctgaggcgatggcggcagcccttgttgcacgggggccaccgttagaggagcaaggagctctgaggcggtatcttagggtacaacaagttaggtggcaccctgatcgctttcttcaacgcttccgatcccagatcgagacatgggagttgggtcgcgtaatgggtgccgtgaccgcattatcacaagctctgaaccgtcatgctgaggcactgaagtag

SEQ ID NO: 126817 - DNA, 1101 bp, synthetic construct
  misc_feature 1..1101: note = Description of Artificial Sequence: Synthetic coding sequence
  source 1..1101: mol_type = other DNA
atgtccaacccgtcaccccaggttccagaagaggaggcatcaacatctgtgtgccgccccaagtcatctatggcctcaacctcaagaaggcaaaggcgtgagcggagatttcggcgctaccttagcgccggacgcctggtgcgggcccaagcattactccagcgccaccccggactcgatgttgacgcaggccagcctccccctctccacagggcttgcgctcggcacgatgccccggcactgtgtcttttacttcgcctgggcgctgacccggcccatcaggaccggcacggagacactgcacttcacgccgcagcacgacagggtccggacgcatacactgatttcttcctgcctttactgagcagatgtccttctgcaatgggaatcaaaaataaagacggcgagacaccggggcaaattttgggatggggtcccccatgggactctgctgaggaggaggaggaggacgacgcttctaaagagcgcgagtggcgacaaaaattgcaaggggacgcttctcatgaaactcaggagccagagagctttagcgcttggagtgacaggctggcacgtgagcatgctcaaaagtgccagcagcagcagcgtgaggctgaggggagctgccggccacctagagctgagggctcgagtcagtcttggaggcaacaggaggaggagcagcgcttatttcgagaacgggcccgggccaaagaggaagaacttagagagtctagagcccggagggcccaggaggccctcggcgatcgggaaccaaagcctacaagggccgggccccgcgaagaacaccctaggggtgccggccgggggtcactgtggcgttttggtgacgtgccttggccctgcccagggggcggtgacccagaagctatggcagcagcactggtggcacgcggccccccactggaggagcagggcgcactgcgcaggtacctcagagtccagcaagtgcggtggcaccccgatagattcctacagcggtttagatcccagatagagacctgggaacttgggcgcgtgatgggggcagtcacggccttgagtcaggccctcaaccgacatgccgaagctctcaaatag

SEQ ID NO: 126818 - DNA, 1077 bp, synthetic construct
  misc_feature 1..1077: note = Description of Artificial Sequence: Synthetic coding sequence
  source 1..1077: mol_type = other DNA
atggcgtccacttcccgcaggcaaaggagggaacggcgattccggaggtacctgagtgccggcaggctggtgagagcacaggccctattacagcgccatcccgggttggacgtcgacgctggtcagccacctccactacaccgggcttgcgcaaggcacgacgcacctgcactgtgtctgctgctgagattaggggccgatcccgctcatcaggaccgccatggggataccgccctgcatgcagccgcccgccaaggccccgacgcatataccgacttctttttgcccctgctgtcacggtgtccaagtgccatgggaatcaaaaataaagacggcgaaacaccagggcaaatactcgggtggggtccaccctgggacagtgccgaggaggaggaagaagacgacgccagtaaggagcgcgagtggcgccagaagttgcagggcgaactggaggacgagtggcaggaggtaatgggacggtttgaaggggacgcttcacacgaaacacaggagcccgagtcctttagcgcttggtcagacaggcttgcgcgcgagcacgctcagaagtgccagcagcagcagcgggaagccgagggcagctgtcgtcctcctcgggctgaagggagtagccagtcttggaggcaacaggaggaggagcaaagattatttcgcgagagagcccgcgcaaaggaggaagagcttagggaaagcagggcccggagggctcaggaggctctgggcgatagagaacccaaacctacgcgagctggtcctagagaagagcatccccgcggcgcaggtaggggaagcctatggaggtttggagacgttccatggccctgcccaggtggaggcgaccctgaagctatggctgctgccttagtggcacgtggcccacctctggaggagcaaggcgccctcagaaggtatctacgggtgcagcaagtgagatggcaccccgaccggttcttgcagcgcttcagatctcagattgaaacttgggagctaggtagggtcatgggagcagttaccgccctttcccaggccctgaataggcatgctgaagccctaaaatag

SEQ ID NO: 126819 - DNA, 1146 bp, synthetic construct
  misc_feature 1..1146: note = Description of Artificial Sequence: Synthetic coding sequence
  source 1..1146: mol_type = other DNA
atgagcaaccccagtccccaggtgccagaggaggaggcttctacatcagtgtgtaggcctaagagttcgatggcttcgacgtccagacgccagaggagagagcgacggtttcgcagatatttatctgcaggccggttggtgagggctcaggccttgctacagcgtcacccaggtctggacgttgacgctggccagcccccccctctgcaccgggcatgtgctcgccacgacgcgccagccctgtgtctgctactgcgactgggcgcggaccccgcacaccaggacagacacggggacaccgccctgcacgcagccgcacgacagggcccagatgcctataccgatttctttctccctctcctgtcccggtgcccctccgcgatgggaatcaagaacaaagacggagaaacccccggccaaatacttggatgggggcctccatgggactctgctgaggaagaggaggaagacgatgcctctaaagagagggagtggcgccagaagctccagggtgagctggaggatgagtggcaggaagttatgggacgattcgaaggggatgcatcacacgaaacccaggaacctgaaagcttctccgcatggagcgacagactcgccagggagcacgcacagaagtgtcaacaacaacagcgtgaagcggaagggtcttgtcgaccacctcgggcggaaggaagtagccagagttggcgtcagcaggaagaggaacagaggttgtttcgggagcgcgcccgggccaaagaagaggaattgcgcgagagcagagctagaagggcccaggaggcgctcggcgacagggagccgaagcccacgagagccgggcccagggaggagcatcctcgcggtgctgggagagggtcgctctggcgatttggagatgtgccatggccctgtccgggtggaggcgatcctgaagcgatggctgctgcattagtggcacggggtcccccgctcgaagaacaaggcgcattgcgccggtatctgagggtgcagcaggttcgttggcacccagatcgttttcttcaacgattccgtagccagattgagacctgggaactgggccgagtgatgggagcggtgacagccctgagccaggcgttgaaccgccacgctgaggctctcaaatag

SEQ ID NO: 126820 - DNA, 1101 bp, synthetic construct
  misc_feature 1..1101: note = Description of Artificial Sequence: Synthetic coding sequence
  source 1..1101: mol_type = other DNA
atgagcaatccgtcccctcaggtcccagaggaggaggcatctacaagcgtgtgcaggccgaagagttccatggcctcgacctcacgcaggcagcgccgcgagaggcggttcagaaggtacctctctgcagggcgattggtcagagcccaggccctcttgcagcgccaccccggcctggatgtagacgccggccagcctccccctctccatcgggcatgtgcaagacatgacgccccagctttatgcctactcctcagattaggagccgatccggcacatcaagacagacatggtgacaccgccctccatgcagctgcccgacagggacccgatgcgtacactgactttttcctccccttgctcagtaggtgcccatccgccatgggcattaagaacaaggacggagaaacacctggccagatcctgggatgggggcctccttgggatagcgcagaggaggaagaagaggacgatgcatctaaggagcgggagtggaggcaaaagctccaaggcgacgccagccatgagacacaggagcccgagtctttttccgcgtggagcgatcgtctagcccgcgagcatgcccagaagtgccagcagcagcaacgggaagcggagggaagttgcagaccccccagagctgagggctctagccagtcatggagacagcaggaagaggaacagcgattgtttcgtgaaagggccagggccaaagaagaagaactgcgcgaaagtagagctaggcgcgctcaagaggccctgggcgaccgagaacctaaaccgacaagggcggggccaagagaggaacacccacgtggagccggcaggggcagcctatggcggttcggagacgtgccatggccctgcccagggggcggggatccggaggccatggcagctgcccttgttgccaggggtcctcctttagaggaacagggcgctctgagacgctaccttcgggttcagcaggttagatggcatccagaccggtttctccaaagatttagatcccagatagagacctgggagttaggtagggtcatgggcgcagtgacagcgctgagtcaggccctgaatcgccacgccgaagcccttaagtag

SEQ ID NO: 126821 - DNA, 1146 bp, synthetic construct
  misc_feature 1..1146: note = Description of Artificial Sequence: Synthetic coding sequence
  source 1..1146: mol_type = other DNA
atgtctaaccccagcccacaggtaccggaggaggaagcctcgacctccgtgtgccgacccaaaagcagcatggcatcaacaagccgacgccagcgtagagaacgcagattccggagatacttaagcgcaggaaggctggtgcgcgcccaagcattgttgcagcgtcacccgggtctagatgttgacgccggacagcctcctccgctgcaccgggcctgcgccagacatgacgcccccgcgctgtgcttattactgcgcctaggtgccgaccctgcacatcaggacagacatggcgataccgcccttcatgcagcggcccgacaagggcctgacgcatacacggattttttcctaccgctattgagccgctgcccaagcgctatgggaatcaagaacaaggatggggagaccccgggccagatactgggctggggtcccccctgggatagtgctgaggaggaggaagaggacgacgcttccaaggaaagggaatggcggcaaaagctgcaaggcgaactcgaagacgagtggcaggaggtaatggggaggttcgaaggcgatgcctcacacgagactcaagagcctgagtccttttccgcttggagtgatcggcttgccagagaacatgctcagaaatgccaacaacaacagcgcgaagccgagggatcttgtaggccccctcgggccgagggctcctcacagtcatggcgtcagcaggaggaggagcagagactgttccgagagcgcgccagggccaaagaggaggaactgagggaatcccgggcaaggcgcgcacaggaagctctcggcgaccgggagccaaaacctacgagagccggtcctcgtgaagagcatcctcgaggcgctgggcgcggctcactctggaggtttggagacgtgccttggccctgcccaggcggaggggacccagaggccatggctgccgcattagtcgctaggggtcccccactagaggaacagggcgctctgcggcgttatctccgagtccagcaggttcgctggcaccccgaccgctttctgcagcgatttcgctctcagatagaaacttgggagcttggtagagttatgggagccgtaaccgcactctcgcaggcactgaatagacacgccgaggcactgaagtag

SEQ ID NO: 126822 - DNA, 1101 bp, synthetic construct
  misc_feature 1..1101: note = Description of Artificial Sequence: Synthetic coding sequence
  source 1..1101: mol_type = other DNA
atgtctaaccctagtccacaggtacccgaagaggaggccagcacctcggtgtgtaggcctaagtcctccatggcatccacgagccggcggcagagacgggaacggagattccggaggtatctcagtgccgggagactggttcgggcgcaagcccttctgcagagacatcccggtctcgatgtagatgccggtcagccccctccgctccatcgcgcttgcgcacgccatgacgccccagccctgtgcctgctgctgcgcctcggtgctgacccagcacatcaggacagacacggagataccgcccttcacgccgccgcccgccagggtccagatgcctacacagactttttcttgccattgttaagccgctgccctagcgctatgggaattaaaaacaaagatggcgaaactcccggccagatcctcggatggggacctccatgggatagcgccgaggaagaggaagaggacgacgctagcaaagagcgcgaatggcggcagaagctgcagggtgacgccagccatgagacacaggagccagaatcctttagtgcttggagtgacaggttggctagggagcacgcacagaagtgtcagcagcaacagagggaggccgaggggtcttgccgccctccacgtgccgaaggaagctctcaatcttggaggcagcaggaagaggagcagaggctgttccgggaacgagctcgcgctaaagaggaggaactgcgggagagccgggcccgccgagcgcaagaggccctcggcgacagggaacccaaacccaccagggctggcccccgcgaagagcaccctcgaggggccgggagagggagtttgtggcgatttggagacgtcccatggccctgtcccggtgggggggacccggaggcaatggctgccgctttggtggctagagggcctcctctggaggaacaaggggctctaagaagatatctgagggtgcagcaggtcaggtggcaccctgaccgcttcctgcaaagatttcgaagtcaaattgagacctgggaattggggagggtgatgggagccgtaacagccttatctcaggcactcaatagacacgctgaggcactgaaatag

SEQ ID NO: 126823 - DNA, 1101 bp, synthetic construct
  misc_feature 1..1101: note = Description of Artificial Sequence: Synthetic coding sequence
  source 1..1101: mol_type = other DNA
atgtcaaatcctagtccacaggtgcctgaagaagaagcgagcaccagcgtgtgtagacctaagagctcaatggctagcaccagccgccggcagaggcgggaacgacgctttcggcggtacctaagcgcaggacgcctggtgcgtgcccaggccttgttgcagcggcatcccgggcttgacgtcgatgcggggcaaccacctccacttcatcgtgcttgcgccagacatgatgctccggcactgtgtctgctcctgagattaggcgctgatcctgcgcaccaggacagacacggagacacagcactgcatgctgccgcacgacagggtcccgacgcctataccgacttcttccttccactgctgtcccgctgtccctccgctatgggaatcaagaataaggacggggagacacctgggcagatacttggctggggcccaccctgggatagcgccgaagaggaagaagaagacgacgcatctaaagaacgcgaatggcggcaaaaactgcagggagacgcctctcatgaaacacaggaacctgagagtttctctgcttggagcgacagactagctagggaacatgcacaaaaatgccagcaacaacaacgagaagccgaaggaagctgtcggccccctcgagcagagggcagcagccagagttggaggcagcaggaggaggagcagcggctctttagggagagggctcgggcaaaggaggaggagttacgcgagagccgtgcgcgaagggctcaggaggccttaggggatcgagagccaaaaccaacgcgcgccgggcccagagaggagcacccacgcggggccggtagggggtccttatggcgcttcggtgacgtgccctggccatgccccggcggtggcgaccctgaggcgatggccgccgccctcgtggcccgcgggcccccattggaagagcagggcgcgctgaggcgctacctaagggtgcagcaagtgagatggcacccagaccggtttttacagagattccgaagtcagatagaaacctgggagctgggcagggtgatgggcgcagtgactgcactgagccaggcccttaaccggcatgccgaagccctgaaatag

SEQ ID NO: 126824 - DNA, 1146 bp, synthetic construct
  misc_feature 1..1146: note = Description of Artificial Sequence: Synthetic coding sequence
  source 1..1146: mol_type = other DNA
atgtctaatccaagtccacaggtgccggaagaggaggcaagtacatcggtgtgtcgacccaaaagttccatggctagcaccagtaggcggcagcggcgcgagcggagatttaggcggtacttgtccgctgggcggctggtccgggcacaggccctgctgcagcgccatccaggtctagacgttgacgccgggcaacctccaccactccatcgcgcatgtgcccggcatgacgctccggccctttgtcttttgctcaggttaggggcggatcctgcacaccaggacaggcatggagacacagccctgcatgcagccgcccggcagggacccgacgcctatactgacttcttcctacctctcttgagtcgctgcccttcagctatgggaattaagaacaaggatggagagactcctggccagattctgggctggggaccaccatgggattccgccgaggaggaagaggaggacgacgcctcaaaggagagagagtggcgtcagaaactccaaggcgagcttgaggacgaatggcaggaggtgatgggtagattcgagggggacgcaagccacgagactcaagaacccgaatctttcagcgcctggagcgacaggcttgccagggaacacgcacagaaatgtcagcaacaacagagggaggccgagggtagctgccgaccgccgcgggcggaagggagctcccagagttggcgccagcaagaggaggagcagcgtctgttcagggaacgagcacgggctaaggaagaagagctgcgggaaagtagagcaagaagagctcaagaggctctgggagatcgggaacccaagcccactcgtgccgggcctagggaggaacaccccagaggcgccggaagaggcagcttgtggcgcttcggtgacgttccttggccgtgtcctggaggcggagacccggaagccatggctgcagctctcgtggctcgcgggccacccttagaggagcagggagccctgagacgatatctgagagtacagcaggtccgctggcatcccgaccgatttctgcagaggttcaggagtcagatcgagacttgggaactagggcgggtgatgggtgcagtaacagccctgtctcaagctctgaatcgccatgcggaagccctcaaatag

SEQ ID NO: 126825 - DNA, 1077 bp, synthetic construct
  misc_feature 1..1077: note = Description of Artificial Sequence: Synthetic coding sequence
  source 1..1077: mol_type = other DNA
atggcttctacgagtagaagacagcggcgggaacggagattcaggagatacctatccgccgggcgcttagtcagggctcaggcgctgttacagcgccacccgggtttagatgtcgacgcgggccagcctcctcccttgcaccgggcatgtgcacggcacgatgctccagcgctgtgcctgctattgcgcctgggtgcagaccccgcgcatcaggataggcatggagacactgccttgcatgcagcagccagacaaggccccgacgcttacacagactttttcctccccctgctctctagatgccccagcgctatgggcataaaaaacaaagacggcgagactcctgggcagatcctaggatggggtccaccctgggacagcgccgaggaggaggaggaagatgatgcttctaaggaacgcgagtggcgccagaagttgcagggagaactcgaggatgaatggcaggaggtgatgggacgctttgagggagacgccagccacgaaacacaggagcctgaatctttttccgcatggtcagacagacttgcaagagagcacgcacagaagtgtcagcagcagcagcgagaggctgagggatcctgcagacctccacgggccgaaggcagtagtcagagttggcgccagcaggaagaagagcagaggctcttccgggaaagagcaagagccaaggaggaagaattacgagagagcagggcgaggcgggcacaggaagcgttgggcgacagggaaccaaagcctacccgggcgggacccagggaggagcatcccaggggcgccggccgcggcagtctgtggcgtttcggagacgttccatggccatgtcccggggggggcgaccctgaggctatggctgccgccttggtagcccgcggacctccgctcgaggagcagggtgcccttagaaggtacctgcgagtacagcaagtgcggtggcacccagacaggtttcttcagcggttccgctcccagatcgaaacgtgggaactcgggagagttatgggtgcagtcaccgcgttatctcaggccctgaacagacatgccgaggccctgaagtag

SEQ ID NO: 126826 - DNA, 1101 bp, synthetic construct
  misc_feature 1..1101: note = Description of Artificial Sequence: Synthetic coding sequence
  source 1..1101: mol_type = other DNA
atgtctaatcctagccctcaggttccggaagaagaagcctcaacttccgtttgccggccaaaatcttctatggcttctactagtaggcggcagcgcagggagaggaggttcaggcggtatctgtctgccgggagacttgtgagagcccaagctcttctgcagaggcatccgggcctggatgtcgacgcaggacagcctcccccattgcacagagcctgcgcacgccacgatgcccctgctctctgtcttctgctccggctcggagcagacccggctcaccaagatcggcacggtgataccgcactgcacgcagcagcaagacagggaccggatgcctacacagatttcttcctccccctattgagtcgctgtcctagcgccatgggtattaagaataaggatggcgagaccccgggccagatcctggggtggggacccccttgggactcagccgaggaggaggaagaggacgacgccagcaaagagagagagtggagacagaagctacaaggcgacgcgagtcatgagactcaggagcccgagtcattttctgcctggagcgacagactcgcgcgagagcatgcccagaagtgccagcaacaacaaagagaggccgaaggctcatgtaggcctccccgcgccgagggaagcagtcagagttggcgccaacaagaggaggaacagagactgttccgagaacgcgcacgagccaaagaagaggagctgcgggagtcccgggcccgcagggcccaggaagccctgggcgatagagagccaaagccaactcgggcggggccccgcgaggagcatccgcgaggggcaggaagaggcagcctatggcggtttggtgacgtgccgtggccttgccccggggggggcgaccctgaggccatggccgctgcattagtggctcgtggacccccgcttgaggaacagggcgcacttcgcaggtatttaagggtgcaacaggtgaggtggcacccagacagatttctgcagagatttaggagtcagattgagacttgggaactcgggcgggtgatgggtgctgtcacggcgctatctcaggcgctcaaccgacatgcagaggcactgaaatag

SEQ ID NO: 126827 - DNA, 1077 bp, synthetic construct
  misc_feature 1..1077: note = Description of Artificial Sequence: Synthetic coding sequence
  source 1..1077: mol_type = other DNA
atggcaagcacatctcgccgccagaggcgtgaaaggcgattccgccggtatctgagcgccgggcgcctcgtccgcgcccaggctctccttcagcgccacccggggctggacgtggacgcagggcagccgcctccattgcatcgtgcctgcgcgcgccatgacgcccccgcactgtgtctgttgctcagactgggggctgatccagctcatcaagatcgccatggagacacagctctgcacgcagctgcaagacagggacctgacgcttacacagacttttttctgccactgctgagtagatgtccgagcgccatgggcatcaagaacaaggacggggagactcctggacaaattcttggatggggaccgccgtgggattcagcggaggaagaggaagaggacgacgcatctaaggaacgggagtggcgtcaaaaactgcagggggagctggaagatgagtggcaggaagtgatgggacgctttgaaggggatgcttctcacgaaactcaggagcccgagtcatttagcgcgtggtccgatcgtctcgctcgcgagcacgcccaaaaatgtcagcagcaacaacgtgaggccgagggctcctgtagacccccgagggctgaaggttcctctcaatcttggcgtcagcaagaagaggaacaaaggctttttagagagagggcccgggcaaaagaagaagagctccgcgaaagtagggcacgaagagcccaggaggccctcggcgaccgcgaacccaagcccacccgggctggccccagggaggagcatcctcgcggcgcaggaaggggctcactgtggcggtttggcgatgtcccctggccttgtcccggcggtggcgatccagaggcaatggctgctgcactggtggcccggggacccccgctcgaagagcaaggcgctctacgccggtacctgcgagtccagcaggttaggtggcatcctgacaggtttcttcagcggtttaggagccagatcgaaacttgggagttgggaagagtcatgggagctgtgacagcgctttcacaggccctgaatcggcacgccgaagctcttaagtag

SEQ ID NO: 126828 - DNA, 1146 bp, synthetic construct
  misc_feature 1..1146: note = Description of Artificial Sequence: Synthetic coding sequence
  source 1..1146: mol_type = other DNA
atgagcaacccaagcccccaggtgcctgaggaggaggcatccacgagcgtctgtagacctaagagctcaatggcttccacttcaaggcgccaaagacgtgagagacggttccgccgctacctgtcagcagggcggctggtgagggctcaggctcttctgcaacggcacccggggttggatgttgatgcaggccaaccaccgccattacaccgagcgtgcgccaggcatgatgctcccgctttatgtttactcctgagactcggagccgatccggcacatcaggacaggcacggagataccgctctgcacgctgcagctagacagggcccggatgcttacaccgatttttttcttcctctgctgagcaggtgtccctcagctatgggcattaagaacaaggacggagaaactcccggccagatactcgggtggggaccaccctgggactcggcagaagaggaggaggaggatgatgcgagtaaagagcgcgagtggcgccagaaactgcaaggggaactggaggacgagtggcaggaagttatgggtaggtttgaaggtgatgcaagtcacgagacgcaggaacccgagtcattttccgcttggagcgatcgtctggctcgcgagcacgcacagaagtgccagcagcagcagagagaagctgagggaagctgtcggcccccccgagctgaaggatcatcccagtcctggagacaacaggaggaagaacagcgcttgtttcgggaacgagcccgggccaaggaagaagaactgcgggagtcccgtgcaaggcgggcacaggaagctctcggggatcgcgagcccaagccaacccgcgcagggccgcgggaagagcatccgcgaggtgcaggcagaggctcattatggcgcttcggagacgtgccctggccttgcccaggaggcggcgaccctgaggcaatggctgcggctctggtggcccgaggtcctcctctggaggagcagggagccctccgcagatacttgcgggtccagcaggtgcgttggcacccagaccggtttctgcaacggttccgaagccagatcgagacatgggaactaggtcgagtgatgggtgcggtgactgctctgtcccaagccttaaaccgccacgcagaagctcttaagtag

SEQ ID NO: 126829 - DNA, 1077 bp, synthetic construct
  misc_feature 1..1077: note = Description of Artificial Sequence: Synthetic coding sequence
  source 1..1077: mol_type = other DNA
atggcaagcacctcgagacgtcagaggcgagagagacgtttccggcggtatctaagtgccggcagacttgtgcgcgcccaggccctgctccagcgccatcctggtttagacgttgacgccggccaacctccgcctttgcacagggcatgcgctcgccacgacgctcctgccctgtgcttgctgttgaggctgggggcggatcccgcccatcaggatcgacatggcgataccgccctccatgctgctgcacgccagggtccagatgcctacaccgatttcttccttccactactaagccggtgccctagtgccatggggattaagaacaaggatggggagacccctggccagatcctgggatggggaccgccctgggattccgcagaagaggaagaggaggacgatgccagcaaggagagagagtggagacagaagctccagggcgaactggaagatgaatggcaggaggtcatgggccgctttgagggagacgcctctcatgagacccaggagcccgaaagctttagtgcatggagcgataggctcgctcgcgaacacgcccagaaatgccagcagcaacaacgggaggctgaaggctcgtgccgcccgcctagagccgagggctcctcacaatcctggagacagcaagaagaggagcagcgcttgttccgtgaacgcgcccgggctaaggaggaagaacttcgtgaaagccgcgctaggcgagcccaggaggccctcggggacagagagccaaagcccacccgtgcagggcctagggaggagcatccaagaggtgctggaagagggtcactttggcggttcggcgatgtgccatggccgtgtcctgggggaggggatcctgaagcaatggctgccgcgctggtggccagggggcctccactggaggagcaaggagcattgaggagatacttgcgggtgcagcaagtccgctggcatcccgatcgttttctacagagattccggtcccaaatcgagacatgggagctcgggcgggtgatgggcgctgttactgctttgagccaagccctcaatcggcatgccgaggctttgaaatag

SEQ ID NO: 126830 - DNA, 1146 bp, synthetic construct
  misc_feature 1..1146: note = Description of Artificial Sequence: Synthetic coding sequence
  source 1..1146: mol_type = other DNA
atgtccaacccgtccccgcaggtgcctgaggaggaggcaagcacctccgtatgtcggccaaagtcctctatggcctcaacttctagaagacagaggagagagagacgcttcaggcggtatctgtctgccggaagactcgtgcgcgcacaggcattgctgcagcgacaccctgggctggacgtggatgcaggccagccaccccccttgcaccgagcttgcgcacggcatgatgcccccgctctgtgtttacttttgcgcctcggagccgaccccgcccaccaggaccgacacggtgatacagcacttcatgcagctgcgaggcagggccccgatgcgtatactgatttcttccttcctcttctgagccgctgcccctctgccatggggattaagaacaaggatggcgagacgccaggccagatcctgggatggggacccccttgggactctgccgaagaagaggaggaagatgatgcctcaaaggagcgagaatggcggcagaagctccagggggagctggaagatgagtggcaggaggtgatgggcagatttgagggcgatgctagccatgagactcaggagcccgagtcttttagcgcctggtctgaccggttggccagggaacatgcccaaaaatgccagcagcaacagcgagaggccgaaggatcttgtcgcccgccacgggcggaaggctcctcacaatcttggcggcagcaggaggaagaacaaagactctttcgtgagagggccagagccaaggaggaagagctgagagagtcacgggcccgccgagcccaggaagcactgggggaccgtgagccaaagccaactagagctgggccgcgcgaagagcaccccagaggtgctggccgaggaagtctgtggagattcggcgatgttccctggccctgccctgggggtggcgaccccgaggcaatggccgccgctctcgtggcgcggggaccccccctggaagaacaaggcgcccttagacgttatctgagagttcagcaggtccgctggcaccctgacaggtttttgcagaggtttaggtcacaaatagaaacatgggagttagggcgggtcatgggtgccgtcaccgccctgagccaggcactcaaccgccatgccgaggcgctgaagtag

SEQ ID NO: 126831 - DNA, 1101 bp, synthetic construct
  misc_feature 1..1101: note = Description of Artificial Sequence: Synthetic coding sequence
  source 1..1101: mol_type = other DNA
atgagcaacccgtctccacaagtgcctgaggaagaagcaagcacatcagtatgtcgtcctaaatcatccatggccagcacttccaggagacagagacgcgaaaggcgctttcggaggtatctcagtgctgggagacttgtgagggctcaggccttgttacagcgccacccagggcttgacgtagacgccggacaacctcccccgctgcaccgcgcttgtgctcgacacgatgcccccgctttgtgcctattgcttcggctgggtgccgatccagcccaccaggatcgccatggcgacacagctctacatgcggctgcgcgccagggaccagacgcatacacagactttttcctcccgcttctgtctcgctgcccctctgccatgggaattaagaacaaggatggtgagactcctggccagatacttggctgggggccaccttgggattcagcagaagaggaagaggaagacgacgccagcaaagagcgtgagtggcgccagaagctgcagggcgacgcaagtcatgagacgcaggagccagagtccttcagtgcttggtctgacagactggctagagaacacgcgcagaagtgccagcagcaacagcgcgaggccgaaggaagctgccgcccccctcgcgccgaaggctcgagtcagtcgtggcgtcagcaggaggaagaacagcgtctgttcagggagagggcgagagccaaagaggaagagctcagggaaagccgcgcacggcgcgcccaggaggcactcggagatagggagcccaaaccaacacgtgcaggacctcgcgaagagcatcccaggggcgctgggaggggcagcctttggagatttggcgatgttccctggccttgccccggaggcggcgatcccgaggccatggcagccgctctggtcgccagagggccccccctcgaggaacagggagcactgagacggtacctgcgggtccagcaagtgcgctggcatccagatcgcttcttgcagcgttttagatcgcagatcgagacttgggaactgggaagggtgatgggcgcagttactgccctctcacaagccttgaacaggcacgccgaggcactgaaatag

SEQ ID NO: 126832 - DNA, 1077 bp, synthetic construct
  misc_feature 1..1077: note = Description of Artificial Sequence: Synthetic coding sequence
  source 1..1077: mol_type = other DNA
atggcttcaacctcacgccggcaacggcgggagcgtcgtttccgtcgatacctatcagcgggtcggcttgtccgggcccaggctcttttgcagcggcacccgggcctggacgtcgacgctggccagccccctccccttcatagagcatgtgcacgccatgatgcccccgccctgtgcctgctgttaagactgggagcagacccagcacaccaggaccggcacggggataccgcccttcacgctgccgcccggcaagggccagacgcctacactgacttttttttacccctcctgtctcggtgcccctcggctatgggaattaagaacaaggatggcgagaccccgggccagattctgggctggggtcccccatgggactccgccgaagaagaggaagaagacgacgcatccaaggagagagagtggcggcagaagcttcaaggagaactcgaagacgaatggcaagaggtgatgggcagattcgaaggcgacgcatcccacgaaacccaggagcctgagtcgtttagtgcgtggagcgacagactggcccgagaacacgcccagaaatgtcaacagcagcagcgggaggcagagggttcctgtagaccaccacgagctgaggggagcagccaatcctggcggcaacaagaagaagagcagagactcttcagagaacgagcccgggcgaaagaggaggagttgagggaaagtcgcgctcgaagggcccaggaagctctgggagatagggaacctaagccaacccgagctggacctagggaagagcatcccagaggggcaggtaggggatccctgtggagatttggcgatgtcccttggccttgcccaggaggaggcgatcccgaagccatggcagcagctctcgtagcccgaggacctccattggaggaacagggagcactgcggagatatttgagagtccagcaagtgcgatggcatcccgataggttcctgcagcgctttaggtcccagattgagacttgggaactggggagagttatgggtgctgtgacggccctcagccaggcactgaatcggcacgcagaggccctcaagtag

SEQ ID NO: 126833 - DNA, 1146 bp, synthetic construct
  misc_feature 1..1146: note = Description of Artificial Sequence: Synthetic coding sequence
  source 1..1146: mol_type = other DNA
atgagcaatccatctcctcaagtccctgaggaggaagcaagcacctccgtgtgccgacctaaatccagcatggcgtcgacttccaggagacagaggagagagcgtcgattcaggaggtacctgtccgccggcagactggtgcgggcacaggccctcctgcagcgacatcccggcctggatgtcgatgcaggccagcctcctcctctacaccgagcatgtgcacggcatgacgcacctgccctgtgcctgctactgcgactgggagctgatccggcgcaccaggatcgccacggggatacggctcttcatgccgcagctcgtcaggggccagatgcatacactgacttcttcttgcccctcctgagccgatgtccatccgctatgggcataaagaacaaagacggagagacccctggacagattctgggatggggtcctccttgggactctgcggaggaggaggaggaagacgatgcctcaaaggagcgcgagtggcggcagaaacttcagggggagttggaggacgaatggcaggaagtcatgggacgcttcgagggggacgcttcacacgagacacaggagcccgagtctttttcagcttggtctgaccgcctggccagggagcacgcacaaaagtgccaacagcagcaacgtgaggccgaagggagctgtaggcccccccgggctgaagggagttcacagagctggagacagcaggaagaggagcagcgtttgttccgagaacgtgcacgcgcaaaggaagaagagctcagggagtcacgggcaagaagagcacaggaggcactgggtgatcgcgagccaaaacctacaagggccggccctcgggaagaacacccgcgtggcgctggtagaggcagtctgtggagatttggcgacgtgccttggccatgtccaggaggtggggacccagaagctatggctgccgccctggtggcaagagggccacccctggaggagcaaggcgctctgagaagatatctacgggttcagcaggtcaggtggcatcccgataggtttctgcagcgtttccgatcccaaattgagacttgggagttgggccgggttatgggcgccgttactgcactatcccaggcccttaaccgccatgccgaagccctgaagtag

SEQ ID NO: 126834 - DNA, 1077 bp, synthetic construct
  misc_feature 1..1077: note = Description of Artificial Sequence: Synthetic coding sequence
  source 1..1077: mol_type = other DNA
atggctagcacttcccgtagacaacggcgcgaacgccggttcagaagataccttagcgccggaaggcttgtgcgtgcccaggcacttctgcagcggcatccaggcttagatgtggatgcggggcagccaccacctctccatcgcgcatgtgccagacacgacgccccagccctttgcctcctgctgcgcttaggcgccgacccagcacaccaggaccgccacggcgacacagcactgcacgcagctgctagacagggcccagatgcttatactgatttcttcctgcctctgctttccaggtgcccgtccgcaatgggtatcaaaaacaaagatggcgagacacctggacagattctgggctggggacctccctgggacagcgccgaggaggaagaagaagatgacgcctccaaggaaagggaatggaggcaaaaactgcagggagaattggaagacgagtggcaggaggtgatgggaaggttcgagggcgacgcgtctcatgaaacccaggagccagaatcgtttagcgcatggtccgaccggctggcccgtgaacacgctcagaagtgccagcagcaacagcgtgaggctgagggatcatgcaggccacctcgcgcagaaggatcatcacagtcttggcgccaacaggaagaagagcagagattatttagagagagggccagagctaaagaagaggagcttagggaatccagagcccggagggcccaagaagcacttggcgacagagagcccaagcctaccagggccgggccacgcgaggaacaccctcggggcgccggacgaggcagcctgtggcgctttggtgacgtgccttggccgtgtcctgggggcggggacccagaagcgatggccgccgcccttgtggctaggggaccaccactggaagaacaaggtgcccttagacgttatttgagagtgcagcaggtgcggtggcatcctgataggttcctgcagagatttagatcccaaatagaaacctgggaacttggaagagtcatgggagcagttactgctcttagccaggccctgaatcggcacgctgaggctctgaaatag

SEQ ID NO: 126835 - DNA, 699 bp, synthetic construct
  misc_feature 1..699: note = Description of Artificial Sequence: Synthetic coding sequence
  source 1..699: mol_type = other DNA
atggcgtctacttctcggcgccagaggcgggagcgccgttttagacgatacctttcagccggaagactggtacgagctcaagctcttcttcagcggcaccccggactggatgtcgacgctgggcaaccacctccgttgcatcgcgcatgcgcccggcatgacgctccagctctgtgcttgctcctcaggctgggtgccgaccctgcccatcaggatcgccatggggataccgccctgcacgcggctgcaaggcagggtcctgacgcctacactgattttttcttacctctgctctccagatgtcccagcgctatgggtataaagaacaaggacggcgagactcccggacagatattgggctggggtcctccttgggattccgccgaggaggaagaggaggacgatgccagtaaagaacgagaatggagacagaaattgcagggtgagctagaggatgagtggcaggaagtgatggggaggtttgagggcgacgcaagccatgagactcaggaacccgagtccttttccgcctggtcggatcggctggcccgggagcatgcccagaaatgtcagcagcaacagcgggaggctgaaggcagcagacggcctccacgcgccgaaggaagttcgcagtcctggcgacagcaggaagaagagcagaggctcttccgggagagagccagagctaaggaggaatag

SEQ ID NO: 126836 - DNA, 699 bp, synthetic construct
  misc_feature 1..699: note = Description of Artificial Sequence: Synthetic coding sequence
  source 1..699: mol_type = other DNA
atggcttctacatcacgcagacaaagaagggagcgcaggttcaggcgctacctgtcagcaggccgacttgtccgcgcccaggctctgctgcagagacaccccggcctggatgtggacgccggacagccgccacccttacaccgcgcttgtgctcggcacgacgcaccagcgctgtgtctgctgctgcgattgggcgctgatcccgcacatcaagacaggcatggcgataccgccctgcatgctgccgcacgccaggggcctgacgcctataccgatttcttcctgccgctgttgtctagatgtcccagcgctatgggtataaagaacaaggatggggagacaccggggcaaatcttaggttggggacccccctgggattcagcggaggaagaagaagaagacgatgcctcaaaggaacgggagtggagacaaaaactccagggtgagctggaggatgagtggcaggaagtgatgggccggtttgaaggtgacgcatctcacgaaactcaggagcccgagtccttttccgcctggagtgatagactggcacgagaacacgctcagaagtgtcagcagcaacagagggaggcagagggatcatgtagaccacctcgggcagagggctcttcccagtcctggagacagcaagaggaggaacaacgacttttcagagagcgagcccgcgccaaagaggaatag

SEQ ID NO: 126837 - DNA, 699 bp, synthetic construct
  misc_feature 1..699: note = Description of Artificial Sequence: Synthetic coding sequence
  source 1..699: mol_type = other DNA
atggcgagcacctccaggcgccagagaagggaacgtagattccgccgctacctttccgcagggcgcctcgtcagagcacaagccctgctgcaacggcacccagggctggacgtcgacgctggccagccaccacctcttcatagagcatgcgctaggcacgacgcccctgccctgtgtctgctgctgagactgggcgctgatcctgcccatcaggatcggcatggcgataccgcgctgcacgctgctgctcggcagggacccgatgcatatactgacttcttccttcctctgctgagccggtgcccgagcgcaatggggatcaagaataaagacggggagactccaggccaaatcctcggatgggggccgccatgggattctgcagaagaggaagaggaggatgatgccagtaaggaacgcgagtggaggcaaaagctgcagggggagcttgaagacgaatggcaggaagtgatgggcagatttgaaggcgatgcaagccatgagactcaggaacctgagtcattctcggcctggtccgacaggctcgcaagagaacacgcccagaagtgccagcagcaacagagggaggccgaaggttcttgccggccacctagggctgagggcagttcccagtcctggcggcagcaggaggaggagcagagacttttcagggagcgagccagagcaaaggaggagtag

SEQ ID NO: 126838 - DNA, 699 bp, synthetic construct
  misc_feature 1..699: note = Description of Artificial Sequence: Synthetic coding sequence
  source 1..699: mol_type = other DNA
atggcatctacgtcgcgacgacagaggagagagcgtcggtttcgtcgttacctctcagccggacgcctcgtccgcgctcaggctctcctgcaacgtcatccgggcctggatgtggacgcggggcagcctcctcctcttcacagagcatgcgcccggcatgatgcccctgctttgtgtctgcttttgaggttgggtgcggatcccgcccatcaggaccgccatggggacacagctcttcacgcggccgccagacagggcccagatgcctatactgatttctttctacccttgctgtctagatgcccatcggcaatgggcattaaaaataaggatggcgagacgcccggccaaatcctagggtggggaccaccttgggacagcgctgaagaggaagaagaggacgatgccagtaaggaacgagaatggcgacagaagctgcaaggcgaactcgaagatgagtggcaggaagtgatgggtcgattcgagggcgatgcctcacacgaaactcaggaacccgaatcattttccgcttggtctgaccgcttagccagggagcatgcccagaaatgccaacagcagcagagggaagccgaaggttcttgtcgaccaccgcgggctgagggatcttcccaatcctggcgccagcaggaggaagaacaaaggctcttcagggaaagagctcgggccaaggaggagtag

SEQ ID NO: 126839 - DNA, 699 bp, synthetic construct
  misc_feature 1..699: note = Description of Artificial Sequence: Synthetic coding sequence
  source 1..699: mol_type = other DNA
atggctagcacatcgagaaggcagaggcgggaacggcggtttagaaggtacctgagcgccgggaggctagttagggcccaagccctgttacagcggcaccccggcttggacgtggacgcaggtcagccgcctcccttgcatcgagcttgcgcacggcatgacgcgcccgccctgtgcctactgctgcggctaggggcagatccagcacaccaagaccgacacggcgataccgcactgcatgctgccgccaggcagggccccgatgcatacaccgacttcttcctgcccctgctaagccggtgcccttcagccatgggcatcaagaacaaggacggagagacacccggccagatcctgggctggggaccgccatgggatagcgccgaggaggaggaagaagatgacgctagcaaggagcgcgaatggcgccagaagcttcaaggggagttagaggacgaatggcaggaggtgatgggcaggttcgagggagacgcttctcacgagacccaagaacctgagtctttttccgcttggtccgatcggttggctcgggaacatgcacagaaatgccagcagcagcagcgtgaggccgaaggaagctgcagaccaccccgtgcggaaggctcttctcagagctggagacagcaggaggaggagcaaagactgtttcgggagcgcgctcgtgccaaggaggagtag

SEQ ID NO: 126840 - DNA, 699 bp, synthetic construct
  misc_feature 1..699: note = Description of Artificial Sequence: Synthetic coding sequence
  source 1..699: mol_type = other DNA
atggcgtcaacctctagacgccaacggagagagcgccggtttcgtcgttatctgagcgcaggccgacttgtgcgagcacaggcgctgctgcaacggcaccctgggctggatgtggatgcaggccagcccccgcctttgcaccgcgcctgtgcacgtcacgacgcgcccgctctgtgcctgttgcttagactcggggcagatccagctcaccaagatcggcacggcgacacagcgcttcatgccgcagcgcgacaagggcccgatgcatatacagacttctttctccccctcctcagcaggtgccccagtgctatgggcattaaaaacaaagacggtgagacgcctggacagatcctcgggtggggacccccttgggacagtgcagaagaggaggaagaggatgacgcaagcaaagaaagagagtggcggcagaagttgcaaggtgagctggaagatgagtggcaggaagtgatgggcagattcgagggagacgcctcgcacgagacccaggaaccggagtcattctccgcctggtctgacaggctggccagagaacatgcccaaaaatgccagcagcagcaacgtgaagcggaagggtcttgcagaccccctcgggctgagggatcctcacagtcatggaggcagcaagaagaggagcagcggttattcagagagagagctagggccaaggaagagtag

SEQ ID NO: 126841 - DNA, 699 bp, synthetic construct
  misc_feature 1..699: note = Description of Artificial Sequence: Synthetic coding sequence
  source 1..699: mol_type = other DNA
atggcatcaactagcaggcgacaaaggcgagagcggcggttccgcagatacctcagcgcgggcagactcgtgcgggcccaagccttactgcagcgacatcccggcctcgacgtggacgcgggccaaccccccccacttcatcgggcttgcgctcgtcacgatgcccctgccttatgtttgctactcagattgggcgccgaccccgcccaccaggatcgccacggggacaccgcactgcatgccgccgcaaggcagggcccagacgcctacactgatttttttctgcccctactatcgcgatgcccgtctgccatggggatcaagaataaggacggggagaccccgggacagatccttggctgggggccaccatgggatagcgccgaggaggaggaggaggacgatgcatctaaggaacgagagtggcggcagaagcttcaaggagaactcgaggacgagtggcaggaggtgatgggccggttcgagggcgatgcctcccacgaaacccaggaacccgagtcattttctgcttggtctgacaggctggctagagaacacgcccaaaagtgtcagcagcagcagcgcgaggcggagggcagctgcaggccaccgagagcagaggggtctagccagagctggcgccaacaggaagaagagcaaagactattccgggaaagggcaagggccaaggaggagtag

SEQ ID NO: 126842 - DNA, 3900 bp, synthetic construct
  misc_feature 1..3900: note = Description of Artificial Sequence: Synthetic coding sequence
  source 1..3900: mol_type = other DNA
atggattctcttgaccacatgttgacagacccattagaactgggcccttgtggagacgggcatggcaccaggattatggaagattgtctactcggcggtactagagtgtccctccccgaagacctgcttgaagaccctgagatctttttcgacgttgtgtcgctctctacctggcaggaggtgcttagcgacagccaaagagagcatctgcaacagttcctcccacaattccctgaggactcagctgaacagcagaatgaactgatcttggccctgttctccggcgaaaacttccgtttcgggaatcccctgcatattgctcagaaactgttcagggatggtcactttaacccggaggtagtgaaatatcggcagctgtgctttaagagccagtacaaaagatacttgaatagccaacaacagtactttcacaggcttctcaaacagatcctggcttcgagatcagatctgctggagatggcccggcggtctggcccggcccttcccttccggcagaagcgcccctcaccatcaagaactccagaggaaagggaatggagaacgcaacagcggtacctcaaggtgctgcgtgaagtgaaggaggaatgtggagacaccgccctctcgtccgacgaggaggatctgtcctcttggctaccttcctctccggcccggtctccctccccggcagtcccgctgagagtcgtgccaacacttagcaccaccgacatgaaaacagcagataaagttgagctgggtgatagcgatctcaaaataatgctgaagaagcaccatgaaaagcggaaacatcagcctgaccacccagacctgctgacaggggacctaaccttgaacgacattatgacccgcgtgaatgctggtcgtaaagggagtctggcagccctgtatgatctggctgtcctgaagaagaaggtaaaagaaaaggaggagaaaaaaaaaaaaaaaattaagaccatcaaaagcgaggccgaagacctcgcggagcccctctcctccaccgaaggagtggcgcccctgtcccaggcaccctcccctctggcgattcccgccattaaagaggaaccactggaggaccttaaaccttgtctcggaataaatgagatctctagtagcttcttttcactcctactcgagatcctgttactggaaagccaagcatctctgcctatgctcgaagaacgcgtattagactggcagagctcccccgccagctctttgaactcatggttcagtgccgcacctaactgggcagagctggtgctgcctgctctacaatacctggcaggagagtcccgtgctgtgcccagctcctttagtccttttgtcgagttcaaggagaaaacccagcagtggaaactgctcggccaatcccaggataacgaaaaggagctggccgctctgttccaactgtggctcgagacgaaggaccaggcgttttgcaagcaggaaaacgaggacagctctgatgcaaccaccccggtccctcgcgtccggacagactacgttgttaggccttctacgggcgaggagaagagagtgtttcaggaacaggagcgctatagatattcacagccccataaggccttcactttcaggatgcacggctttgagagtgtagtgggccccgttaaaggggtttttgataaagaaacctccttgaacaaagcccgtgagcactcactgcttcgctctgatcggcccgcctacgttactattctctctctggtacgtgacgctgccgcacgtttgccgaatggagaggggaccagagccgaaatttgtgagcttctcaaggatagccaattcctggccccggacgtcacctccacacaagtgaatacggttgtgtccggggccctagaccgacttcattatgagaaagacccctgtgttaagtatgacattggaagaaagttatggatctatctccatcgcgaccgctctgaggaggagtttgagaggattcatcaggctcaggcggcagcggcgaaagcccgtaaagcacttcaacagaagccaaaaccaccttctaaggtaaaaagttccagcaaggagtcctccattaaagttttgtccagcggtccttcagagcagagccagatgagtctttccgactcttcgatgccacccacgcctgttacccccgtaacaccaacgacacccgcattacccgcaatcccaatatccccccccccggtgtccgccgtgaacaaaagtggcccaagcacggtatctgaaccagccaaatcttcttccggagtgctgttggttagttcccctaccatgccgcacctcggtactatgttgtccccagcctcaagccagactgcacccagtagccaagcagcggcgagggttgtgtcccattcaggatccgctggcctcagccaggttagagttgttgctcagcctagccttcccgctgttccccagcagagcgggggacccgctcagacactgccgcaaatgcccgccggaccacaaataagggtccctgccaccgccacgcagacaaaagtggtgcctcaaaccgttatggctacagtacctgtgaaggctcaaactaccgcggccacagttcagcggcccggacccggacagacaggattaaccgtcacgtcgcttcccgcaaccgccagtcccgtctccaagccggcaacctcaagcccagggacctcagcaccctctgcatccacggccgccgtaatccagaacgtgacaggacaaaacatcatcaagcaggtggctattaccgggcagctgggggttaagccacagactggcaactccatccccctcactgcgacgaacttccgcatccagggcaaagacgtgctaagactgccaccctcttcgataacaactgacgcaaaaggtcagaccgtgctgcgaatcactcctgacatgatggcaaccctagcaaagagtcaggtgacgaccgttaagctgacgcaggaccttttcggaacgggaggcaataccacaggcaagggcatatctgccaccttacatgtaaccagcaaccccgtgcatgccgccgactcccctgccaaagcatcgagtgcttctgcgccctccagtaccccaactgggaccaccgtcgtcaaagtcacacccgaccttaagcccaccgaagccagttcctctgcgtttcgcttgatgcctgcgttgggggtgtcagtggcagatcagaaaggtaagagcactgtggcctcctcagaagctaaacctgccgctacaattagaatcgtccaggggttgggcgtcatgcctcccaaggctggccagacaattacagttgcaacccatgcgaagcagggtgctagtgtggcttccggttcaggaacggtgcatactagcgccgtctcactgccaagcatgaacgcggcggtaagcaaaaccgtagcagtcgcctcgggggcggcaagcacaccaattagcatatccacgggggccccaacagtgcgccaggtgcctgtgtccaccacagtagtgtctacaagccaggcagggaaacttccaactcgtattaccgtccccctttctgtcattagccagcccatgaaggggaagagcgttgtgactgcccctatcatcaaaggaaacctcggcgccaacttgtcaggcctgggtagaaacatcattctaacaacaatgccggccggtactaaattaatcgcgggcaacaagcccgtgagttttctgaccgcacagcagctccaacagctgcaacaacagggtcaagccacccaggtgaggattcaaacagtgcccgcttctcatctgcagcagggcaccgcctcaggatcttcgaaagccgtgtccacggttgtagtgaccactgcccctagtcctaagcaggcaccggaacaacagtag

SEQ ID NO: 126843 - DNA, 3900 bp, synthetic construct
  misc_feature 1..3900: note = Description of Artificial Sequence: Synthetic coding sequence
  source 1..3900: mol_type = other DNA
atggacagcctcgatcacatgcttacagatcccctggaactcggaccttgtggagacggccacggtaccaggatcatggaagactgtcttctgggggggacgagggtttccctccctgaggacttgctcgaagaccccgaaatcttcttcgatgttgtcagtctgagcacatggcaggaggttttaagcgattcacagagggagcacctgcaacagttcttaccccagtttcccgaagattcagccgagcagcaaaacgaacttatcttggctcttttctctggcgagaattttcgcttcggtaatccactgcacattgctcagaaactgttcagggatggccactttaatcctgaggtcgttaagtatcgtcaattgtgctttaagtcccagtataagcggtacttaaactcccagcaacagtacttccatcgattgctgaagcagatcttagcttccaggtcagacctcttggagatggccaggagaagtggcccagccctgccgttccggcagaagcgtcctagcccttctagaacgcccgaagaaagggagtggcgcacccaacagagataccttaaggtactaagagaagtgaaagaggagtgtggcgatacagctctctctagcgatgaggaggatctgtcttcatggttgcctagtagccccgcacgcagcccaagccctgcagtgcccctgagggttgtccccacactcagcactacggacatgaagactgcagataaggtggagctgggtgactcagatctgaagattatgctcaagaagcaccacgagaagagaaagcaccaacccgaccaccctgacctgctgacgggcgacctgacccttaatgacataatgacccgagttaatgctggccgcaaagggagcctggcagcgctctatgatcttgcggtgttgaaaaagaaggtgaaggagaaagaggagaagaagaaaaagaagatcaaaacaattaagagcgaggccgaggacctagccgagcccctgagctctaccgagggtgtggccccattgtcacaggctccgtctccactcgcgattccagctataaaggaggagccacttgaagaccttaagccttgcctgggcatcaatgaaatttcctcatcattcttcagcctgttgctagaaatcctgctgttagagtcacaggctagtctgccaatgctggaggaacgcgtactggattggcagagttcgccggcgtcatccctaaactcttggttttccgctgcgcctaactgggctgaactcgtcctgcccgctttacagtatttggccggggaaagcagagctgtaccatcatcattctccccattcgtcgagttcaaggaaaagacacaacagtggaagttgctcggacagtcccaggacaatgagaaagagctggctgcactattccaactctggctcgaaacaaaggatcaggcattttgcaagcaagagaacgaggactcatctgacgcaacaactccagtaccccgggtgaggacagactatgttgtgcgtccatccaccggcgaggaaaagcgtgtgtttcaggagcaggagagataccgctactctcagcctcacaaagcctttacgttcagaatgcacggcttcgagagcgttgtagggcccgtgaaaggagtgttcgataaggagacatcattaaataaggccagagaacactccttactacggagcgataggcctgcctatgtcacaattctcagcctggtccgggacgcagccgcccgcttaccaaacggggagggaacgcgggccgaaatatgcgagttgttgaaggattctcagtttctcgctcctgacgtcaccagcacacaggttaacacagttgttagtggagctttggaccgcctgcattatgagaaggatccatgcgttaaatacgacatcggccgaaaactttggatatacctgcaccgtgataggtcagaggaggagtttgagcgaattcaccaagcgcaggccgcagctgccaaggctcggaaagctctgcaacaaaaacccaagcctccatccaaggtgaagagctcatcaaaagagtcttccattaaagtactgagcagcggtccctctgaacagtcccagatgtcactcagcgattcctcaatgcccccaacccccgttacaccagtgactcccaccacacctgcactgcctgctatccctatctctccacctcctgttagtgccgtaaacaaaagcggacctagtacagtgagtgagcctgccaagtctagcagtggcgtgctgctcgtgagctcaccaaccatgcctcacctcggaactatgctgtctcccgcttcctctcagacagctccttctagccaggcggctgccagggtggtgagtcacagtggatctgcgggactgtcccaggtgagggtagtcgcgcaaccctctctgcccgctgtcccccagcagtccggaggccctgctcagacactaccacagatgcccgccggcccccagatcagagtgcccgctacggccacacagacaaaagtcgtcccacagactgtcatggctacggttcccgtcaaagcacagactactgccgcgactgtgcagcgacccggtcctggccagaccggactgacagtcacatctcttccggcaactgcgagtcctgtgtctaagccggccacatcatccccgggaacttcggctccatctgctagtactgctgccgtcatacagaatgtgaccgggcaaaacatcatcaagcaggtggccatcaccgggcagctcggtgtgaagccccagacagggaatagcatccccttgactgcgacaaactttagaatccagggaaaggatgtgttacgtctcccaccaagctccatcaccaccgatgccaaaggccagacagtcctgcgtatcacgcccgacatgatggccaccctggcgaaaagccaagtgacaacagtgaaacttactcaggacttgtttggcaccggtggaaacacaacagggaaagggattagcgccacactgcacgtgacttccaacccggtccatgctgccgactcacccgcaaaggctagcagtgcatccgcccccagcagtacacccaccggtaccaccgtcgtcaaggtcaccccagatctgaagcctaccgaagcgtcatcaagtgcctttcgtttgatgcctgccttgggagtgagcgtggcagaccagaagggaaaatctaccgtggcaagcagcgaggccaaacctgctgccactatcaggatagtccagggcctcggggtgatgccccctaaggctgggcagaccattactgtcgcaacacacgccaagcagggggctagtgttgcttctggtagcggaactgtacatacgagtgcggtgtctctcccctcaatgaacgccgctgtctcgaaaaccgttgccgttgccagcggggcagctagtaccccaatatctatctctacgggggccccaactgtgcgccaggtccctgtaagtactactgtcgtttctaccagtcaagccggtaagctgcctacacggataaccgtcccattgtccgtcatctcccagccgatgaaggggaaatccgtggtgacagctcccatcataaagggcaacctcggcgctaatctgtccggattagggcgcaacatcatcttaacaactatgccagctggaacaaagcttatcgccggaaataagcctgtcagcttcctcacggcacaacagctgcagcagctgcagcagcagggccaggccacccaggtgcggatccagacggtccctgcctcgcacctccagcaggggactgccagcggttcatcaaaagcagtgtctacagtggttgttactaccgcaccaagcccaaagcaagcccccgagcagcagtag

SEQ ID NO: 126844 - DNA, 3900 bp, synthetic construct
  misc_feature 1..3900: note = Description of Artificial Sequence: Synthetic coding sequence
  source 1..3900: mol_type = other DNA
atggattcattggaccacatgctgacagatccactagagctgggaccctgtggggatggacacggcaccaggataatggaagattgcctccttggtgggacccgcgtgtcactgcccgaggatttattagaagatcctgagatctttttcgacgtcgtgagcttgtcaacgtggcaggaggtcttgagcgatagccagcgagagcatctgcagcagttccttcctcagttccccgaggactcagcagaacaacagaatgagctgatcttagcactgttttcgggggaaaacttccggtttggcaatcccttgcacatagcccagaagctctttcgcgatggccattttaatccagaggtggtgaagtacagacagctctgtttcaagagccagtacaagcggtacttaaactctcagcagcagtacttccacagattgctgaagcagatcctggcttcaagatccgacctccttgagatggctcgtaggtcagggcccgccctaccatttcgccagaagcgcccatcaccctcccgcacacccgaggagagagagtggcggacacaacagcggtacctcaaggtgttaagggaggtaaaagaggagtgcggcgacaccgccctctccagcgacgaggaggatctgagttcttggcttcccagctccccagcccgcagcccatcaccggccgtgcctctccgggtcgtacctacactatcaacaaccgatatgaaaacggctgataaagtggagttaggggacagcgatttgaaaattatgctgaagaagcaccatgagaaacggaaacaccaacccgaccatcctgacctgctcaccggagacctgactctgaacgacatcatgacacgcgtaaacgcaggccgcaagggatccctggccgcgttgtatgacttggccgtgctgaagaaaaaggttaaagagaaagaagagaaaaagaagaaaaaaataaagaccattaagtctgaggctgaagacctcgccgaaccactctcaagcactgagggcgtggctcctctgtcccaggccccatctccccttgccattccagccattaaggaggaacctctcgaggacttgaagccatgtctggggatcaacgaaatatctagcagttttttctcactcctgctagaaattctattgctggagtcccaagcatccctgcccatgttggaggaacgggtccttgactggcaaagcagcccagcctctagtcttaactcttggttcagcgccgctccgaactgggctgagcttgtactgccagcattgcagtatctagcaggcgaaagcagagcggtgccttcctcatttagcccattcgttgaatttaaggaaaaaacccaacagtggaagttactgggtcagtctcaggacaatgaaaaagagctggccgccctgttccaactgtggctggagacaaaggaccaggctttctgcaaacaggaaaacgaggatagttccgacgctaccacacccgtgcccagagtccggacagattacgtggtccggccctccaccggcgaggagaagcgggtgttccaggagcaggagaggtatcgctacagtcagcctcacaaggcttttacctttaggatgcatggattcgagagcgtagtcggccctgtgaaaggcgtgttcgacaaggaaacgtccttgaacaaggctcgtgagcactcactgctgcgctctgacagaccagcttatgtaaccatactgagccttgttagggatgccgccgcccgtctgcctaacggagagggaactagagcagaaatctgtgaattgctcaaagacagccaattcctggccccagacgtcacgtctacacaggtgaatacggtcgtcagtggagcattggatcgactgcattatgagaaagacccctgcgtaaaatatgacatcgggaggaagctctggatttatttgcaccgggatcggtctgaagaggaatttgaaaggatacatcaagcgcaggctgcagctgccaaagctagaaaggccctgcagcagaaacctaagcctccatcaaaggtcaagagctccagtaaggaaagcagtatcaaggtcctgagctctggaccctctgagcagtcacagatgtctcttagcgattccagcatgccaccaacgccggttactccagtgactcctacgactcctgcattgccggccatcccaatatccccaccgcccgtgagcgcagtgaacaaaagcgggccaagcactgtgagcgaaccagctaagtcgtcatctggggtgctgctggtatcatcacccaccatgccgcaccttgggactatgctgagccctgccagtagccaaaccgcaccatcttcccaagcggcagccagagttgtgtcccactccggcagcgcaggactgtcacaggtgagagttgtagctcagccctctctcccagcggttccccaacagtctggtggcccagcccagactcttcctcagatgcctgcagggccacaaatcagagtcccagccaccgcaacacagaccaaggtggtcccccaaaccgtcatggccaccgtcccagtgaaagcgcagactaccgccgcgaccgttcagaggcctggacccgggcagactggcctcaccgttacatctctccctgctaccgcttctccagtctccaagccggccacgtctagccctggaacctccgcaccctctgcctccacggccgctgtgatccagaacgttacaggacagaatattattaagcaggtcgccataacaggacagctcggcgttaagccacagacagggaactctatcccactcaccgcgaccaatttccgaattcagggcaaggatgtgctcagactgccaccatctagcatcactacagatgccaaaggtcagactgtcctgcgtataactcccgatatgatggctactctggccaaaagccaggtgactactgttaagctcacccaggacctgtttgggaccggcggaaacacaaccggaaagggcatttcagccacactgcatgttacatccaatcctgtccatgccgccgattcaccagcaaaagcgtcatcagcttccgctccgtcatccactcccaccggcactacagtcgtgaaggtgacaccagacttgaagcctaccgaagcctccagctcggcatttcgcctgatgcctgcgttaggggtttccgttgcggaccagaagggtaaatctaccgtggcttctagtgaagctaagcctgccgcaaccatacgtattgttcagggcctgggagttatgccgccaaaggccggccagacaattactgtggccacccatgcgaagcagggggcgagtgtagcgagtggatccggcactgtgcatacaagtgccgttagcctcccaagcatgaatgccgccgtgtctaagaccgtcgctgtggctagtggagcggcatccactcccataagtatcagcacaggcgccccaacagtcagacaggtcccggtgtcaacgactgtggtgtccacatcccaggcgggcaagttgccaacccgcattaccgtaccactgagcgtgatttcccagccaatgaaaggaaaatctgtcgtgacagccccaattataaaggggaacctgggagctaatttgagtgggttgggcaggaacatcattttgaccacaatgccagcaggaactaagttaatcgcaggaaataaacctgtctcttttctcaccgctcagcagctccaacagctgcagcaacaaggtcaagccacccaggtgagaattcagacggtacccgcaagccacctccagcagggcacagcctcaggatcttcaaaagctgtcagtaccgtggttgttacaacagccccaagcccaaagcaagcgcccgagcagcagtag

SEQ ID NO: 126845 - DNA, 3975 bp, synthetic construct
  misc_feature 1..3975: note = Description of Artificial Sequence: Synthetic coding sequence
  source 1..3975: mol_type = other DNA
atgcacgtcttcgtccagagtacctgcggagaagagaccatggactctcttgaccatatgcttactgatcccctcgaattggggccttgtggagatgggcatgggacccgcatcatggaggactgcctgctcggggggactagggtgagtctaccagaggatctcctggaggatccggaaatcttctttgacgtggtctctctctcgacctggcaggaggttctttcagatagccagcgggaacacctgcagcagtttctgcctcagtttcccgaagacagcgcggagcagcagaacgagctcatcctggcactgttcagcggcgaaaacttcaggttcggcaatccgctccatatcgcacaaaaattgttccgcgacggtcatttcaatcccgaggtagtgaaataccgacagctgtgcttcaagtcccagtataagagatatctgaattctcagcagcaatattttcaccggcttttaaagcaaattttggcaagccgctccgatctgctcgagatggccaggcggtccggtcccgccctgccctttcgccagaaaagaccatcccccagccgcactccggaggaacgggagtggagaactcagcagagataccttaaggtcctccgggaggttaaagaagagtgcggcgacacagctctgtcaagcgacgaggaggccactcttgatctgcaggagcagttcagctttgaggaccttagctcatggctgccgtcttccccagcaagaagtccaagcccagctgtcccactgcgggtggtccccaccttgtcaacaacagatatgaagacagcagacaaagtggaattgggagatagcgacctaaagatcatgttgaagaaacatcatgaaaagagaaaacatcagcctgatcaccccgacttgctaaccggagaccttacactgaatgatattatgacccgggtgaacgccggcaggaaggggtcattagccgcactttatgacctggctgtactgaaaaagaaagtgaaagaaaaggaagagaaaaaaaagaaaaaaataaaaactattaagagcgaagccgaggacctggcagagcccctatcctccacagagggagtggcccctctctcccaggcaccctcccctctagccatccccgctataaaagaggaaccgctggaagatctgaagccctgcctgggcatcaacgaaatttccagttctttttttagcctcttattggaaattctgctgctggagagccaggctagcttgcctatgctggaagaacgagttctggactggcagtcttcccctgcatcaagtcttaacagttggtttagtgctgcacccaactgggcggagctcgttctgcctgccctgcaatacctcgcaggggagagccgtgccgtgcccagcagcttttctccgttcgtggagtttaaggaaaagacccagcagtggaagctcttgggacagtcccaggacaatgaaaaggaactcgcggctctattccagctgtggttggaaacgaaggaccaagctttttgcaagcaggagaatgaagactcttccgatgcgacgacaccagtgccaagggttagaaccgattacgtcgtgcgcccctccaccggtgaggaaaaaagagtgttccaggaacaagaaagataccggtattcccaaccacacaaagccttcacgttcagaatgcatgggtttgaatcagtggtgggaccagtgaagggcgtgttcgataaggaaacctctctcaataaagcccgggagcactccctgctgcgctctgatagacccgcctacgtgaccatcctatctctcgttagagacgcagctgcccgactcccaaacggcgaaggcactagagcggagatatgcgagctgctgaaggatagtcagtttctcgcgccagatgtgacttcgacccaagtcaacacagttgtctctggagccctggaccggctacactatgagaaggatccatgcgtgaagtatgacatcgggcggaaattgtggatctacctgcatagggatcgttccgaggaggagtttgaacgcatccaccaagctcaggcagccgcggctaaggccagaaaagctttacagcagaaacccaaaccaccttccaaagtgaagtcctcctctaaagaatcctctattaaggtactgtcctctggtccaagcgagcagtcacagatgtcactaagtgacagctcgatgccacctactccggtaacacccgtgacccctacaacccccgccctgcctgccattcccattagccctccacccgtgtctgcggtcaacaagtctggtccgagcacagtcagtgaacccgcaaagagctccagtggagttctcctggtgagtagtcctaccatgcctcatctgggtacgatgcttagcccggcctcctcccagactgccccgagttcccaagcagcggccagagtggtgagccactccgggtctgccgggctctctcaagtgcgagttgtcgcacaacccagcctcccggctgtcccacagcagagcggggggccagcccagaccctcccacaaatgcccgcgggcccacaaatcagagtgcctgctactgctacgcagacaaaagtcgtaccacaaacagtcatggctaccgttccagtgaaggcacaaactactgctgctacagtccagcgccctggcccaggccagactggattaacagtgacttcacttccagcaacagcttcaccagtgtcaaaaccggccacatcctctccgggaacttcggcgccttccgcctcaaccgccgcagttattcagaatgtgaccggccagaatatcattaagcaggttgccattaccggccagcttggagttaagccccaaacaggaaatagcatccctttgacggcaacaaactttcgcattcagggtaaagatgtgctgcgactgccaccttcttcgatcaccaccgatgccaaggggcaaacagttctcaggatcacgcccgacatgatggctacgctggcgaagagtcaggtgaccacggtgaagctcacccaggacttgttcggtactggagggaatacgaccgggaaaggaatttccgccaccctgcacgtaacttccaacccagttcacgccgccgactcccctgcgaaagccagttcagctagcgccccgagctcgacaccaaccgggacaacagtcgttaaggtgacgccggatctgaaacctaccgaagcctctagctccgccttccgtcttatgcccgctctgggggtgtccgtcgcagaccagaagggaaaatccactgttgcctcttcggaggctaagcctgccgctacaatcagaattgttcagggcttgggggtaatgcccccaaaagccggccagaccattactgtggccacccacgccaaacagggcgcatcagtagccagcgggtccggcacagttcacacaagtgccgtaagccttcctagcatgaatgcagccgtgtctaagacagtggccgtggcttctggcgcagcttctacacccatctccatcagcaccggcgcaccaactgtccggcaggtaccagtgagtaccactgtggtctctacgtcacaggctgggaagctccccactcgcatcaccgtgcccctatcagtgatcagtcaaccaatgaagggaaaatctgttgtgactgcccccattattaagggtaatctcggggctaatcttagtggcctgggtagaaacatcatcctgacaacaatgcccgctgggactaaactaatcgctggtaacaaaccggtgtctttcctgaccgcccagcaacttcagcagctccagcagcaaggtcaggccacacaggtgagaatacagacagtgccggccagccatctgcagcagggcacagcgtcaggtagttcaaaagcagtgtctaccgtggtagtgacaaccgccccttcccccaagcaggcccctgagcagcagtag

SEQ ID NO: 126846 - DNA, 1389 bp, synthetic construct
  misc_feature 1..1389: note = Description of Artificial Sequence: Synthetic coding sequence
  source 1..1389: mol_type = other DNA
atgcaactgcggaagatgcaaaccgtcaagaaggagcaggccagtctggacgcctcttccaacgtggacaaaatgatggtcctgaacagcgcccttacagaagtgagtgaggactcaaccacaggcgaggagttactcctctccgaaggttcagttggaaaaaataagagttctgcatgccggcggaagagggagttcatacccgacgaaaagaaagacgccatgtactgggagaaaaggcgcaagaataatgaagctgctaaacgtagtcgcgagaagagacgcctaaacgaccttgtgctggagaacaagctgatagctctgggggaggaaaacgccacactgaaggccgagctgctgtcactgaagctgaaatttggtctcataagtagcactgcctacgcccaggagatccaaaaactgagtaactccaccgcagtctattttcaggactatcagacgtccaagagcaacgtcagtagtttcgtagatgagcacgagccatcaatggtatcttccagctgcatttccgtaatcaaacactctccacagagcagcctgtccgacgtgtctgaagtgtcttcggttgagcacacccaggaaagctccgtgcagggctcctgtagaagccccgagaataagttccagattatcaaacaagaacctatggagctcgagtcttacacaagggaaccaagagatgatcgcggatcttacaccgcatcaatatatcagaattatatgggtaacagctttagcgggtattcacattcacctcctctgctgcaggtaaatcgcagctcttccaattcaccaaggacatctgaaactgacgacggcgtagtcggtaagtcttcagacggcgaggatgagcagcaggtgccaaaaggtcctattcacagccctgtggaactaaaacacgtgcacgctacagtagttaaagtccccgaggtcaactctagcgccctgcctcacaaattacgaataaaggccaaggccatgcagattaaagttgaggcgttcgacaatgagtttgaggccacacagaagttgagtagccccatcgatatgacgtctaagcgtcactttgagctggagaagcatagcgcaccttccatggtgcacagttcccttacaccattctctgttcaggttacaaacatccaggattggtcactgaaatctgaacactggcatcagaaggagctaagtgggaagacgcagaattcttttaagacaggggttgtagaaatgaaggactcagggtataaagtttccgatccggagaatctttatctgaagcaggggatagctaatttgtcagcagaggtggtcagcctgaaaagattgatcgccacgcagccaatctctgcttccgacagcgggtag

SEQ ID NO: 126847 - DNA, 1389 bp, synthetic construct
  misc_feature 1..1389: note = Description of Artificial Sequence: Synthetic coding sequence
  source 1..1389: mol_type = other DNA
atgcaactgcgaaaaatgcagactgtgaaaaaggagcaggcctccctcgatgcctcctctaacgttgacaagatgatggtgttgaactccgcactgaccgaggtttccgaagatagcacaaccggagaggagcttctgttgtcagaaggctccgttggcaaaaataagagctccgcttgtagaagaaagcgcgagttcatcccagatgaaaagaaggatgctatgtactgggagaagcgtcgcaagaataatgaggctgctaagcgctctagagagaaaaggagacttaacgatctagtgctcgaaaacaaactcattgccctgggcgaggaaaatgcgaccttgaaggcagagttgcttagtttgaaattgaaatttggcctcatttctagcactgcctacgcacaggagatccagaagctatctaactccacagctgtgtattttcaggactatcagacatccaaatctaacgtcagtagctttgtggatgaacatgagcctagcatggtatcctcctcttgcatctcagtcattaagcacagcccccagtccagcctttccgacgtgtctgaggtctcctcagtggagcacactcaggaatctagcgtgcagggctcatgtagatcacctgaaaacaagttccaaatcattaagcaggaaccaatggaattggaaagttacacgagagaacctcgggatgacagagggagttatacagcctctatatatcaaaactacatgggcaactctttttccggctattcccactcgcccccacttctacaggttaacagaagttcaagtaacagcccacgtacctctgagactgacgatggggtcgtcggtaagagcagcgacggtgaagatgagcagcaagtgcctaaaggaccgatccactccccagtcgagctgaaacacgttcacgcaactgttgtaaaagtccccgaagtgaactccagcgcacttccccacaagctccgtataaaggctaaagctatgcagataaaggttgaagccttcgacaacgaatttgaagctactcagaagctgtcctcccctatcgacatgacatctaagcgacactttgagttagaaaagcatagcgcacctagcatggttcacagttctctgaccccctttagtgttcaagttactaacatacaggattggagcctaaagtcagaacactggcatcagaaagagctgagcggtaagacgcagaatagttttaagactggggttgttgagatgaaagacagcgggtataaggtcagtgaccctgaaaatctgtacttaaaacaagggatcgctaacctgagcgcagaagtggtctccctgaaacgactcatcgcaactcagccaatatctgcctctgatagtggttag

SEQ ID NO: 126848 - DNA, 1488 bp, synthetic construct
  misc_feature 1..1488: note = Description of Artificial Sequence: Synthetic coding sequence
  source 1..1488: mol_type = other DNA
atggctgaacctacttcagactttgaaacccctatcgggtggcatgcttcaccagaactaactcccacactgggccctctgtctgacacagccccaccgcgagacagttggatgttctgggcgatgttgccacccccacctccgccactgacgtcttccctgccggcggctggctcaaagccttcgtctgagtcacagcctcctatggaagctcagtccctgcctggcgcccctcctccctttgatgctcagatccttccgggcgctcagccaccattcgatgctcaatctcctttagactcccagcctcagccttcaggccagccttggaacttccatgcatccacttcttggtactggagacagagctccgatcgattcccgcggcaccagaagtcattcaatcccgctgtgaagaacagctattaccctcggaagtatgacgcgaagttcacagacttcagtcttccaccatctagaaagcaaaagaaaaaaaaacggaaagagccagtatttcatttcttttgtgacacttgtgatagggggttcaagaatcaggaaaagtatgacaagcatatgtccgagcacactaagtgtcctgagctggattgcagcttcactgcacacgagaagattgtgcagttccattggaggaacatgcatgccccagggatgaaaaaaatcaaacttgatacgccagaagagattgcccgctggcgggaagagagaaggaaaaattaccctaccttggcgaatattgaaagaaagaagaaattgaagctagagaaggagaagcgtggcgccgtgctgactacgacccagtatggcaagatgaaagggatgagtagacacagtcaaatggcaaagatcagatcgccaggcaaaaatcacaaatggaaaaacgataacagcaggcagcgagctgtgaccggtagtggatcgcacctctgcgacctcaaattagaagggccgccggaggctaatgccgatccattaggcgtactgataaactctgattcagaatcggacaaagaggagaagccccagcactctgtcataccaaaagaagttactcctgctttgtgctctttgatgtcctcctacggcagtttatctggcagcgaatccgagccggaagaaacgcccatcaagactgaggccgatgtattggcagaaaatcaggtccttgatagcagcgcccctaagtctcctagccaggacgtgaaggctacagtgcggaacttttccgaagccaagagcgagaatcgcaaaaaatctttcgaaaaaaccaaccctaagcggaagaaggactaccacaactaccagactctcttcgaacctcgcacgcaccacccttacctccttgagatgctactcgctcctgatattcgccatgaaaggaacgtcatcctgcagtgtgtgcgttatattattaaaaaagatttctttgggctggatacgaatagcgccaaatcaaaggacgtatag

SEQ ID NO: 126849 - DNA, 648 bp, synthetic construct
  misc_feature 1..648: note = Description of Artificial Sequence: Synthetic coding sequence
  source 1..648: mol_type = other DNA
atggaaacgcaggcagagcagcaggagcttgagacactccctacaaccaagatggcacagaccaatcccacccctggctccctggggccctggaaaattaccatttacgaccaggagaactttcagggaaaaagaatggaatttacttcttcctgcccaaacgtttcggaacgttcatttgacaacgtgcgctctctgaaggtagaatcaggcgcctggattgggtacgagcacactagtttttgcggccagcaattcatcctcgagcgcggtgaatacccgcggtgggacgcctggagcggcagcaatgcctaccacatcgaacggctgatgagtttccggccgatttgctctgccaaccacaaggagagcaagatgacaattttcgaaaaagaaaacttcatcgggagacaatgggaaatatccgatgattacccttctttacaggctatgggctggttcaataacgaagtgggcagcatgaagattcagtcgggggcctgggtctgctaccagtaccccggttatcgtgggtatcaatacattctggagtgcgaccaccacggcggagactacaaacattggcgagagtggggtagccatgctcaaacctcacagattcaaagcatccggagaatacagcagtag

SEQ ID NO: 126850 - DNA, 2940 bp, synthetic construct
  misc_feature 1..2940: note = Description of Artificial Sequence: Synthetic coding sequence
  source 1..2940: mol_type = other DNA
atgaccctgcatgcgactcgcggcgccgccttgctctcctgggtcaactcactccacgttgccgaccctgtggaagctgtcttacagctgcaggactgctcaatttttattaaaattattgatcggatccatgggacggaggagggccaacagatactgaagcaacccgtgtctgaacgtctggactttgtctgtagctttctccagaaaaatcggaaacacccgagtagccctgaatgcctggtgtctgcccagaaagtgctcgaagggtcagagcttgaattggcaaagatgactatgctgttactctatcactccacaatgagctccaaaagcccgcgcgattgggagcagtttgagtacaaaatacaggccgaattggccgtgatcttaaaattcgtgctggatcacgaggatggtcttaatttgaatgaagatctggagaactttttacaaaaagcccccgtaccctcaacatgttcctccacttttcctgaagaactgtctccaccttctcatcaggccaaacgtgaaattcgattcttggaattacagaaggtggcttcatctagttcgggcaataactttctatccggctcccctgcatctcccatgggcgacatacttcagaccccccagttccagatgagacggttgaagaagcagctcgccgatgaaaggtccaatagggatgagctcgaactcgaactggctgagaaccggaaattattaacagaaaaagacgcgcagattgccatgatgcagcagaggatcgacaggcttgccttactgaatgagaagcaggctgcgagcccgcttgagccaaaagagctggaagaactccgagataagaatgaatcactcaccatgagactgcacgagactttaaagcagtgccaggacttgaagactgaaaagtcccagatggatcgcaaaatcaaccagttgagcgaggaaaatggtgatctgagcttcaaactgcgtgaatttgctagccatctccagcagctccaggatgctctgaacgagctaacagaggagcatagcaaggctactcaggaatggctggagaaacaggctcagctcgagaaggaactgtcagctgctctacaggacaagaagtgtttagaagaaaagaatgagattctgcagggcaagctgagccagctggaggaacacctttcacagttacaagataatccacctcaggaaaaaggagaggtgctgggagacgttttacaggttgaagaattgtctaagaagcttgctgactccgatcaggcctctaaggtccagcagcagaaattgaaggcggtgcaagctcaaggcggcgagtctcagcaggaggcccaacgcctgcaagcacagctgaatgagctgcaggctcagctttctcagaaggagcaagctgccgagcattacaaactgcagatggagaaagccaagactcactatgacgcaaagaaacagcagaaccaggagctacaggagcagctgcgaagcctcgagcagctgcaaaaagagaacaaagagctgcgagccgaagccgagagacttgggcatgagttacagcaggccgggttgaagacaaaggaagcggagcagacttgcagacatcttactgctcaggttcgctcactggaggctcaggtggctcatgcagaccagcagctcagggacttgggaaagttccaagtggctacagatgccctgaagtctagagaaccgcaggctaagccccaactggatcttagcattgattctctggacctatcatgtgaggaaggtacaccgttgtcaattaccagtaagctgcctcgcacacagcccgacgggacttcagtgcccggtgagccggccagtccgatttcacagaggttgccccctaaggttgaatctttagagtcactgtatttcacccctataccagctaggtctcaggcgccgttggagtcttctctggattctcttggtgatgtgttcttagacagtggaaggaagacccgttctgcgagaaggcggacaacccagatcatcaacattaccatgacaaaaaagctcgatgtcgaagagcctgattccgccaatagcagcttttactccacacgctccgccccagcttcacaagcgtcactgagagctacctctagcacacagtcactggctaggctgggttctcctgattacgggaacagcgctctactatccctacccggctaccggccaactacgcggagctccgcaagaaggagccaggccggggtgagctccggtgcaccccccggtcgaaattcattctacatgggtacctgccaggatgagcctgaacagctggacgattggaaccggatcgctgagttgcagcagaggaacagggtgtgccccccacaccttaagacatgttacccactggagagtagaccaagcctgagtcttggaactatcaccgacgaagaaatgaaaaccggggatcctcaggagacattgcgccgcgcctccatgcagccaattcaaatcgccgaagggactgggatcaccacgcgacaacagcggaagagggtgagcctagaaccgcatcagggccccggaactccagagtcgaagaaagccacctcatgctttcctcgccctatgaccccacgcgatcgccacgaaggtaggaaacaaagcaccaccgaggcacagaagaaggccgccccagctagcaccaaacaggccgatcgccggcaaagcatggccttctccatcttaaacactccaaaaaaactcggcaatagcttattaaggcgaggcgcctcaaaaaaagcacttagtaaggccagtccaaacactcggtcaggcactcgccgcagtccacggattgcgacaacaacagcgtcagcagccactgccgccgccattggcgctacacccagagccaaaggcaaggccaagcactag

SEQ ID NO: 126851 - DNA, 6306 bp, synthetic construct
  misc_feature 1..6306: note = Description of Artificial Sequence: Synthetic coding sequence
  source 1..6306: mol_type = other DNA
atgacactccatgcaacgcgaggcgccgcgttattatcatgggtaaatagtctccacgtggccgatccagtggaagctgtgctccagcttcaggattgttccatcttcatcaagattatcgatcggattcacggcacagaggaaggccagcagatcctcaaacagccagtcagcgaacgccttgatttcgtgtgttcctttctgcaaaaaaacagaaaacatcctagctcgccagagtgtctggtatccgcacaaaaggttctggaggggagcgaacttgaactggccaaaatgacaatgctcctcctgtaccattcaaccatgagtagtaagtctccccgcgattgggagcagttcgaatacaaaatccaagctgagctggctgtgatactgaagttcgtgttagatcacgaagatggtctaaatttgaatgaggatcttgagaattttttgcagaaagcccctgtgccttctacgtgtagcagcaccttccctgaagagcttagtcccccaagtcaccaggctaagagagagattcgtttcctcgaactgcagaaggtggcatcatcctcatccggaaacaattttctcagcggcagccctgcctcaccgatgggagacatacttcaaacccctcagttccagatgaggcggctgaagaagcagctagccgacgagaggtctaatcgggacgagttagagctcgaactagccgaaaaccggaagctgttgactgaaaaggatgcccaaattgctatgatgcaacagagaattgaccgactggcgctactaaatgaaaagcaggcagccagccctttagagcccaaggagttggaggaactacgagataagaacgagtccttgaccatgaggctgcacgagactctgaagcagtgccaagacttgaaaacagaaaagtcccagatggaccgcaagataaaccagctgtcagaggaaaatggggacttgtcatttaaactgagagagttcgctagccatctgcaacagcttcaagacgccttgaatgaactgacagaagaacattctaaggcaacacaggagtggctcgagaagcaggcccagctggagaaggagctttccgccgctctccaggataagaagtgcctggaggaaaaaaacgagatcctgcagggcaagctgtcccaattggaggaacatctgagtcagctgcaggataatccgccccaggaaaaaggggaggtgctaggggatgtcctccaattggagactctgaaacaggaagctgccacgttggctgccaataacacacaactacaggcccgcgtggagatgctggagaccgagcgcggccagcaagaagccaaacttcttgccgaacgtggacacttcgaggaggaaaaacagcaattgagttccttgatcaccgacctccagagctcaataagcaatctgtcccaggctaaagaagaactggagcaggcctcccaagctcacggcgcccggcttacagcccaggtcgctagcctgacttccgaactgacaacgcttaacgctaccatccaacaacaagaccaggagcttgccggcctcaagcagcaggcgaaggaaaagcaggcacaactagctcaaactctccaacagcaggagcaggcctcccaaggtctccgtcaccaggttgagcagctgtcaagctctttgaagcagaaggagcagcaactgaaggaggtggccgaaaagcaggaggccactaggcaagaccacgctcagcagctggcaaccgcggcagaggagcgcgaggccagcttgcgagaacgggacgcagcattgaagcagttggaagctttggagaaggagaaggctgctaagctggagattctccagcaacagctgcaagtggcaaacgaagctcgcgactccgcgcagacatcggtcacccaagctcagcgcgaaaaggcagagctcagtaggaaagttgaggagctacaggcttgcgttgaaacggcccggcaggagcagcatgaggcccaggcccaggttgcggagctggagctccagctgagatcagaacagcagaaagcaacagaaaaggagagggtagcccaagaaaaagaccagttacaggaacagctgcaagcccttaaggaaagtctcaaagtcacaaaggggagcttagaggaggagaaaaggagagcagctgacgctctcgaggaacagcagagatgcatctcagagttgaaagccgaaactcgctcgttggtggagcagcataaacgcgaacggaaagagcttgaagaagaaagggcgggcagaaaagggttggaagcacgcttacagcagttgggtgaggcgcatcaggcagagacagaagtgcttcggagggagcttgctgaggccatggccgcgcagcatactgccgagtccgagtgcgaacaactggtcaaagaggtggcagcctggcgagaacggtatgaggacagtcaacaagaggaggcgcagtacggcgccatgtttcaggagcaactgatgacactcaaggaggagtgtgagaaagcgcggcaggagctgcaggaagccaaggagaaagtcgccgggatcgagagccatagtgaacttcagatatcaaggcagcagaacgagctggccgagttacatgcaaatctcgcacgggccctgcagcaagttcaggaaaaagaggtgagggcccagaagttggctgacgatctttccaccctgcaggagaaaatggccgccactagcaaagaggtggcaagactggaaaccctcgtcaggaaagccggcgagcagcaggagacggcctcacgcgagctcgttaaggagcctgccagagctggcgatcgccagcccgaatggcttgaggagcagcaggggcgacagttctgttcgacacaagcagccttgcaggcaatggaacgtgaggctgagcagatgggaaacgagttggagaggcttcgcgctgcactgatggaatctcaaggccagcagcaggaggaacgcggccagcaggaacgggaggtggctcgcctaacccaggaacgcggtagagcccaagcggatctggcgcttgaaaaggctgcacgtgctgagctggaaatgagactccagaatgctcttaatgaacaacgggtggaattcgccacgctgcaggaagccctggcgcacgcattgactgagaaggagggtaaggaccaggagctcgccaaacttcgcggccttgaagccgcacagattaaggaacttgaggagctccgccagactgtgaaacagctgaaggagcaattagctaagaaagaaaaggagcatgccagtggcagcggggcccagagtgaggctgcaggtagaaccgagcccacgggccctaaattagaagccctccgggctgaagtgagtaagctcgagcagcagtgtcaaaaacagcaggaacaggctgattcattggaacgtagcctggaggccgaacgggccagtcgcgcagagcgtgactccgctctcgagactctgcaggggcaattggaggaaaaggcacaggagctcggacattcccaatccgccctggcttccgctcagcgagaactggccgcattccgaacaaaagttcaggatcatagcaaggccgaagacgagtggaaggctcaagtggcccgcggtagacaagaggctgagagaaagaattcactcataagtagccttgaagaagaagtgtcaatcctaaaccggcaggtgctggagaaggagggggagagtaaggaacttaaacgtttggtaatggctgagagcgaaaagagccagaaactggaagagcgcctcagactcctccaggccgagacggctagcaattctgccagagccgccgagcgcagcagcgccctgagggaggaagtacagtcacttcgtgaggaggcagaaaagcaacgggtggcgtccgagaatctgcgacaggagctgacatcccaggctgagagagctgaggagctaggccaggagcttaaagcttggcaagaaaagtttttccagaaagagcaagcactgagtactcttcagctcgaacatacatcaacgcaggcacttgtgtccgagctgttgcctgccaagcacctttgccagcagctacaggccgaacaagccgcggcagaaaaacgccacagagaggaactggagcaatctaaacaggcagccggcgggttgcgcgcggagcttctccgggcccagcgggaattgggtgaactgatccctctccggcaaaaggtggcagagcaagaacgtactgctcaacaactgcgtgccgagaaggccagctacgcagagcagctgtcaatgctgaagaaagctcacggtcttctcgcagaagagaatcggggtctaggagaacgggctaatctagggagacagtttcttgaggttgagcttgaccaggccagggagaaatacgtgcaggagctggccgccgtccgcgcggacgctgaaactcgccttgcggaggtgcagcgcgaagcacaaagcaccgccagggagttggaggtgatgactgcaaaatatgagggagctaaggtgaaggtgctagaggaaagacaaagatttcaggaggagcgacagaagctcacggcccaggttgaggagctttcaaaaaagctggcggacagtgaccaggctagcaaggtccagcagcaaaaacttaaggccgtccaggcccagggtggagagagccagcaggaggctcaacgactacaagcccaactgaacgaacttcaagcccagcttagtcagaaggagcaggcagccgaacactacaaacttcagatggagaaggcaaagacacactacgacgcgaaaaagcaacagaaccaggagctccaggagcaactaaggtccctggagcagctgcagaaggagaataaggaactccgcgctgaggctgaaaggctggggcacgaacttcaacaggcagggctgaagactaaggaagccgagcaaacatgccgccaccttactgcccaggtgaggtcgctggaagctcaggtggctcatgccgatcagcaactacgggacctgggcaagttccaagtggccaccgacgccctgaagagtagagagccacaggctaagccgcagctagatctctctattgactcactggacctctcgtgtgaggaggggacccctctgtccatcacaagcaagttgcctcgaactcaaccagatgggaccagcgtgcctggggagcctgctagccccatcagtcaaaggttgccacctaaggtcgagagccttgaatctctatacttcacaccgatccccgcccgttcccaggctccactggaatcttctctagatagcctcggcgacgtgttcctggacagcggacgtaagacccggtctgctaggcgaagaacaactcaaatcatcaacataacgatgacaaagaagctggatgtggaggagcccgatagcgctaattccagcttttacagtacaagaagtgccccggcatcccaggcttctttacgcgccacctcgagcacacaaagccttgcacgccttggctcgccagattatggcaactctgctctcctcagtctgcccgggtaccgcccaacaacccgttcctcagctagaaggagtcaggcgggagtctcttccggcgctcctcctggcagaaactccttttacatgggcacatgtcaagatgagccagaacagttagacgattggaacaggatcgccgagcttcaacagaggaatagggtctgccccccacaccttaaaacgtgttatcctcttgagtcaaggccgagcctcagtctggggaccatcacagacgaagagatgaagactggggacccccaagagaccttgcggcgggctagtatgcagcctattcagatcgctgaaggaacaggtataacaacccggcaacagcgcaaacgggtatccctggaaccacaccagggccccggcactccagagtctaagaaggcaacatcttgcttccctcggccaatgactccacgagatcgtcacgaggggagaaagcagagcacgactgaagcccaaaagaaggccgccccggcttctactaagcaggccgataggcggcagtccatggcgtttagtattctaaatacccccaagaagctgggtaatagcctgcttcggaggggagccagcaagaaggcccttagcaaggcatcgccaaatactcgctcagggacccgccgcagcccacgaatcgcaacgacaaccgcgtcggcagccaccgcagcagcgatcggagcaaccccccgcgcaaaaggcaaggccaagcattag

SEQ ID NO: 126852 - DNA, 4995 bp, synthetic construct
  misc_feature 1..4995: note = Description of Artificial Sequence: Synthetic coding sequence
  source 1..4995: mol_type = other DNA
atgttggagacggagcgggggcaacaagaggcgaagctcctcgccgaaagagggcattttgaagaggaaaaacagcaactctcttctctgattactgatctgcagagcagtatatctaatttatcgcaggccaaggaagaactggagcaggcatctcaggcccatggggcaaggctgactgcccaggtcgcctctctgacttctgaactcacaacattaaacgcaaccattcagcagcaggatcaggaactggcgggcctgaagcagcaagctaaggagaaacaagcgcaactcgcccaaacactacaacagcaagaacaggcctctcaggggctacgacaccaggtagaacagctgagtagctctttaaagcaaaaggaacagcagctaaaggaagttgccgagaagcaggaagcgacaagacaggatcacgctcagcagctcgctacagccgccgaagagcgggaagcctctttgcgcgagcgcgatgccgcgctgaagcagcttgaggcattggagaaggagaaggcggctaaactggagattctgcagcagcaactgcaggtagccaatgaggccagggactccgcccagacctccgtcacccaagcccagagggagaaggcggaattatctcgtaaagtcgaagaactgcaggcctgtgtggaaacagcccgtcaggaacagcacgaggcacaggcgcaggtcgcagagttggaattgcagctgaggtctgaacagcagaaggccaccgagaaagaaagagttgcccaggaaaaagatcaactccaagagcagctccaggctctcaaggaaagcttaaaggtgaccaaagggagcctagaggaagagaagcggagggccgccgatgcactcgaggaacagcagcggtgtatttccgaattgaaggcggaaactaggagcctagtggagcagcataaacgggaaagaaaagaactggaagaggaacgtgcagggcggaagggcttagaggcacgactgcagcagcttggagaagcccatcaagctgagactgaggtgctgaggagagagcttgccgaggctatggctgcccaacacactgccgaatcggaatgtgagcaactcgtgaaagaggtcgccgcatggcgcgaacgttatgaggattcacagcaagaggaagcgcagtacggggccatgtttcaggagcaactgatgaccctgaaggaagagtgcgagaaagctagacaggaacttcaggaggccaaagagaaggtcgccgggatcgagagtcactccgaactccagattagcaggcagcagaatgagctggcagaactacacgccaatctcgcccgcgctttgcagcaggtccaggagaaggaagttcgcgcccagaaactcgccgatgacctgagtacgctccaagagaagatggcggcaacctccaaagaggttgccaggcttgaaactttagttaggaaagccggagaacagcaggagacggccagtcgtgagctcgtgaaggaacctgccagggccggagaccggcaaccagaatggctagaagagcagcagggccgtcagttctgcagcactcaagctgccctccaggccatggaacgcgaggccgaacagatgggcaatgagctcgagcgcctcagagctgccctaatggagtcccagggtcagcagcaagaggagaggggccaacaggaacgggaggtagcccggttgacacaagaacgcggtcgagcacaggccgatctggccctagagaaagcggctcgggccgagctggaaatgagactgcagaatgccttgaatgagcagcgggtggagtttgcaaccttacaggaggccctggcgcacgctctgactgaaaaagagggtaaggaccaagagctcgcgaagctgcgcggactcgaagctgcccaaattaaggagctagaggagttgagacagacagttaagcagctgaaagagcaactagccaaaaaggagaaagagcacgcctcgggttcaggcgctcaatcagaagctgcaggacgaacagagcctacaggccccaaattggaggccttgagggctgaggtatcaaaacttgagcagcagtgtcagaagcagcaagagcaagctgacagcctggagcggagcctggaagcggagcgagccagcagggcagagcgtgatagcgcgcttgaaacacttcaggggcagctggaggaaaaagcccaggagctggggcactctcagtcagccctggcgtctgctcagcgggaactcgcagctttcaggacaaaagttcaagatcacagtaaagcggaggacgagtggaaagcccaggttgcgcggggacgccaagaggcagaacgtaagaacagtctgatatctagcctggaagaggaggtctccatacttaacaggcaggtcctagaaaaagagggggaatctaaggaattgaaaagactggtcatggcagagtcggaaaaatcccagaagttagaggagcgactgaggctattacaggccgaaactgcttcaaactctgcgcgcgccgccgagagaagttctgctcttagagaagaagtacagtccctccgcgaagaggcggaaaaacaacgtgtggctagtgaaaatctgaggcaggagctaacatctcaggccgagcgcgcagaagagctgggtcaggagctcaaggcatggcaggagaaattttttcaaaaggaacaggcactgagcactttgcagcttgagcatacctctacacaggctctagttagcgagctgctgcccgcgaagcatctgtgtcagcaacttcaggccgaacaagccgcagctgaaaagagacaccgcgaagaactcgaacagtctaaacaagccgcggggggactgagggccgaattgctgagagcccagagagagttaggggagttgattccattgaggcagaaagtggccgagcaggaacgaacagcccagcagctgcgagctgagaaggcctcctacgccgagcagctgtcaatgctgaaaaaggcacatggacttctcgcagaggaaaaccgaggcttgggtgagcgagccaacctaggaaggcagtttctggaggtagagctggaccaggccagggaaaagtatgtgcaggagttagctgctgtgcgcgcagacgccgaaacccgactggccgaagtacagagagaagctcaaagtacagctcgggaactggaagtaatgaccgcaaaatatgagggcgccaaggttaaggtcttagaagaaaggcagcgtttccaggaggagcgtcaaaagctcaccgcccaagtcgaggaactgtccaaaaaattggcggattccgaccaggccagtaaggtgcagcagcagaagttgaaggcggtacaggcgcagggcggtgagtcgcaacaggaagctcaaaggcttcaggcccagctaaatgagcttcaggcccagctgagccagaaggaacaggccgcagaacattataagctgcagatggagaaagcgaaaacgcattacgacgctaaaaagcagcagaatcaggaactccaggaacaattacggtctctggagcagttacaaaaggagaacaaagaactacgcgccgaagctgaacggttaggccatgaacttcagcaggccgggctgaaaacgaaagaggctgaacagacctgccgtcatttgaccgcccaggtgaggtctttggaagctcaagtggcccatgcagaccagcagctaagagatctcggcaagtttcaggtggccacggatgctctcaagtcacgggaacctcaggcaaagccacagttggacctgtccatcgactcactcgacctgagctgcgaggaggggacgcccctgagcattacaagcaaattaccccgaactcaacctgatggaacctctgtgccaggcgaaccggcgtccccgatttcgcaacggctaccacccaaagtcgagtctttggagtctctctatttcacacctatccccgcacgttcgcaagctcccctcgaaagcagcctcgactcccttggcgacgtattcctggacagcggcagaaaaacgagaagtgcaaggcggcgcactacacaaattatcaatattactatgacgaagaaactcgatgtggaggaacctgattctgccaatagttcattctattctactcgttccgcacctgccagtcaagcttcactcagggccacgagtagtacccaaagcctggctcggttaggaagtcccgactacgggaattcagccctgctttccttaccaggctacaggcccactacgcgttctagcgcaaggcggtcccaggcgggggtctcttctggagccccgcctggacggaatagtttctacatggggacatgccaagatgagccagaacagttagacgattggaaccggatagcagagctccagcagaggaaccgggtttgtcctccgcacctcaaaacatgttatcccctcgagtcacgcccgtctctttccctggggacaataaccgatgaagaaatgaaaacaggcgatcctcaggagacactcaggcgggcatcaatgcagcctatccagatcgctgagggcacaggcatcacaactaggcaacagcgaaaacgggtctccttagaacctcaccagggcccaggtacccccgaatccaagaaggccacgagctgtttccctaggcccatgacccctagagatcggcacgagggacggaaacagagtaccacagaagcccagaagaaagcagcccccgcgagcacaaagcaggccgatagaagacagtctatggcctttagcattctgaatacgcctaagaagctgggcaattccctgctccgacgcggggcttccaaaaaggccttatccaaggcctcaccaaacacccggagcggtacccgacggagtcctaggattgctacgactacagcctctgccgcaacagctgccgctatcggcgcaacgcctagagcaaaagggaaggccaagcattag

SEQ ID NO: 126853 - DNA, 228 bp, synthetic construct
  misc_feature 1..228: note = Description of Artificial Sequence: Synthetic coding sequence
  source 1..228: mol_type = other DNA
atgactttacacgctactcggggcgcggcactgctgagctgggtcaattcactgcatgtggccgatcccgtggaggccgtcctgcagctgcaggactgtagtattttcatcaaaattatcgacagaattcatggcacagaagagggccagcagattttaaaacagcccgtctcagagcgcctagacttcgtctgtagtttcctccagaaaaatcgtaagcacccttag

SEQ ID NO: 126854 - DNA, 276 bp, synthetic construct
  misc_feature 1..276: note = Description of Artificial Sequence: Synthetic coding sequence
  source 1..276: mol_type = other DNA
atgaccttgcacgccactagaggggccgctttactatcatgggtcaacagcttacacgtggccgatcctgtggaagcggtgcttcaacttcaagattgctctatctttattaaaatcatcgataggattcacgggaccgaagagggccagcagatcctcaagcagcccgtcagcgagagactggatttcgtgtgtagtttcttgcaaaaaaaccgtaagcaccctagtagcccggagtgcctggtcagtgcacaaaaggttctggaaggaagctag

SEQ ID NO: 126855 - DNA, 6348 bp, synthetic construct
  misc_feature 1..6348: note = Description of Artificial Sequence: Synthetic coding sequence
  source 1..6348: mol_type = other DNA
atgacactacacgccactagaggagccgctttattatcatgggtgaactctctgcacgtggcagaccctgtcgaggcagtactacagctccaggactgctcaattttcatcaaaataattgaccggatacatggaaccgaagagggccagcaaattctgaagcagcccgtgtcagagcgcctggactttgtgtgctctttcctgcagaaaaatcgaaagcacccctcgagtcctgaatgtctcgtctccgctcagaaggttttggagggcagcgaactcgagctcgctaagatgaccatgcttcttctgtaccatagtaccatgtccagcaaatcaccacgggactgggaacagtttgagtacaaaatccaggccgaattggctgtgattttaaagttcgtgcttgatcatgaggatggactaaacctgaacgaggacctcgagaacttcttgcagaaggcaccagtcccgtctacttgttcctccacattccctgaagaattgagtccaccttctcaccaggctaaacgcgaaatccgatttctggagctccagaaggtagcttcatcctcatccggaaacaatttcctctctggttccccagcgagtccaatgggagacattctgcaaactccgcagttccagatgagaaggcttaagaaacagctcgcagatgagcgctccaatcgagatgagctggagctcgagttggctgaaaatcgcaaattgctcacagagaaggatgcccagatcgcgatgatgcagcaaaggatagatcgacttgctctgctcaatgagaagcaggcggcatcacctctggaacctaaggagttggaggagctgagggacaagaacgagtctctgaccatgcgcttacatgaaactctgaagcagtgtcaggacctcaagaccgagaagtctcagatggaccgaaaaatcaatcaactctctgaggagaatggcgacctgagcttcaaactgcgggagttcgcatctcatctgcagcagttgcaggatgctcttaacgaattgactgaggagcatagcaaggcgacacaggagtggctggaaaaacaagcccagctggaaaaggagctgagtgctgctctccaggacaaaaagtgccttgaagaaaaaaacgaaattctgcagggcaaactgagtcagctggaggaacacctgtcacagctgcaggacaaccccccccaagaaaaaggtgaggtgttgggagatgttttgcaactggagacccttaaacaggaagccgcaacactcgctgctaacaacacacaactccaggcacgcgtggaaatgctggaaacagaaagggggcagcaagaagctaaattgctcgccgagcgtggccacttcgaagaagagaagcaacagctgagcagcctcatcactgaccttcagagcagcatatctaacctgtctcaagctaaggaggagctcgaacaagccagtcaggctcacggagccaggctaaccgcccaagtggcttccctaacctccgagctgaccaccctcaatgccactatccagcagcaggatcaggaactggcaggtctgaagcaacaggccaaggaaaaacaggctcagctggcccaaacactgcagcagcaggagcaggcaagccagggccttcgccatcaggtggagcagcttagctcttcactgaagcagaaagagcaacagctgaaagaagtggcagagaagcaggaggctacacggcaggatcatgcccagcaactggctactgccgcagaagagagagaggcctccctcagagaaagagacgccgctctgaagcagttagaggccctggaaaaagagaaagctgccaaactggagattctgcagcaacagctgcaggttgctaacgaagcccgtgattcagcacagacctcagtgactcaggcgcaaagggagaaagccgaactaagcaggaaggtggaggaattgcaagcatgcgtggagacagctagacaggaacagcatgaagcacaagcgcaagtagcggagttggagctgcaattaaggtccgaacaacaaaaggctaccgaaaaagagcgagtggcccaagagaaggatcaactgcaggagcagcttcaggcgctgaaggaatctctgaaagtgaccaaggggagtctggaggaggaaaagcgtcgcgccgccgacgcactcgaggaacagcagagatgcatttctgagctgaaagccgaaactaggtccttggtcgagcaacacaagagagagagaaaggaactcgaggaggaacgcgcagggagaaagggcctggaggcccgtctgcagcagcttggagaagcccatcaagctgagactgaggttcttcgtcgagagctggccgaggctatggccgctcagcatacagccgagtccgaatgtgaacagctcgtcaaggaagtggcagcttggcgggaaagatacgaagactctcagcaggaagaagcccagtatggcgcaatgttccaggagcagttaatgactctgaaggaagagtgcgaaaaagcacggcaggagctgcaagaagccaaggagaaggtcgctggcatcgagagtcattctgagttgcagatctcacggcagcaaaatgaactggctgagcttcacgccaatctcgctcgggcactccagcaggtccaggagaaagaagtcagggctcagaaacttgcggatgacctctctacgctgcaggaaaaaatggccgcgacgtccaaagaagtggcaagactggagactctggttcggaaggctggtgagcaacaggagacagcttctagggaactcgtaaaggagccagcgcgggcgggggatagacagccagagtggcttgaggaacagcaaggaaggcagttttgttcaacccaggccgccctccaggccatggagcgggaggccgaacagatgggcaatgaactggagaggttgcgcgccgccctgatggaatctcaaggccaacagcaggaagagcgcggccaacaagagcgcgaagtggcgcggctgacacaggaaagaggaagagcccaagccgacttggcgttagagaaggcagcgagagccgagttggaaatgaggctgcaaaatgctctgaacgagcagcgagtggaatttgccacattgcaggaagcattggcccatgcgctgaccgaaaaagaaggcaaggaccaagagcttgcaaaactgcgcggcttggaggctgctcagattaaggaactcgaggaactgcgacagactgtaaaacagttaaaggagcaattggccaagaaggaaaaagaacatgcatcaggctcgggggcacagagcgaggcagctgggcgaaccgagcccaccggccccaaattggaagcactgcgggcggaggtgagcaaacttgagcagcagtgtcagaaacagcaggagcaggcagattcactagagcgatcgctggaagctgagagagcatcccgcgccgagagggactctgcacttgaaactttgcagggacaactcgaagaaaaagctcaagaactgggccacagccagtccgctttagcctccgcccagagggagctcgcagctttccgtaccaaggtgcaggaccacagcaaagccgaggatgaatggaaagcccaggtggctcgggggagacaggaagccgagcgtaaaaactctcttatctcctctcttgaagaggaggtaagtattctgaaccgtcaggtgcttgaaaaggagggagagtctaaggagctgaagaggctcgtaatggccgaaagtgagaaatctcagaaactcgaggagaggcttcgcctcctgcaggctgagaccgcctccaactcagcacgcgccgccgaaagatcatctgctcttcgcgaggaggtacaaagcctgcgagaggaggctgagaaacagcgagtcgccagtgagaatctgcgacaggagctgacatcacaggcagagcgggccgaggagctgggacaggagcttaaggcgtggcaggaaaaattctttcaaaaagagcaagccctaagtacactccagcttgagcacacttcaacacaggccctagtttcggagctgcttccggccaagcatctgtgtcaacagcttcaggctgagcaggcggccgccgagaagcggcacagggaagaactcgaacagtccaaacaggccgctgggggccttagggctgaattactgagggcccagcgcgaactgggggagctcatcccgcttcgtcagaaagttgcagagcaagagagaacagcacagcaacttagagcagagaaagccagctatgcagagcaactgagcatgttgaaaaaggcccatgggctcttagctgaagaaaatcgaggacttggtgagagagcgaacctggggcgccaattcctggaagtcgaactggaccaggcaagggagaaatacgtgcaggagctcgcagctgtgcgagcagatgccgagactcgtctggccgaggtacagcgcgaggctcaatcgacggctagggagttggaggtgatgaccgcaaaatatgagggcgcaaaagtgaaagttttagaagagcggcagcgcttccaggaagaacgtcagaaactgacagctcaggtcgaacaactggaagtttttcagagggagcagaccaaacaggtagaagagctttcgaagaaactggccgacagcgatcaggcatcgaaggtccagcaacagaaactaaaggcagttcaggctcaagggggcgaatctcagcaggaggctcagcgactccaggcccagttgaatgaattgcaggcccaactgtctcaaaaagaacaggctgccgaacactacaagctacagatggaaaaggcaaagactcactacgacgctaagaagcagcagaaccaagagctgcaggaacaactgagatccctcgaacagctgcagaaagaaaacaaggaacttcgagccgaggccgagcgcctgggtcacgagctacagcaggctggcctcaaaacaaaggaagccgaacaaacgtgtagacacctgacagcacaggtgagatcactggaagcccaggttgctcacgccgaccagcagctcagggatcttggaaagttccaggtagctaccgatgcccttaaatcaagagaaccccaggcgaagccacagttggatttgagcatagactcactggacctttcttgtgaagagggcacaccactgtctattacaagcaaactcccacgcactcagccagatggtacgtcggtgcccggggagcccgcctccccaatcagtcaacgccttccccccaaggtcgaaagtctggagagcctgtactttacgcccatcccagctagatcgcaggccccactcgaatcttcactggactcactcggcgacgtgttcctcgattctggccgcaaaaccagatcagcccggaggagaacaactcagatcataaacattaccatgacgaagaagcttgatgtggaagagcccgatagcgctaattcgagcttctattccactaggtcagcccccgccagccaagccagccttcgggccacctctagcacccagtcactggccaggctcggcagccctgattatggtaacagcgcactgctttcactgccagggtataggcccacaacccgaagcagcgctagacgttcccaggccggcgtgtcatcgggggcacccccgggccgcaacagtttttatatggggacttgccaagatgagccagaacagttggacgattggaatcgaatcgccgagctacagcagagaaatcgggtctgtccaccgcatctcaagacctgctaccccctcgaaagcagaccgtctctaagcctcggcacgattaccgacgaagagatgaagacaggagatccccaggaaactctcagaagagcctccatgcaacctatccagatcgccgaggggacaggtattacaactaggcagcagcggaaacgggtgagcttggagccacaccagggccccggtacaccggagagtaagaaagcaaccagttgcttcccccggcctatgacccctcgtgaccggcatgaaggccgcaaacagagcacgaccgaggcccaaaagaaggccgccccagcaagcacaaagcaagctgatcgcaggcagtctatggccttctcgatattgaacactcccaagaagctggggaattccctgctacgccgtggcgcgagcaagaaagcgctaagcaaggcttcgcctaacacacggtccggtactcgacgcagtcctcggatcgccacgactaccgcctctgctgcaacagctgcagctattggagcaacaccacgcgctaagggcaaagcaaagcattag

SEQ ID NO: 126856 - DNA, 330 bp, synthetic construct
  misc_feature 1..330: note = Description of Artificial Sequence: Synthetic coding sequence
  source 1..330: mol_type = other DNA
atgaccctgcacgcaaccagaggagccgccctcctgtcctgggtaaattccctccacgtggctgatccagtagaagccgtcctccagcttcaggattgctctatttttatcaagatcatcgaccgcatccatggaacggaagaggggcagcaaatacttaagcagcccgtgtcagagcggctggattttgtatgcagtttcctgcagaagaaccgaaaacatccttcttccccagaatgtctcgtgtcagcccagaaagttctcgagggaagcgagctggaactggccaagatgacaatgttactgctgtatcatagcaccatgagttag

SEQ ID NO: 126857 - DNA, 186 bp, synthetic construct
  misc_feature 1..186: note = Description of Artificial Sequence: Synthetic coding sequence
  source 1..186: mol_type = other DNA
atgacattacatgccacgcggggtgccgcattactgtcctgggtgaattcccttcacgtggctgatccagtcgaagccgttctgcaattgcaggattgttctatctttataaaaatcattgacaggatccacgggacggaggagggacagcaaatcctgaagcaaccagtgtccgagaggctatag

SEQ ID NO: 126858 - DNA, 180 bp, synthetic construct
  misc_feature 1..180: note = Description of Artificial Sequence: Synthetic coding sequence
  source 1..180: mol_type = other DNA
atgaccctgcacgcaacacggggagcagcactcctatcatgggtcaacagcctgcacgtggctgatccagttgaggcagttctccaactccaggactgctccatatttatcaagattatcgatcgcattcacgggacggaagaagggcagcagattctgaagcagcctgtatccgagtag

SEQ ID NO: 126859 - DNA, 441 bp, synthetic construct
  misc_feature 1..441: note = Description of Artificial Sequence: Synthetic coding sequence
  source 1..441: mol_type = other DNA
atgacactgcacgctacacgtggagccgccctgttatcttgggtgaattcactgcacgtggccgaccccgttgaagccgttctgcagctgcaagactgctccatttttataaagatcatcgatagaattcacgggactgaggagggtcagcagatcctaaagcaacccgtttccgagagactagactttgtgtgcagcttcctccagaagaatcgcaagcaccccagttcccccgaatgtctggtgtctgctcagaaggttcttgagggttcagaactggagctcgcaaaaatgaccatgctcttgctgtaccacagtactatgtcctctaagagtccgcgagattgggagcagtttgagtataaaatccaggctgagttagccgtgatcctcaaattcgtgctggatcacgaggacggactcaatctcaacgaagactag

SEQ ID NO: 126860 - DNA, 3267 bp, synthetic construct
  misc_feature 1..3267: note = Description of Artificial Sequence: Synthetic coding sequence
  source 1..3267: mol_type = other DNA
atgcgactccagaatgcgctgaatgaacaacgcgtggagtttgccactctgcaggaagctctggctcacgcgctcactgagaaggaggggaaggatcaggagctggccaagttgaggggcctcgaggccgctcagatcaaggaactcgaggaattaagacagacagtcaagcagctcaaggagcagctggctaagaaggaaaaggagcacgcctctggctcaggggctcaatcagaagctgccggccggactgagcctacagggcctaagctagaggcattacgcgccgaagtctcaaagctggagcaacagtgccaaaaacagcaggagcaagcggactcactcgagcgcagcctcgaggctgagcgcgccagccgtgctgaacgcgatagcgccctggagaccctgcagggccagctggaggagaaagcccaggaactcggacactcacagtctgccttagcctccgcccaaagagaactagctgcatttaggacgaaggttcaggaccattcgaaagcagaagacgagtggaaagcacaagtagctcgcgggagacaggaagcggagagaaagaacagcctgataagttccctggaggaggaggtttcgatcctgaatagacaggtgttggagaaggagggtgagtctaaagaactcaagcgacttgttatggcggagtctgagaaatcccaaaaactcgaagaacgcctgaggctgctgcaagccgagactgcttctaactctgcgagagccgccgagcgcagcagtgctctcagggaggaagtccagagcctgcgtgaagaagctgagaaacagagagtagcctctgagaacctgcgtcaggaattgactagccaggcagaaagagccgaggaactagggcaagaacttaaggcatggcaagagaaattcttccagaaggaacaagccctgtctactcttcaacttgaacatacatccacccaggcactcgtatcggaattgctgccagccaaacatctgtgccaacagttacaggctgaacaagcagcagccgagaagcggcatagagaagagctcgaacagagcaagcaggccgctggaggcttgcgggccgaactactcagggctcagcgtgagctcggcgaacttatcccactgagacagaaggtggccgagcaggagagaaccgcccagcagctgcgcgcggagaaggcatcttatgccgagcagctcagcatgctcaaaaaagcccacggcctgcttgccgaggagaaccgcgggctgggagagagggccaaccttggaagacaatttctcgaggtggaacttgaccaggccagagagaagtatgtccaagagctggcggcagtgcgggctgatgccgagactagactggcggaggtccaaagagaagcccaatctacggcgagggagctggaagtgatgaccgcaaagtatgagggagccaaagtgaaggtccttgaggagagacagcgctttcaggaggaacgtcagaagctaactgcccaagtggaagaactaagtaagaaattagcagacagcgatcaggccagcaaagtacagcagcagaagctcaaagcagtgcaggctcagggtggggagtcacaacaagaggcccagaggctgcaagcccagctcaatgagctgcaagcacagctgagccagaaggagcaggccgcagagcactacaagcttcaaatggagaaggcgaagacgcattacgacgctaaaaagcagcagaaccaggaactccaggagcagctcagatccctcgagcagctacagaaggagaacaaggagctcagagccgaggccgaacgacttggacatgagctgcagcaggcagggttgaagactaaggaggctgaacagacatgcaggcacctcaccgcccaggtgcggtctctggaggctcaggtggcacacgcagaccagcagttgcgcgacctaggcaaattccaggtcgcaaccgacgccctaaaaagccgggaaccccaggcgaaacctcagttggatctcagtattgatagcctcgatctctcatgcgaggaagggactcctctctctatcacgcggcacaaagccctgatgactattatcccagacctgtcccctaataacccattgagcaagctccctcggacccagccagacggcacaagtgtacccggtgagcccgctagtcccatttcccagcgattgccccccaaagtggagagcctggagagcctgtactttacgcctattcctgcccggagtcaggccccactcgaatctagtttagactcactcggcgacgtctttctggattcaggcaggaagactcgcagcgcacggcgaaggaccactcagattatcaatattaccatgaccaaaaagctagatgtggaggagccggatagcgccaatagcagtttctattcgacccgaagcgcaccagcgagccaagcctccctccgcgcgaccagtagtacacagagccttgccagactcggatctcccgactatgggaactccgcacttctgtcgttgcccgggtaccgcccaactacaaggtctagtgctaggagaagccaggctggcgtctcctccggtgcgcctcccgggaggaattcattttatatgggaacctgtcaggatgagcctgagcagctggatgactggaacagaatcgcggagttgcagcaacggaatcgagtgtgccccccccacctaaagacttgctacccattggaatctcgaccatcactgtcactcgggactatcaccgacgaggagatgaagacaggagatccccaggaaactttacgcagagcaagcatgcagcctatccagatagccgaaggcacaggcattaccactaggcagcaacgcaaaagggtgtcactcgaaccacatcaggggccaggaacgcccgaatctaaaaaagctacgtcatgcttcccccggccgatgacccctagggatagacacgagggtcgaaagcagtctaccacagaagctcagaagaaggccgcaccagcatctactaagcaggccgatcggaggcagtccatggcattcagcatcctaaatacgccaaaaaaacttggaaatagccttctccgccgcggtgcctcaaagaaggctttatcaaaggccagtcctaacaccaggtccgggactagacgaagtccacgaatagcgactaccacagcttccgccgctacggctgccgccattggagctactcccagagctaagggaaaggcaaaacactag

SEQ ID NO: 126861 - DNA, 2076 bp, synthetic construct
  misc_feature 1..2076: note = Description of Artificial Sequence: Synthetic coding sequence
  source 1..2076: mol_type = other DNA
atgaccctgcacgcaacccgcggggctgcactgctctcctgggtaaatagtctccacgtggccgaccccgtggaggccgtgctgcaactccaggactgttccatcttcatcaagatcatcgataggatccacggaaccgaagaaggccagcaaatcttgaagcagccagtgagtgaacgactggattttgtttgctcattcttacagaagaatagaaagcaccctagctcccccgagtgcctggtttcagcacagaaagttcttgaggggagtgagttagaacttgccaaaatgaccatgttgctcctgtatcactctactatgtccagcaagtccccgcgagattgggagcagttcgaatataaaatccaggcagagctcgccgtgatactgaagttcgttttggaccacgaggatgggctcaatttaaatgaagatctggagaatttccttcagaaagcaccggtacctagcacctgttcctcgacttttcctgaagaactaagcccccccagccaccaagccaaacgcgaaatacgtttcctggagcttcagaaagtagcctcctccagcagtggcaacaattttctttctggttctccggcatccccaatgggtgatatactccagacgcctcagttccaaatgcggagactgaagaagcaacttgccgatgagcgctcaaatcgcgacgagctcgagttggaactcgctgaaaatagaaagctattgacagagaaagacgcgcagatcgccatgatgcaacagcggatcgaccgcttagccctgttgaacgaaaagcaagcagctagcccacttgagcctaaagagttggaggagctccgagataagaacgagtctctgactatgcggttgcatgaaaccctcaagcaatgtcaggacctaaagaccgaaaagtcgcagatggatcggaaaattaaccagctatctgaagagaacggtgacttatccttcaagctgagagagttcgcgtcccacctacagcaactccaggacgctctgaatgagctgactgaagagcactctaaggcaacgcaggagtggctcgagaagcaggcgcagctggagaaagaattatctgcagctctgcaggacaagaaatgcctcgaagagaagaacgagattcttcagggtaagctgtctcagctggaggagcatctgtcccagctccaggacaatccgccacaagagaaaggcgaagtactgggcgatgttttacagctggaaactttaaagcaggaggcagcgacactggccgcgaataacactcagttgcaagctcgggtggaaatgctagagactgagagggggcagcaggaagctaaactgcttgccgagaggggccactttgaagaggaaaagcaacaactgtcgagcttaattactgatctgcagtcctcaattagtaacctttcacaagccaaagaagaattagaacaggccagccaggcacacggagcacggctcacagcgcaggtggcgagtctgacaagcgaactcactactcttaatgcgacaatacagcaacaagatcaggaactcgccggcctgaaacaacaagcaaaggagaagcaggctcagctcgcccaaacactccagcagcaagagcaagcatcccaaggattaagacaccaggtggagcagctgtcctcatcccttaaacaaaaggagcaacagcttaaagaagtagccgagaagcaggaggcaaccagacaagatcacgcgcagcagttggcgactgcagccgaagagagagaggcatcattgcgcgagagagacgccgccttaaagcaactggaagctttggagaaagagaaggccgccaagttggaaatcctgcagcagcaactgcaggtggccaatgaggccagggacagcgctcaaacaagcgtcacccaggcacagcgagaaaaagccgagttgagcagaaaggtggaagagttgcaagcttgtgtagagaccgctaggcaggaacaacatgaggctcaggcgcaggtggctgagcttgaattgcagctccggagcgagcagcaaaaagccacagaaaaggagtag

SEQ ID NO: 126862 - DNA, 480 bp, synthetic construct
  misc_feature 1..480: note = Description of Artificial Sequence: Synthetic coding sequence
  source 1..480: mol_type = other DNA
atgactctgcatgccacccgaggcgcagcactcctgtcatgggtaaactctcttcacgtggcagaccccgtggaggccgttcttcagctgcaggattgcagcatcttcatcaagattattgacaggatacacggcaccgaagagggccaacagattctcaaacagcctgtaagtgagcgcttggatttcgtatgcagttttctccagaagaatcggaagcatcccagctctcccgaatgtcttgtgtcagcccagaaagtgctggaggggagcgagttggagttagctaaaatgaccatgctcctgttgtatcattccacaatgtcgagcaagagtcccagagactgggaacagttcgaatataaaattcaggctgagctcgccgttatactgaaatttgtactcgaccacgaagatggcctgaacttgaacgaggacctcgagaactttctgcaaaaggcccctgttccatcaacatag

SEQ ID NO: 126863 - DNA, 219 bp, synthetic construct
  misc_feature 1..219: note = Description of Artificial Sequence: Synthetic coding sequence
  source 1..219: mol_type = other DNA
atgacactgcacgctaccaggggcgccgccctactatcatgggtaaacagcctgcatgtggctgacccagttgaggcagtgctgcaactgcaggattgttctatcttcataaagatcattgacagaattcatggcaccgaggaagggcaacagattctcaaacagcccgttagcgagagactggactttgtgtgttcatttctgcagaagaatagatag

SEQ ID NO: 126864 - DNA, 252 bp, synthetic construct
  misc_feature 1..252: note = Description of Artificial Sequence: Synthetic coding sequence
  source 1..252: mol_type = other DNA
atgacgctgcatgcgacccggggagcggccctcttgtcatgggtgaacagcctccacgtggccgatcccgtggaggccgtgcttcaactgcaggattgctctatatttattaaaatcatcgaccgtatccacggtacagaggaaggccagcaaattctaaaacagcctgtgtcagagcggctggacttcgtatgtagttttctgcagaagaatcggaaacacccgtcgtcccctgaatgtctggtttcttag

SEQ ID NO: 126865 - DNA, 2559 bp, synthetic construct
  misc_feature 1..2559: note = Description of Artificial Sequence: Synthetic coding sequence
  source 1..2559: mol_type = other DNA
atgaccctgcacgccacgagaggagcagctctgctgagttgggtgaactctctccacgtcgcagaccccgtggaggcggtgttgcagctccaggactgcagcatttttatcaagataatcgacagaatccatggcacagaggagggtcaacagatcctcaagcaaccagtgagcgaaagactggactttgtgtgttccttcctgcaaaaaaacagaaaacatccatcatcccccgaatgtttggtaagcgcccagaaagtcctggaaggctccgagctcgagctggcaaaaatgaccatgctcctgctctaccatagtactatgagttctaagagcccccgggactgggagcagttcgagtataagattcaggccgaactggctgttatcctgaagtttgtgctcgaccacgaagacggcctgaacttgaacgaagacctcgagaattttctccagaaagcccctgttccatctacgtgctccagcacattcccggaagagctgagtccacctagccaccaggctaaaagagagatccgatttctggagctgcagaaggtcgcctcttccagctcaggtaataactttctgtctgggtctccggcctcgcctatgggagacatactgcagactcctcagtttcagatgaggcgactaaagaagcagttagccgacgagagaagcaatcgcgatgagctggagctggagctcgcggagaaccggaaactactcaccgaaaaggatgctcaaattgcgatgatgcaacaaaggatagaccggctggccttgctgaatgagaagcaggcagcgagtccactggagcctaaagagctggaagagctccgagacaaaaatgagagcctaacaatgcggttacatgagacactaaaacagtgtcaggacctaaaaactgagaaatctcaaatggatcggaagattaatcagctgtccgaggaaaatggcgacctttctttcaagctcagggaattcgccagccatctgcaacaattgcaagatgcactaaatgaactgaccgaggaacactcaaaagcaacccaggaatggcttgaaaaacaggcccagctcgagaaagagttatccgccgctctccaagataaaaaatgcttagaggagaagaacgaaatactccaagggaagctatcccaattggaggaacacctatcacagcttcaggacaacccaccccaggaaaagggagaggtcctgggcgacgttttacagctcgaaaccctgaaacaggaggcggccacactggccgccaataacacgcagttacaagcaagagtcgagatgctcgagacagagcggggccaacaggaggcaaagctccttgcagaaaggggtcactttgaggaagaaaagcagcaactaagctccttgattaccgaccttcagtccagcatctcaaacttaagccaggctaaggaagagctggaacaggcctcacaggcccacggcgctcggctcaccgcacaggtggccagtctgacatcagagctaaccactcttaacgctacaatacagcaacaggaccaagagctggctggactgaaacaacaggctaaggaaaagcaggcccagctcgcccagacactgcaacaacaggaacaggcttcgcagggtttacggcaccaggttgaacagctgagctcatcactcaagcagaaagagcagcagctcaaggaagtcgcggagaagcaagaagctacgcgccaagatcatgctcagcagttagctacagcagccgaggagagggaagcttctttgcgggagcgcgatgctgctctaaagcaactggaagccctggagaaagagaaagccgctaagcttgaaatccttcaacagcagttgcaggtggccaacgaggccagagatagtgcccagacatcagtcacccaggcccagcgagagaaagccgaactttcccgaaaggtggaggagctgcaggcttgcgtagaaacagcgcgccaggagcagcacgaggcacaagctcaggttgctgaattggaattgcagctgcgcagtgagcaacaaaaggccacagaaaaggagcgagtggctcaggaaaaagaccaactccaggagcagctccaagcactaaaggaaagtctgaaagttaccaaaggaagcctagaggaagagaagagacgtgctgcggatgcattagaagaacaacagaggtgtatcagcgaactgaaagccgagactcggtccctcgtcgagcagcacaagcgtgagcgtaaagagctggaagaggaaagggcaggtcgcaaaggactggaggcccgtctacagcagttgggcgaggcacatcaagccgaaaccgaggtgttacgccgcgaattggctgaggctatggctgctcagcacacagccgaatcggagtgtgagcagttggttaaggaggtggcggcatggcgtgagaggtacgaggacagccagcaggaggaagcccagtatggcgctatgtttcaagaacagctgatgacgctgaaagaggagtgtgaaaaggctcgccaagaacttcaagaagcctag

SEQ ID NO: 126866 - DNA, 525 bp, synthetic construct
  misc_feature 1..525: note = Description of Artificial Sequence: Synthetic coding sequence
  source 1..525: mol_type = other DNA
atgaccctacatgctaccagaggcgcggctctgttaagctgggtgaattccctgcacgttgctgacccagtggaagccgtcttgcaactgcaagactgcagcatttttattaagatcatcgaccggattcatgggacggaagaggggcagcaaattctgaagcaacccgtgtccgagaggttagattttgtttgtagcttcctgcagaagaacaggaaacatccttcaagccccgagtgtctggtgagcgcccagaaggtgctggagggctcagagctcgaacttgcaaagatgacaatgctgcttttgtatcatagcaccatgagtagtaagtcccctcgagactgggaacagtttgaatacaagatacaagccgaactggccgtgattttaaagtttgtgctggatcacgaggatggactgaatcttaatgaggaccttgaaaacttcttgcagaaggcgcctgttccctccacctgcagctctacattccctgaagagctgagtccgccctcccaccagtag

SEQ ID NO: 126867 - DNA, 606 bp, synthetic construct
  misc_feature 1..606: note = Description of Artificial Sequence: Synthetic coding sequence
  source 1..606: mol_type = other DNA
atgacactgcatgccaccagaggggccgcgctcctgtcctgggttaatagtctccacgtggccgatcccgtagaggccgtccttcagcttcaggactgcagtatcttcattaaaatcattgaccggattcacggtacggaggagggacaacaaatccttaagcagccggtctctgagcgactggatttcgtgtgcagctttctccaaaaaaaccgcaaacaccccagctccccagaatgtctcgtctcagcccagaaggtgctcgaaggaagtgagttggaactggccaaaatgactatgctgctgctgtaccatagtaccatgtccagcaagagccctcgtgactgggaacagttcgagtataagattcaggcagaactggcagtgatcttaaagtttgtgctagaccacgaggacggcctgaacttgaacgaagacttagaaaatttcctccagaaggcccccgttcccagtacttgttcttctaccttcccagaagagctcagcccacccagccaccaagccaagcgagagattcgatttttggaactccaaaaggtggcctcatcctccagcgggaataatttcttgtcaggcagtccatag

SEQ ID NO: 126868 - DNA, 480 bp, synthetic construct
  misc_feature 1..480: note = Description of Artificial Sequence: Synthetic coding sequence
  source 1..480: mol_type = other DNA
atgaccctgcacgccacgagaggggctgccttgctgagctgggttaactctcttcacgtggccgacccagtcgaagccgtgttgcaactccaggattgctccattttcatcaagatcattgataggatccatggaacggaagaggggcaacagatcctgaagcagccagtctctgagcgactggacttcgtgtgttcctttctgcagaagaaccgaaaacacccatcatcccccgaatgtcttgtgagcgcccagaaggtgttggagggaagtgagctcgaactggcaaaaatgaccatgctgctgctctatcactccacgatgtcatcgaagtcgcctcgcgattgggagcaatttgaatataagatccaggccgaactggcagtcatcctgaagtttgttcttgatcacgaggacggcttgaacttaaacgaggacctggaaaattttctgcaaaaggcgccagtgccctcaacctag

SEQ ID NO: 126869 - DNA, 663 bp, synthetic construct
  misc_feature 1..663: note = Description of Artificial Sequence: Synthetic coding sequence
  source 1..663: mol_type = other DNA
atgacactccacgctactcgcggggcagcacttttatcctgggttaacagcctccacgtagccgacccagtggaggccgttcttcagctgcaggactgttctatttttatcaaaatcatcgatcgcatccatggaaccgaagagggccagcagattctgaagcaacccgtgtctgagcgattggatttcgtgtgctctttcctccaaaaaaatcgcaagcaccccagtagtcccgagtgtttggttagtgctcagaaggtactggaagggagtgaactggaattagccaagatgacgatgttgttgctgtatcattcaaccatgtcctccaagagcccaagggattgggagcagtttgaatacaagatccaggctgagctggccgtcatcttgaaatttgtgctagatcacgaggatggactgaatctcaatgaagatctcgaaaactttttgcagaaagcacctgtgccctccacttgtagtagcaccttccccgaggagctgtccccacccagtcaccaggctaaacgcgagattagatttctggagctgcagaaggtagcaagcagcagttccggaaataatttcctgagtggctcacccgccagccccatgggagatattttacagacaccacaattccagatgagacgcttgaaatag

SEQ ID NO: 126870 - DNA, 171 bp, synthetic construct
  misc_feature 1..171: note = Description of Artificial Sequence: Synthetic coding sequence
  source 1..171: mol_type = other DNA
atgacactgcatgcaacaagaggggctgcgttactgtcatgggtgaactctttgcatgtcgcagatccagtggaagccgttctgcagttacaggactgttccatcttcattaagatcatcgaccgcatacacgggactgaggaaggacagcagatacttaagcaaccctag

SEQ ID NO: 126871 - DNA, 1053 bp, synthetic construct
  misc_feature 1..1053: note = Description of Artificial Sequence: Synthetic coding sequence
  source 1..1053: mol_type = other DNA
atgttttgctgcctcggctatgaatggcttagcggcggctgtaaaacatggcactccgcctgggtgatcaatacactcgcagaccacagacaccgagggactgacttcggcggcagcccttggttgctgatcattacagtttttctgaggtcttataagtttgccatatcactgtgtacaagctatctgtgcgtgagcttcctgaagacaattttcccttctcagaacggacatgacggatctaccgatgtgcaacagagagctagaagatccaaccggagacgccaggaaggaattaagatcgtgttagaggacatcttcacactgtggcgacaggttgaaactaaagtgagagctaaaatccgaaagatgaaagtgacaactaaagtgaaccggcacgataaaattaatggcaagagaaagactgcaaaggagcacctgagaaagctctccatgaaagagcgcgaacacggagaaaaagagagacaggtgtccgaggctgaagaaaatggcaaattggatatgaaagaaattcacacatacatggaaatgttccagagggcacaggctttaaggcggagggccgaagattactatcgatgcaagattaccccctccgcccgtaaacccttatgtaacagagtgcggatggcggcggtggagcacagacactcgtctgggcttccgtactggccatacctgactgctgagaccttgaagaatcgaatgggccatcaacctccgccacccacccagcagcacagcatcatcgataacagcctgagcctcaaaactccatctgaatgccttctaacccccctgcctccttccgccctgccctcggccgacgacaacctcaagactcccgccgagtgtttactgtaccctctacctccttcagcagatgataatcttaagaccccccccgaatgcctgcttactccactccctccatccgccccccctagcgtcgatgacaatctaaaaactcctccagaatgcgtatgcagcctgccattccacccccaacgcatgataataagtaggaactag

SEQ ID NO: 126872 - DNA, 1053 bp, synthetic construct
  misc_feature 1..1053: note = Description of Artificial Sequence: Synthetic coding sequence
  source 1..1053: mol_type = other DNA
atgttttgctgtcttggatatgaatggttatccggtggctgcaagacatggcactctgcctgggtgatcaatacactcgcagaccacagacaccgtggcacagacttcggagggagtccgtggcttctgatcatcacagtctttctgcgatcctacaaatttgccatctcactgtgcacatcatatctttgtgtaagctttttgaagaccatattcccctcacagaatgggcacgatgggtcgaccgacgtgcagcagagagcaaggcggagcaataggcggcggcaggagggcattaagatcgtgctggaagatatctttaccctgtggaggcaggtggagaccaaagtgcgagccaagatccgcaagatgaaggttactactaaagtaaataggcatgataagatcaatggaaagagaaaaaccgctaaagaacatctccggaagctctcaatgaaggagcgtgaacacggagaaaaggagcggcaggtgagcgaggccgaggagaacggcaagctggacatgaaggagatccatacatacatggagatgtttcagagagcccaagcccttcgacgacgagccgaggattattatcgctgcaagatcactccatcagctcggaaacccctatgcaacagagtcaggatggccgctgttgaacatcggcactcgtccggcttgccctattggccttaccttaccgccgaaaccctcaagaaccggatgggtcaccagccaccgccacctactcaacagcacagcatcattgataattctctctcactcaaaaccccctcagaatgcctcctgactcctttgccacctagtgctttaccgtcagcagatgataacttgaaaactccagccgagtgtttgctctatcccctgccacccagcgccgacgacaatctgaagacgcctcctgagtgtctgctcacacccctcccacctagtgccccaccgtccgtagacgataatctgaaaactccaccggagtgcgtgtgttctcttccatttcacccccagaggatgatcatctccagaaactag

SEQ ID NO: 126873 - DNA, 1431 bp, synthetic construct
  misc_feature 1..1431: note = Description of Artificial Sequence: Synthetic coding sequence
  source 1..1431: mol_type = other DNA
atggcaagcccattctcaggggcccttcagcttacggatttggacgactttattgggcccagtcaggagtgcataaagccagtaaaagttgaaaagcgggccggaagtggggtagccaaaatacggatcgaagatgatggcagttactttcaaatcaatcaggacggcggcacgcggcgacttgagaaagcgaaagtgtcgctgaatgactgcctcgcatgcagtggctgcataaccagcgccgaaaccgttctgataactcagcaatcacatgaggagcttaaaaaggtcctggacgcaaataagatggccgcaccgtctcaacaacgcctggtagtggtcagtgtgtcgccccaaagcagagcctcacttgccgcccgcttccaacttaatccaactgacaccgcaagaaaacttaccagcttctttaagaagattggcgttcatttcgtgttcgatacagcgtttagcaggcacttttcgctcttggagagccaacgggagtttgtgcgccggttcagagggcaagccgactgtcgccaagcgctccctctcctggcatcggcttgtcccggatggatctgctacgccgagaagactcacggctcgtttatcttgccacacatctcaactgcacgcagcccgcagcaggtgatgggatcacttgtgaaagactttttcgctcagcaacaacatctcacccccgacaagatataccacgtcaccgtcatgccttgctatgataagaagctggaggccagccgcccagacttctttaatcaggagcaccaaacgcgggatgtcgactgtgtgctgactaccggtgaggtgttccggctgctggaagaggaaggggtctccctgcccgacctcgagcctgccccacttgatagcctgtgtagtggcgccagtgctgaggagcctaccagtcatagaggcggcggcagtggcggctatttagagcatgtgttcaggcacgcagcccgagagctgtttggcatacacgtagctgaagtgacatacaagccactgcggaataaggacttccaggaggtgactctggagaaagaaggtcaggtgctcctgcatttcgcgatggcttatggctttcgaaacatccaaaacctggtccaaagattgaagagaggccgatgtccttaccactacgtagaggtcatggcatgtccaagtggctgcctgaatgggggcggacaattacaagccccggaccgcccaagccgggagttgttgcaacatgtggagcgtctgtatggtatggtacgtgctgaggctcctgaagatgcccctggtgtccaggagctgtacacacactggctgcagggcacagattctgaatgcgctggccggttactccatacacagtaccacgccgtagaaaaggccagcactggactaggaataaggtggtag

SEQ ID NO: 126874 - DNA, 567 bp, synthetic construct
  misc_feature 1..567: note = Description of Artificial Sequence: Synthetic coding sequence
  source 1..567: mol_type = other DNA
atggcttcgcctttcagtggcgcccttcagctgactgaccttgatgactttatcgggcccagccaggagtgcattaagcccgtcaaggtagagaaaagggctggttccggagtggcgaagatacggatagaggatgacggaagttattttcagatcaaccaggatggaggaacacggcgtctggaaaaagccaaagtgagtctcaatgactgcttggcctgctctggctgtattacgtcggccgagaccgtgctcatcacgcagcagtcgcatgaggagctgaagaaggtccttgacgctaacaaggggtgcaccagctctagtacacctccctcacaggggactagcgcctcttggagggcctccgaatctctgtgtggcgattcagaggatagaccaactgccgataggaggtgcccttgttggcccttacccgcacaagcggggagcgccatgcctcgacgtcttacagccgcatcctcaagccctacctcagctccccccgggccccgcagccgatcttgggccccgtggtccagaacctcttcacccagttcaagcacatag

SEQ ID NO: 126875 - DNA, 1125 bp, synthetic construct
  misc_feature 1..1125: note = Description of Artificial Sequence: Synthetic coding sequence
  source 1..1125: mol_type = other DNA
atggcagcgccctctcaacagcgccttgtcgttgtcagcgtgtcgccgcaatcccgcgcgtcactggccgctcgctttcagttgaatccaacagatacagctagaaagcttacatcatttttcaagaaaatcggtgtccatttcgtgttcgataccgcattcagtcgacatttttccttgctcgagagccagcgcgagttcgtcagaagattccgcggccaggcagactgccggcaagcgctgcctctgcttgcgtccgcctgccccgggtggatttgctacgctgagaaaactcacgggagctttatccttccacatatcagcactgccagatctccccagcaggttatgggtagcctagtcaaggattttttcgctcagcagcaacacctgacaccggacaagatatatcacgtgacagtaatgccctgttacgacaaaaaactggaggcctctcgcccggacttttttaatcaagaacaccagacacgggacgtggactgcgtccttacaacaggagaggtctttcgactgctggaagaagaaggagtgtctttgcccgaccttgagccagctcccttagactcactctgttctggggcaagcgctgaagagccaacctctcatcgtggagggggatccggtggatacctggagcacgtgtttaggcacgctgcaagggagttatttggcattcacgtggctgaagtgacatacaagcccttgcggaacaaagactttcaggaggtgaccttggaaaaggagggccaggtcctcctgcatttcgcaatggcctatggcttccgaaacattcagaacctggtccaacgccttaaaaggggcagatgcccataccactatgtggaagtcatggcttgcccgagcggctgcttaaacggcggcgggcaactacaagcacctgacagacccagccgagaactactgcagcacgtcgaacggttatacgggatggttcgcgcagaggcccccgaggacgccccgggagtgcaggaattgtacacacactggttgcagggaaccgacagtgaatgcgccggccggttgctccatacccagtaccatgcagtcgagaaggcatccaccggactgggcatacggtggtag

SEQ ID NO: 126876 - DNA, 4284 bp, synthetic construct
  misc_feature 1..4284: note = Description of Artificial Sequence: Synthetic coding sequence
  source 1..4284: mol_type = other DNA
atgctccttcccagcgacgtagccagactcgttctgggctatctccagcaggagaacctcatctccacttgtcagaccttcattctggaatcaagtgatctgaaagaatacgcagaacactgtaccgacgagggctttatcccagcgtgcctcctttctttatttggaaagaacttaacaactattcttaacgaatacgttgctatgaaaactaaggagacttctaacaacgtacctgcaatcatgtcctccctctggaagaagctcgatcacacattgtcgcagattcggtctatgcagagcagcccccgctttgccggctcccagcgcgcccgtacccgtaccgggattgccgagatcaagcgccagcggaaacttgcatctcagactgccccagcgtccgccgagctactcaccctgccctatctgagtggtcagttcactaccccaccaagcactgggactcaagttacaaggcccagcgggcaaatcagtgatcccagtcgcagctatttcgtggtggttaaccactcacagtctcaggataccgttacaacaggtgaggccctcaacgtgatccctggcgcacaggaaaagaaggcgcacgcctcattaatgagccccgggcgaagaaagagcgagtcacagaggaagagcacaactttgtctggaccgcactcgaccatcaggaatttccaggaccctaacgcgttcgctgtggagaaacagatggtgatcgagaacgcgagagaaaaaattttgtccaacaaatccctgcaggaaaagctcgccgagaatatcaacaaatttctgactagtgacaataacatcgcccaggtgcctaagcaaaccgacaataatccgaccgaacccgaaaccagcatagacgaatttctcgggctgccatcggagatccatatgtccgaggaggctatccaagacatcctagaacagaccgagtccgacccggcattccaggccctgttcgacctctttgattatggcaagacgaagaacaacaagaacatttcccagagtatatcgagccagccaatggagagtaacccgagcatcgttttggccgacgaaacaaatcttgcggtaaaaggcagtttcgagaccgaagaaagtgacgggcagtcaggccagcctgcattctgcacatcataccagaatgatgaccccctcaatgccttaaagaattcaaataaccacgacgtcctacgacaggaagatcaagagaacttctctcagatctctacttctatccagaaaaaggctttcaagacggcggttccaacggagcagaaatgtgatatcgatatcacttttgagtccgtaccaaacctgaatgacttcaaccagagagggaactccaacgcagaatgtaatcctcactgtgctgagctgtacacgaaccagatgtcaacggagacagagatggccatcggtatagaaaagaactctctatccagcaatgtgccctccgagagtcaacttcagcccgaccagccggatatccctataacctcattcgtatctttgggctgtgaggctaataatgagaatttaattctgagcggcaagtcttctcagctgctgagtcaagataccagcctgaccgggaagccttctaagaagtcccagttttgcgaaaatagtaatgataccgtgaagctcaagatcaactttcatggttctaagtcttcggattcgtcagaagtacataaaagcaaaatcgagattaacgtgctggaacccgtgatgagtcagttgtccaactgtcaggataatagttgcctccagtcagagatcttgcctgtgagcgtcgaaagctcccacttgaatgtatctggtcaggtcgagattcacctaggcgatagcctatcctccacaaaacaaccatctaacgatagcgccagtgtcgagctgaaccacaccgagaacgaggcacaggccagtaaaagcgagaattcccaggaacccagttcctccgtcaaagaggagaacactatattcctctcactgggcgggaatgcaaattgtgaaaaagtggcgctcactccacctgagggcactccagttgagaacagtcacagcttgccccccgaaagcgtttgtagctctgtcggcgactcccaccccgagtcacaaaacaccgacgacaaacccagtagtaataacagcgctgagattgacgcatccaacatcgtgagcctgaaggtcattatctcagatgaccctttcgttagttctgataccgaacttacatccgccgtgtcttcgattaacggcgagaacctccctacaattatactgtcctccccaaccaaatcgcccactaaaaacgccgagctagttaaatgcctgtcgtccgaagagacagtcggagctgtggtctacgcggaggtgggcgactcagcttcaatggagcagagcctgctcacattcaaatctgaggatagtgcagtgaacaatacccagaatgaggatgggatcgctttctcggctaatgtaaccccctgtgtctccaaggatggtgggtatatccagctgatgcctgccaccagcacagccttcggcaatagcaacaacatattgatcgccacttgcgtgacggatcctacagccctcgggacatccgtgagtcagtccaacgtagtggttctgcctggcaattccgctcccatgactgctcagccactgccacctcaactgcagacaccgccccggtctaactcggtctttgccgttaatcaggccgtctcgccaaacttttcccagggatcagccatcatcatcgcctctcctgtgcaaccagttctgcaggggatggtcggtatgatcccggtgagcgttgtgggacaaaacgggaacaacttctctacgcctccccggcaagtacttcacatgcccctgacagctcctgtctgcaacagatccatcccccagtttcctgttccacccaaatctcagaaagcccaggggctgaggaataaaccttgtatcggaaaacaggtaaataatctggttgatagcagtggtcacagtgttggctgtcatgcccaaaaaactgaggtgtccgataaatccatcgcgacagatctgggcaaaaaaagcgaggagaccacggttccatttcctgaagagagcatcgtgcctgccgcaaagccatgccacaggcgagtcctatgtttcgactccactacagcaccggtggcgaacactcaggggccaaaccataaaatggtgtctcaaaataaagagcggaatgccgtgtcgtttccgaatctggatagcccaaatgtgtcatcaaccttgaaacccccaagtaacaatgcgatcaagagagagaaagaaaagcctccactccctaaaattctgagcaaatctgagagcgccattagcagacataccacgatacgggaaacccagtccgaaaagaaagtcagtccaaccgaaattgtgctggagtcgtttcacaaggccacagctaataaggaaaatgagctttgctccgacgtggagaggcagaaaaaccccgaaaatagtaagctgagcatcgggcagcagaacggaggactgcggtcagaaaagtccatagcctccctccaggagatgacgaaaaaacagggtaccagcagcaacaataaaaatgtgctgagcgtggggaccgccgtgaaagatctcaagcaagagcagactaaaagtgcatcttccctgattacgacagagatgcttcaggacatacaaagacacagttcagtttcccgcctggccgattcttcggatcttcctgttcccagaacgcctggttccggcgctggagaaaaacataaagaggaacctattgacatcataaaggcacccagtagtaggagattctcagaggactcatctactagcaaagtcatggtgccaccagtgacccctgaccttcccgcttgcagtcctgcctctgaaaccggatctgaaaattccgtgaacatggcggctcacaccctaatgatcctgagccgcgcagccatctcccgaacgacatccgccacgccacttaaagataacacacagcagtttcgggcttcctcgaggtccacaacaaagaagcgcaagattgaggaacttgacgagcgagaacgtaactccagacctagctccaaaaacttaaccaattccagcatcccaatgaaaaaaaaaaaaattaaaaaaaaaaagttgccttctagcttcccagctggcatggatgtggataaattccttttgagtctgcactacgacgagtag

SEQ ID NO: 126877 - DNA, 7284 bp, synthetic construct
  misc_feature 1..7284: note = Description of Artificial Sequence: Synthetic coding sequence
  source 1..7284: mol_type = other DNA
atgcccctaaaaacccggacggccctttcagacgatcctgactccagcacttctacactgggtaacatgctggagctacctggcacatcctcgtcttctaccagccaagaattaccattctgccaaccaaagaagaaaagtacccccctaaagtacgaagtaggcgatttgatttgggccaagtttaagcggcggccctggtggccatgcagaatttgctctgaccccctgataaacacccattctaagatgaaagtaagcaaccgcagaccctacagacagtattatgttgaagctttcggcgatcccagtgaacgggcttgggtggctggcaaagctatcgtaatgttcgaagggaggcaccagttcgaagagctccccgtgctgagaaggcgtggcaagcagaaagaaaaaggatatcggcataaagttcctcagaaaatactaagtaagtgggaagcgagtgtcggccttgctgagcagtacgacgtccccaaaggtagcaagaatcgtaaatgtatccccggcagtataaaacttgactcagaagaagacatgccttttgaagactgtaccaacgatccagagtccgagcacgatctgctgttaaatgggtgtttgaagagcctggcattcgactctgagcactcagctgatgagaaagagaagccctgcgcaaagagcagagccaggaaatcatccgacaatcctaaaagaacatccgtgaagaaagggcacatccagtttgaggctcataaagacgagcggagagggaaaatccccgagaatcttggcttaaattttatttcaggtgacatttctgatacccaagcctccaacgaattatctaggatagcaaactcgcttacggggagtaataccgcccctggcagcttcttatttagtagttgtggaaagaacacggccaagaaagagttcgagacctcaaacggagacagcctcttgggtcttcctgagggagccctgatctccaaatgtagccgggaaaaaaacaagccccagcgctcgctagtgtgcggtagtaaagtcaagctctgttacattggtgctggcgatgaagaaaagagaagcgatagcatcagcatttgtacaacttccgatgacggcagttcagatcttgatcccatcgagcactctagtgaatcggataacagcgtcctcgaaatccccgacgccttcgaccgcaccgaaaatatgctatcaatgcaaaagaacgagaaaataaagtactctcggtttgccgcaactaatacccgtgtgaaagccaagcagaagcctttaatttctaatagccatacagatcatctcatgggctgcacaaagagcgctgaacccggcactgagacttctcaagttaatctttctgacctgaaggcaagcaccttggtccataagccccagtccgatttcaccaatgacgccctcagcccaaagttcaacctcagctcctccatatctagcgagaacagcctgatcaaggggggagctgctaatcaggctttgctgcattccaaatctaagcaacctaaatttaggagcattaagtgcaaacataaagagaacccagtgatggcagaacctcccgtcattaatgaggagtgtagtctcaaatgctgttcaagcgatactaaaggcagccctctagctagcatcagcaagtcgggaaaggtggacggcttgaagctacttaacaatatgcatgaaaagactagagactccagtgatatcgagaccgcggtggttaaacacgtcctgtctgagcttaaggaactgagctaccggagcctgggtgaggatgttagcgactccgggacatctaagcctagtaagcctctgctgtttagctccgcttcttcccagaatcacataccaatcgagcccgattacaaattcagcactctgcttatgatgctcaaggacatgcacgattcaaaaacaaaggaacagagattgatgacagcacagaacctggtatcctaccgcagcccaggacgaggcgactgctccacaaatagcccagtgggcgtgtctaaagtcttagtaagcggcggtagtactcataactctgagaagaagggggatggtacacagaatagtgccaatccatctcctagtgggggagactccgctctgtctggggagctatctgccagcctgcccggacttctgagtgacaaacgggacctgcccgctagcgggaaaagccggtctgactgcgtgaccagaaggaattgcgggagatccaagccaagtagcaaactaagggatgcattcagtgctcagatggttaaaaatacagtaaatagaaaggccctcaagacagagcgcaaaagaaagttgaaccaactgcccagcgttaccttggatgctgtgttgcaaggcgatcgagagcgggggggtagcctgaggggcggtgctgaggatcccagcaaggaggatcctctgcaaataatgggccatcttacctcagaggatggggaccattttagcgatgtgcattttgattctaaagtaaagcagtccgacccaggcaagataagcgagaagggtctgtccttcgagaatgggaaaggaccagagttggacagcgtgatgaactctgaaaatgacgagctgaatggcgtaaatcaagtagtcccgaagaaacggtggcaaagactgaaccagcgcagaactaagcctcgcaaacggatgaacaggtttaaggagaaggagaacagcgagtgtgccttccgcgttttactgccaagcgaccccgtccaggaaggtagggacgaattccccgagcaccgcacaccctccgctagcattctagaggaaccactgaccgagcagaaccacgcagattgcctggatagcgccggaccgagacttaacgtctgtgacaagtcttctgcgtcgattggagacatggagaaggaaccagggattccctccctcactccccaggctgaactgcctgagcccgctgtgaggtctgaaaaaaaaagactgcgaaagccctccaaatggctactcgaatacacagaagaatacgaccagatctttgctccaaagaaaaaacaaaaaaaggtacaggagcaagtgcacaaggtctcgtccagatgcgaggaagagtctttactcgcccgaggtcgctcctctgctcaaaacaagcaggtcgatgagaattcactgattagcacaaaagaagagccacccgttctcgagagggaagctccatttctggagggtcctttagcacaatccgagcttgggggggggcacgcagagttgccccagctgacactctccgtccctgtggcaccagaggtgtctccccgcccagctttagagtccgaggagctacttgtcaagactccaggtaattacgagtctaaacgccaacggaagccaaccaagaagcttctggaatccaacgacttagacccaggtttcatgcccaagaagggagatttagggctgagcaagaaatgctacgaagcagggcatctggagaacggcattaccgaatcttgcgctacatcttactccaaggatttcggaggtggtacaactaagatcttcgacaaaccaaggaagcggaaacggcaaaggcacgcagccgcaaagatgcagtgtaagaaagtcaagaacgacgacagttccaaggaaatccccggatcagagggagagctgatgccacaccgtactgccacctcaccaaaggaaaccgttgaggagggagttgaacacgatccaggtatgccagccagtaaaaagatgcagggagagagaggcgggggagccgccctgaaggagaatgtctgtcagaattgtgagaagttaggcgagttgctactgtgtgaagcgcagtgctgcggcgccttccacctggagtgcctgggcctgactgagatgcctcgcggcaagttcatctgcaacgagtgcaggacaggcattcacacttgttttgtgtgtaaacagtccggcgaggacgtaaaacggtgcctcctgccgctctgtggtaagttctaccatgaagagtgtgtgcagaagtatccccctacagtaatgcagaacaaaggtttccggtgcagcttgcatatttgcattacgtgtcacgctgccaatcctgccaacgtgagtgcttccaaaggcagactgatgagatgtgtccgatgtccagttgcctaccacgccaatgatttctgtctagctgcaggatcgaaaattctggcctccaatagcataatctgccctaaccatttcactccgcggcgaggctgtcgcaatcacgagcatgtcaatgtctcttggtgtttcgtctgtagcgagggtggatccctcttatgttgcgattcttgcccagctgcctttcaccgtgagtgccttaacatcgacatcccagagggaaactggtactgtaacgattgtaaagccgggaagaaaccacactaccgcgagatcgtatgggtaaaggtaggaagatatcggtggtggcctgctgagatctgccaccctcgtgctgtaccttcaaacattgataagatgcgccatgatgtgggcgagtttcctgtacttttcttcggctctaacgactacctttggacccaccaggcaagggttttcccatatatggagggggatgtgtcatccaaggacaagatgggtaagggtgtggacggcacttataagaaagccctgcaggaggcagcggcccggtttgaagagctcaaagctcagaaggagctcagacagttgcaggaagatcgtaagaacgataaaaagcctcctccctataagcatatcaaagttaacagacccatcggtcgcgtgcagatctttacagcagatctcagcgaaattcctaggtgcaactgtaaagccactgatgaaaacccctgtggtattgactcagaatgcatcaaccgcatgctcctctacgagtgccacccgactgtgtgtccagcgggcggcaggtgccagaatcagtgttttagcaagcgacaatatcccgaggtggagattttccgaactcttcagagggggtggggtttgagaacaaagacggatatcaaaaagggcgaattcgttaacgagtatgttggcgagcttatagacgaggaggagtgcagagcccgtattcggtatgcacaggagcatgatattacaaacttttacatgttgacgctggacaaagatcggatcattgacgccggcccaaaaggcaactacgcaaggtttatgaaccactgctgccagcctaactgcgaaacccagaagtggagtgttaacggagatactagagtgggtctgtttgccctgtcagacatcaaggcggggacagagctgacctttaactacaacctggaatgcctgggaaacggaaaaaccgtctgtaagtgtggagccccaaattgtagtggcttcctaggcgtgcgtcctaagaaccaacccattgccacagaggagaaatcaaagaaattcaagaaaaaacagcaaggcaagagacggacccagggcgaaatcaccaaggagcgggaagacgagtgcttctcttgtggagacgccggacagctggtctcctgcaagaaaccaggatgccctaaggtgtatcacgcagactgtctgaacctgacaaaaagacccgctgggaaatgggaatgcccatggcaccagtgtgatatatgcggcaaagaagcagcttctttctgcgagatgtgtccctcttcattctgcaaacagcacagggaaggaatgctcttcatttccaagctggatggccgtctgagctgtacggagcatgacccatgtggtccgaatccgctagaacctggtgaaatacgagaatacgttcccccccctgtccctctgcctccaggaccgagtactcacctggcggaacagagcactggcatggcggctcaagcaccgaaaatgtctgataagcctccagccgacaccaaccaaatgctgtcactcagtaagaaggcccttgctggcacttgtcaacgtcccctgctgccagagagacccctggagagaactgatagcaggcctcagcccttagacaaggtccgagacctcgcgggaagcggaacaaagtctcagtctctggtgtcaagccagcggcccctcgataggcctcccgccgttgctggccctcgcccccagctctccgacaaaccgagccccgttacgtcccctagctcttctccatccgtgcggtctcaaccactggaaagacctctgggcaccgccgatcctcgactggataaatccattggtgccgctagtcccaggccccagtcccttgagaagaccagtgtacccacaggcttacggctccctccacccgaccggctgctgattacttcgtcgccaaagcctcagaccagtgatcgacccaccgacaaaccccacgccagcttgtcgcaacggctgccacccccagaaaaggttttgagcgccgtcgtacaaactctggtcgcaaaagaaaaggcgctgcggcccgtcgaccagaacactcagtcaaaaaatcgcgcagcacttgtgatggatttaatcgatctgactcccagacaaaaggaaagggctgcatcaccacatcaagtgacaccccaggccgacgaaaagatgccagtgctggagagtagctcctggcctgctagcaagggactaggccatatgccccgcgctgtggaaaaggggtgcgtatcggaccctctccagactagcggcaaggccgctgcccctagcgaggacccatggcaggccgtcaaatcactgacccaggcccgtctgttgtcccagccacctgctaaagccttcctgtatgaacccaccacacaggctagtggacgggccagcgcgggagctgaacaaaccccagggcccttgtcgcagagcccaggattggtgaaacaggctaaacagatggttggaggccaacaactccctgcactggcagccaagagcggtcagtccttcaggagtcttggtaaagcccctgcaagcctccctacagaggagaagaagctggtcacaaccgaacaatcaccctgggccctgggcaaggcatccagtagggcaggcttgtggcctatcgtggctggacaaaccttggcacaatcttgttggagcgccgggagcactcaaaccctggcacagacatgttggtccctaggtaggggtcaggaccctaagccagaacaaaacactctccctgcactcaatcaggctcccagctctcacaaatgtgctgagagcgagcaaaagtag

SEQ ID NO: 126878 - DNA, 7284 bp, synthetic construct
  misc_feature 1..7284: note = Description of Artificial Sequence: Synthetic coding sequence
  source 1..7284: mol_type = other DNA
atgcctctgaagacgcggaccgccctgagtgatgatccggattcaagtacatctacgctcggtaacatgttggagcttccgggaacgtcttcttcctctacctcacaggagctgccattttgtcaaccgaaaaagaaatctacacctcttaaatatgaggttggcgatcttatctgggccaaatttaaacggaggccatggtggccctgccgaatatgcagcgatccactgatcaacactcactctaagatgaaggtttcgaaccgaaggccatacaggcagtattacgttgaggccttcggggatccatccgaaagggcttgggtcgccggtaaggccatcgtgatgttcgaggggaggcaccagttcgaagagcttccagtgctaaggaggcgggggaaacaaaaggagaaaggttatagacacaaagtcccccagaagattctgtcaaagtgggaagcttccgtggggctcgccgagcagtacgacgtgccaaaggggagtaaaaataggaagtgcatacctgggagcatcaagttagattccgaagaagacatgcctttcgaggattgcactaatgatccagagtctgagcacgacttgctgctgaatgggtgcttgaagtcactagctttcgattcagaacattcggcagacgaaaaggagaagccctgtgctaagtctagggcccgcaaaagcagtgataacccaaaaaggacctccgtgaagaagggccacatacagttcgaagcgcataaagacgaacggagaggtaagatccccgaaaaccttgggctgaactttatttcaggagatatctcagatactcaggccagtaatgagctctcccgtattgctaacagtttgactggcagcaacacagctcccggttcctttctttttagctcctgcggcaaaaacacagcaaaaaaagaattcgagacatctaatggcgactccctgttgggactacccgaaggggctctgatttctaaatgctccagagaaaagaataagccacagcgcagtttggtgtgcggtagcaaggtcaaactatgctatatcggtgcaggggatgaagagaagagatccgacagtatatccatctgcacaacttccgacgacggctccagtgacctggatcctatcgagcactcctcggagagcgacaattccgtgctcgaaattcccgatgcattcgatcgcaccgagaatatgctttccatgcagaagaatgagaagataaagtattcaaggttcgcagcgactaatactcgcgttaaggctaaacaaaaaccactaatctctaactctcacacagatcacttaatgggttgtacaaagagtgcggagcctggaacagaaaccagccaagttaacctctctgacctcaaggcctcgactctggttcacaagccgcagagcgattttaccaatgacgccctctccccaaaatttaacctctcttcttctatttcaagcgagaacagcttgatcaaaggaggggccgccaatcaggccctgctccattctaagagcaagcaaccaaaatttaggtcaataaaatgtaagcacaaagaaaaccccgtgatggccgaacctccagtgattaacgaagaatgctcactcaaatgctgcagctcagataccaaaggatcgccattggcctctatttctaagtcggggaaggtggacgggctgaagctcctgaataacatgcatgaaaaaaccagggatagttctgacatagagacagcagtcgtcaaacacgtattgagcgagctgaaggaactgtcctacaggtccttaggcgaggatgtcagtgattccggcacttctaaacccagcaagcccctcctgttcagtagcgcgtcatcccaaaatcacatccctattgaaccagactacaaattctccacgctgttaatgatgctgaaagacatgcacgacagcaaaaccaaagagcaacgcctgatgacggcacagaacttggtatcctatagatcaccagggagaggggactgctctaccaactcccctgttggcgtgtctaaggttctggtgtctggagggtccacacacaatagtgagaagaagggggacgggacacagaacagcgctaatcctagccctagcggaggagactcagccctgtcaggagagctgtctgctagcctgcctggtctcttgtccgataaaagagatctccctgcgagcggtaagagtaggagcgattgcgtgacccgacgtaattgcgggcgttcgaagccttcttccaagctcagggacgctttcagcgcccagatggtgaaaaatactgtaaataggaaggccttgaagacggagagaaagagaaagctcaatcaactgccctcagtaacgttggatgcggtgctacagggtgaccgggagcgcggggggtcattgagagggggagccgaggaccctagcaaagaagacccgctccagataatgggccatctcacctccgaggatggcgaccacttctcagatgtacacttcgacagtaaagtgaagcagtcagatcctggcaaaataagcgaaaaaggcctcagctttgagaatgggaaagggccagagctcgactctgtaatgaactccgagaacgatgagctaaatggagtgaatcaggtcgttcccaagaaaagatggcagaggctgaatcagcgaagaactaaacccaggaagaggatgaacagatttaaagagaaggagaacagcgagtgtgcctttagagtgctgcttccttctgatcctgttcaggagggaagagatgagtttccagagcacaggacccctagcgcaagcatcctggaggagcctcttacagagcagaaccatgccgattgcttagactccgcaggcccgcgcctgaatgtgtgtgacaagtcctctgccagtatcggggacatggagaaagaacccgggattccaagcctcacgccgcaggccgagctccctgaacccgccgtgcgaagcgaaaaaaagcgcctacggaagccctcgaagtggctgctggaatacactgaagagtacgatcagatatttgcaccgaaaaagaagcagaagaaggtgcaggagcaagtgcacaaagtctcctcacgatgcgaggaagagtctcttttggctcggggccggtctagtgctcagaataaacaggtggatgaaaattcactcataagtactaaggaagaaccacccgttttggagagggaggccccattcttggagggtccactggcccagtcagaactcggtggtggtcacgcagagctgccacagctcactttgtccgtgccggttgccccagaggtgtctccacgcccagcactggaatctgaggaactgctcgttaaaactccaggcaattatgagtctaagaggcagcgcaagcctaccaagaagttactggaaagcaacgatttggaccctggatttatgccgaaaaaaggagatctggggctttcaaagaagtgttatgaggcgggccacctggagaacggcattacggagagctgtgccacaagttactcaaaagacttcggtggcggaactactaaaattttcgacaagccgcgcaaaagaaagcgccagagacatgccgcggctaagatgcaatgcaagaaggtcaagaatgacgattctagtaaggaaatcccgggatcagagggtgaacttatgccccatcgcactgccaccagtcctaaggagaccgtggaggaaggagtcgaacatgacccaggcatgcccgccagtaagaaaatgcagggcgaacgcggcgggggcgccgcgctgaaggaaaatgtgtgccagaactgcgaaaagcttggggaactgctgctctgtgaagcccagtgctgtggagctttccatctggagtgcctgggactcactgagatgccaaggggcaagtttatatgcaacgagtgccgtactggcattcacacctgtttcgtttgtaaacaatccggtgaagacgtgaagcgctgtctgctccccttgtgtgggaagttttaccacgaggagtgtgtccaaaaatacccccctaccgttatgcagaacaaggggtttcgatgctcgctacatatctgtataacttgtcatgccgctaatccggctaacgttagcgcctccaagggacgtctgatgcgatgtgttaggtgccctgtcgcctatcacgctaacgacttctgtctagccgcagggtctaaaatccttgcctccaacagcattatctgcccaaatcattttacccctaggaggggatgccggaaccacgaacatgtcaacgtgtcatggtgttttgtgtgttcagaggggggatcattactatgctgcgactcttgcccagccgcgttccatagggaatgtctcaacatcgacatacccgaagggaactggtactgtaacgattgcaaggccggcaaaaagcctcattatcgagagatcgtttgggtgaaggtagggcggtacaggtggtggccagccgaaatctgtcacccgcgtgccgtcccgtccaacatcgacaagatgcgccatgatgtcggggaatttccagtcttattttttggcagtaatgattacttatggacacaccaggctagagtgtttccctatatggaaggcgatgtttcatcaaaggataaaatgggcaagggcgttgacggcacctacaagaaggctctgcaagaggccgccgcaaggtttgaggaactgaaggctcagaaggaactgcggcagctacaagaagatcggaagaacgacaagaagcccccaccatataaacacatcaaagttaatagaccgatcgggcgcgtgcagattttcacagcagacctgtccgagatcccccgttgtaactgtaaagctacagatgagaacccatgcggcatcgatagcgaatgtattaacagaatgctcctgtacgagtgtcatccgacagtgtgtcccgcagggggcagatgccaaaatcagtgtttcagtaagaggcagtaccccgaggtggaaattttccggacacttcagcggggctggggtttacgtacaaaaactgacatcaagaaaggagaattcgttaacgagtatgtgggagaactcattgacgaggaggagtgccgtgctaggatccgttacgctcaagagcatgatataaccaatttctatatgctgacactcgataaggataggatcatcgatgcaggacccaaaggcaattacgcccggtttatgaatcattgctgtcagcccaattgcgagacccaaaagtggtccgtaaatggcgatacacgtgtggggctcttcgctctctccgacatcaaggcaggcaccgagctgacttttaattataatctggagtgtttgggcaatgggaaaacggtatgtaaatgtggcgcccctaattgtagtggattcctgggggttaggcccaaaaatcagcccatcgctacagaggagaaaagcaagaagttcaaaaaaaaacagcaggggaaacgcaggactcagggcgaaataaccaaagaacgtgaagacgagtgcttttcctgcggcgatgctggacagctcgtcagctgcaagaagcctggctgcccaaaggtttatcatgccgattgcctgaatctcaccaagagaccggccggcaagtgggaatgcccgtggcatcagtgcgacatttgcggcaaggaagcagcgagtttttgcgagatgtgtccttcctccttttgcaagcagcatcgagagggaatgctgtttataagcaagcttgatggaaggctcagctgcacagagcatgacccctgcgggcctaaccctctcgaacccggagagatcagagagtacgttccaccaccggtccctctacctcccggaccgtccacccatcttgctgaacagtcgacaggaatggcagctcaggcgcccaagatgtccgacaaacctccggccgacaccaaccagatgctgagccttagtaagaaagccctggcgggtacatgtcagagacccctgctgccagagagaccccttgaacggaccgacagccgcccccagccacttgataaagtacgcgacttagccggctccggaaccaagtcacagtccctggtgagcagtcagcgcccgctggaccgcccaccagccgtggcaggaccgcggccccagttatccgacaagccatcacctgttacctcaccctcatcctcaccaagtgtgcgctcacagccgctcgaaaggccactcgggactgccgacccacgtctcgacaaaagtattggcgccgcctcaccaaggcctcagagcttggagaaaaccagcgtgcctactggcctgcgtctcccccctccagatcggctattaatcactagctcacctaaaccccaaacctcggatagaccaacagataagcctcatgcctccctgagccagaggctgccacctcccgagaaggttctcagtgccgtggtacagaccctggtcgccaaggaaaaagccctgcgccccgtggatcaaaatacacagtccaagaaccgcgccgcactggtaatggacctaatcgacttgacccccaggcagaaagagcgggccgcatcccctcaccaagtgacgccgcaagcggacgagaaaatgccagtactggaaagttctagctggcctgcaagcaaagggttaggtcatatgcctagagctgtggaaaagggatgcgtgtccgatccgctccagaccagcggcaaagccgcagccccctccgaggacccatggcaggccgtgaagtctctaactcaggcacggctcctgagccaacctcctgccaaggccttcttatacgagcccacgacccaggctagcggcagagctagtgctggagcggagcaaactccaggacccctctcccagtctcccggtctggtgaagcaggccaagcagatggtcggcggacaacagcttcccgctttagccgccaagtcagggcagtcatttcgctccctgggaaaggcccctgcaagtttgcctacagaggaaaagaaactggtgacgaccgaacaaagcccatgggccctcggaaaggcgagtagtagggctggcctgtggcctattgtggcaggccagaccctggcgcagtcttgttggagtgctggttctacgcagaccttggcccaaacctgctggtctttgggccggggacaggaccccaaaccggagcagaatacgctgccggctctgaaccaggctcccagctcacataaatgtgctgagtcggaacaaaagtag

SEQ ID NO: 126879 - DNA, 1692 bp, synthetic construct
  misc_feature 1..1692: note = Description of Artificial Sequence: Synthetic coding sequence
  source 1..1692: mol_type = other DNA
atgcccctaaaaaccaggaccgcactcagcgatgatcctgacagctctacaagtacactggggaatatgctggaactgcccggcacatcttcctcatcaacaagccaagaactgcctttttgtcagcccaagaaaaaatctacccccctgaagtatgaggtcggcgatctgatttgggctaaattcaagcgtcggccatggtggccgtgtcgcatttgctcagatccactgattaatacccactccaaaatgaaagtttccaatcggcggccttatcggcaatattatgtggaagctttcggcgacccttcagagcgggcatgggtagcggggaaagctatagtgatgtttgagggcagacatcagttcgaggagctccccgtactccggcgtagagggaagcagaaggaaaaaggatacaggcacaaggtgccccagaaaattcttagcaagtgggaggctagtgttggcctggccgaacagtatgatgtccccaagggatctaaaaaccgaaaatgcatccccgggtctattaaactcgatagcgaggaggacatgccattcgaagattgtacaaatgatcccgagtctgagcacgatttgctgctcaatggctgtttgaagtctttagcatttgactctgagcacagtgcagacgaaaaggaaaagccttgcgccaaatccagagctcgcaaatctagcgataatcctaaacggactagcgtgaagaagggccatatccagttcgaggcacataaggacgaacgcaggggaaagatccccgagaacctgggactgaattttatttccggcgatatatcggacacgcaagcgtcaaacgagctctcccgaatagccaatagtcttacaggttctaacaccgctcccggatccttcttgttcagttcgtgcggcaaaaatactgcgaaaaaagagttcgaaacctctaatggagattccctcttagggctcccagagggtgcgcttatttccaagtgctcacgggaaaagaataaaccacagcggtctctggtgtgcggctcaaaggtgaaactctgctatataggcgccggagacgaagagaaacgctctgacagcattagcatttgcactacctcagatgatgggagttccgatctggaccctattgagcacagcagcgaatcagacaacagcgtgttggagatccctgatgctttcgaccggaccgagaatatgcttagtatgcaaaagaatgaaaaaatcaaatactccaggtttgcagccactaatactcgtgttaaggccaagcagaagccactcatctcgaacagccatacagaccatttgatgggttgcacaaaatccgccgagcctggcactgaaaccagccaggtcaacctgagcgatctgaaagcaagcacactggtgcacaagcctcaatcggattttactaacgacgcactctctcccaagttcaatctgagcagttcgatatcatccgagaactccctcataaaggggggcgcggctaaccaagcccttcttcacagcaagtctaagcagccaaagtttaggtctatcaaatgtaagcacaaagaaaaccctgtaatggctgagcccccggtgatcaatgaggaatgctccctgaagtgctgtagcagcgacaccaagggctcaccgctggctagtatctctaaaacaccaccctag

SEQ ID NO: 126880 - DNA, 7782 bp, synthetic construct
  misc_feature 1..7782: note = Description of Artificial Sequence: Synthetic coding sequence
  source 1..7782: mol_type = other DNA
atggaccagacatgtgaattgcctcgccgtaattgcctgctgcctttcagcaaccctgttaatctggatgcacccgaagataaggatagcccatttggcaacggccagtcaaatttctcagaacctctcaacggttgtaccatgcaactgtccaccgtatcaggaacaagtcaaaacgcttatggccaggactccccttcatgctacatccccctgcggagactgcaggacctggcatctatgatcaatgtcgagtacctcaatgggtccgctgacggcagtgagtcttttcaggatcccgaaaagagtgatagccgcgcccagaccccaattgtctgtacttctctgagcccaggcggtccgaccgcccttgcgatgaagcaagagccatcatgtaacaattcacccgagctgcaagttaaagtcaccaagaccattaaaaacggcttccttcactttgagaactttacgtgcgtggacgatgccgacgtggacagcgaaatggaccccgaacagccagtgaccgaagatgaatccattgaggaaatcttcgaagaaacacagaccaatgctacatgcaactatgagaccaagtctgagaatggagtcaaagtggctatggggagtgagcaggactccacacctgagtccagacacggggcagttaaatcgccgtttttaccactggctccacagaccgaaactcagaagaataagcagcgcaacgaagtggatggttccaatgaaaaggccgccctactgcccgccccattctctctcggcgacacaaacatcacgattgaagagcagttaaattccataaatctaagttttcaggatgacccagactcatccacttcgaccctgggcaatatgttggaattgcccgggacatctagctcatccactagccaggaacttcccttcgttcctcaaaaaattctctccaaatgggaggcgtctgtaggcctcgccgagcagtacgacgtcccaaaggggtccaagaaccggaagtgcattcctggctccattaagctggactccgaggaagacatgcccttcgaagactgtacaaacgatccagaaagtgagcacgatctgctcctgaatggatgcctaaaaagtctagcatttgattccgagcattccgcggatgaaaaagagaaaccttgcgccaaatcgagggctcggaagagttccgacaatcctaagaggacttcggtgaagaaaggccatattcagtttgaggcgcacaaggatgaaaggagaggaaagattccggaaaacttaggcctaaacttcattagtggcgacatctccgatacccaggccagcaacgagttatcacgcattgctaactcactcaccggcagcaacactgctccagggtctttcctgttttccagttgtggaaagaatacggctaagaaggagttcgagacctcgaacggtgacagtctgctcggccttcccgagggagccctgatctcaaagtgctctcgagagaagaacaagccccaacgttctctggtgtgtggctccaaggttaagctgtgttacatcggggccggcgatgaagagaagaggtcggattcaatatccatatgcactactagcgatgacgggtccagtgatctcgaccctatcgagcacagcagcgagtccgataattccgtcctcgagatacccgatgcgttcgaccgcactgaaaatatgctgagtatgcagaaaaatgagaaaatcaaatattctagatttgcggctactaatacccgagtgaaggctaaacaaaaaccgctgataagcaatagtcacactgaccatttgatgggatgcactaagtctgccgaaccgggaaccgaaacatcgcaggttaacctgagtgatctcaaagcttcaaccttggtgcacaagccacagagcgatttcacaaacgatgctctgagccctaaatttaacctgtccagcagcatcagctccgagaattcactgattaaaggtggggcagccaaccaggcgctgctccactccaagtctaagcaaccaaaatttcgatctatcaaatgcaaacataaggagaatccagttatggccgagccacctgtgattaatgaggagtgttcacttaaatgctgctcatccgacacgaagggttctcccctggcatccatatcaaagtctggcaaggttgacgggcttaagctgcttaacaacatgcacgaaaaaaccagagacagttccgatattgagaccgctgttgtgaagcacgtgcttagcgaacttaaggagttgtcctataggagcctcggagaggatgtcagcgattcaggaacaagcaaaccttccaaacccctcctgttctccagtgcatcttctcagaatcacattcccatcgaaccagattacaagttctccacactcctgatgatgctgaaagacatgcatgactctaaaaccaaggagcagcggttgatgacggcccaaaatttggtaagctaccgtagccctggcagaggagactgctctaccaactctccggtcggagtgtcaaaagtgctggttagcggtggaagcacgcataattcggagaagaagggcgacgggactcaaaactccgctaaccctagtccttcaggtggagattcggccctgagtggcgagctgtcggcctctctacccggcctgttgtccgacaagagagatctccctgcctcagggaaatcccggtccgactgtgttacccgacggaattgcggaaggtctaagccatccagcaagcttagagatgcctttagcgcacagatggtcaagaacaccgtcaacaggaaggccttaaagacagagaggaaaaggaagctgaatcagctcccctccgtgaccctcgatgctgttctacaaggggaccgagagcgaggtggcagcctgcgcggcggtgctgaagatccctcaaaagaggatcctttgcagataatgggacatcttacctccgaggacggtgaccacttcagcgacgtgcacttcgactccaaggtcaagcagtctgatccaggcaagatttccgaaaaaggcctgtccttcgagaatggcaaagggcctgagctggactccgtgatgaacagcgagaacgacgagctgaacggagttaaccaggtcgttcctaagaaaaggtggcaacgactgaaccagcggcgtacgaaaccccggaagagaatgaaccggtttaaggaaaaagagaattcagagtgcgcatttcgtgtgctgctcccttctgaccctgtgcaggaaggtcgagacgagtttcccgagcatcggacgccttcagcctccatactggaggaacctcttacagagcagaaccacgcggattgcctcgactccgccgggcccagattaaacgtgtgtgataaatcctccgcaagtatcggagatatggagaaggaacctggcataccgagcctcaccccgcaggccgaactccccgagcctgcagtgcgaagcgagaaaaagaggctgaggaagccaagcaagtggttgctggagtacaccgaggaatatgaccagattttcgcgccgaagaaaaagcaaaagaaggtgcaggaacaggtgcataaggtatccagcaggtgcgaggaagagtctctgttagcgagaggacgaagcagcgcgcagaataaacaggttgatgaaaactcccttatctctacgaaggaggagcctccagtcctggaacgcgaagctccttttcttgaggggccactcgcccagtctgagctgggcggcgggcatgccgaactgcctcagctaaccctgagtgtgcccgttgcacccgaggtgtccccacgtccagccctcgaatctgaggagctactggtgaaaacacctggcaactacgaatccaagcgacagaggaagccaacgaagaaactgctagagagcaatgatctcgatcccggatttatgcccaagaaaggcgacctaggtttgagcaaaaagtgctacgaggccggccacctagaaaacggtattactgagtcttgcgccacaagttattcaaaagattttggaggaggcactacaaaaattttcgataagccacggaagagaaaacggcagagacatgccgccgcgaaaatgcagtgcaagaaggtgaagaatgatgatagttccaaggaaataccgggcagcgaaggcgaactgatgccacacaggactgcgacttctccaaaagagacagtggaggaaggtgtggagcacgatccaggaatgccagccagtaagaagatgcaaggagagagaggaggaggtgcagccttgaaggaaaatgtgtgccagaattgcgaaaaattaggcgagctgctgctgtgtgaagctcaatgctgtggcgctttccatctcgagtgcttgggcctgactgagatgcctagaggtaagtttatatgtaatgagtgccgcacaggaatacacacttgctttgtttgcaagcaatccggggaggatgtcaagagatgcctgctgcctctctgtggaaagttctatcacgaggagtgcgtccagaagtacccaccaaccgtgatgcaaaataaaggatttagatgcagcctgcacatatgcattacctgccacgctgccaatccagcgaacgtctccgcctcaaagggccggttaatgaggtgtgtccgttgccctgttgcctaccacgccaatgacttctgcctggccgccggttctaaaatactggcttcaaattccattatctgtcccaatcactttacaccccgcagaggctgccggaatcacgagcacgtcaacgtgtcatggtgtttcgtgtgcagcgagggaggctcgctgctgtgttgtgacagttgtccagcagccttccacagagagtgcctgaacatcgacatccccgaaggaaactggtactgtaatgactgtaaagcgggaaagaagccacattatcgggagatagtgtgggtgaaagtcggacggtaccgttggtggccagctgaaatctgtcaccccagggcagtgccgtccaacatagacaagatgcggcatgacgtgggagaattccctgttctcttttttggcagcaacgactacctttggacccatcaggctcgcgtgttcccctacatggagggggacgtgtctagcaaagataagatgggaaagggagtcgacggaacctataagaaagcccttcaagaggccgccgcgagattcgaggagttaaaggcacagaaagagctgaggcagctccaggaagatcggaaaaacgataagaaaccccctccatataagcacattaaggtgaacagacccatcggccgagtgcagatatttaccgccgatttgagcgaaattcccaggtgtaattgtaaggctaccgatgagaatccctgcggcatcgatagtgagtgtataaatagaatgctgttgtacgagtgtcatcctactgtgtgccccgctggcggccgatgtcagaaccagtgtttttccaaaaggcagtatcctgaagtagagatcttccggacactccagcgaggttggggcctacgcactaagacggacatcaaaaaaggtgaattcgtaaatgagtacgttggggaactgattgatgaagaagaatgtagagctaggattagatatgcacaagaacatgacataactaatttttacatgctgacacttgacaaggatagaatcattgatgccggcccgaagggcaactacgcacgctttatgaaccactgctgtcagccaaattgtgaaacacagaagtggtcagtcaacggcgatactagggtggggttatttgccctgtccgacattaaggccggcacagagcttacctttaattacaatctagagtgcctcggcaacgggaagacagtatgcaagtgcggcgctccaaattgcagcggcttcctgggagtacgccccaagaaccagcccattgccactgaggagaaatccaagaaatttaaaaaaaagcagcagggtaagcggaggacacagggcgaaattacaaaagaacgcgaggatgaatgcttttcatgcggtgacgcggggcaattagtgtcgtgcaaaaagcctgggtgcccgaaggtttatcacgctgactgtctgaacctaaccaaaaggcctgccggcaaatgggaatgcccctggcatcagtgtgatatctgtggaaaggaagcagcctccttctgtgagatgtgtccgagctccttttgcaagcagcaccgggaggggatgctttttattagcaaactggatgggcggctgagctgcaccgaacacgacccatgtggccccaatcccttagagcctggcgagattagagaatacgtcccgcctcccgttcccttgcctcccgggccatctacccatctggcagaacaatccacagggatggcggcacaggcccctaagatgtccgataagccgccggctgatacgaaccagatgctcagcttgtcaaagaaggccctggccggcacatgccagcggcccttgctgccagagcggcccctcgaaagaaccgattcaagaccccaaccactagataaggtgagggatctagccggctcaggcacaaagagccagtccttagtgtcatctcaacggcctcttgatagaccaccggcagtagctggaccccggccacagctgagtgacaaaccctcacccgttacctctccatcttcttctccttccgttcggagtcagcccttagagcgaccattggggaccgccgacccccgattggacaaatccattggagctgcatcccccaggccacagtcgctcgagaaaaccagtgtcccaaccggcctgagactacctccgccagaccggttgctcattacctcttccccaaagcctcagactagcgacaggcctaccgataaacctcacgcatcactgtcacagagactgccaccacccgagaaagtgctttcagcagtggtgcagacgctcgttgccaaggaaaaagcactcagaccagtggaccaaaatacccagagcaaaaaccgcgctgccctggtgatggatctgattgatctcacaccaaggcaaaaggagcgtgccgctagcccccaccaagttactccccaggccgatgagaaaatgccagttctggagtcctcttcctggccagctagcaagggtctgggccacatgccgagggcagttgagaagggatgtgtgtccgacccccttcagacctctgggaaggcggcagctcctagtgaggacccctggcaagccgtcaagtctttgacccaggcccgccttctctctcagcctcctgccaaggccttcttgtacgaacctactacacaggctagtgggcgcgcaagcgcaggcgccgagcagaccccaggacccctgagccagtccccggggttggtcaaacaagctaaacaaatggtgggcggacagcagcttcctgcactggcggccaagtccggccaatccttcaggagccttggcaaggcccctgccagcttgcccaccgaagagaaaaagctggtgacgactgagcagtctccctgggccctcggtaaagccagttcccgagcaggactgtggcctatagtggccgggcagacccttgcccagagctgctggagcgctggatcaactcagacactcgcccagacctgttggtcgttggggcggggtcaggatcccaagccagaacagaacactcttccagccctgaaccaggcaccctccagtcataaatgtgccgagtcagaacagaaatag

SEQ ID NO: 126881 - DNA, 8091 bp, synthetic construct
  misc_feature 1..8091: note = Description of Artificial Sequence: Synthetic coding sequence
  source 1..8091: mol_type = other DNA
atggaccaaacttgtgagcttcctaggcgtaactgcttgctcccgttctctaatcccgttaatctggacgcccccgaggataaggactcgcccttcgggaatggccaatcaaacttctccgagcctctgaacggctgtactatgcagcttagtaccgtgtcagggacttcccagaatgcctacggacaggattcaccgtcctgttacattccattacggcgattacaagatctcgcatccatgatcaacgtggaatatctcaacgggagtgcagacggatccgaaagcttccaggaccctgagaagtctgattccagagctcagactccaatcgtatgtacttctttgagccctggcggacctaccgctctcgcgatgaaacaggagccgtcctgcaataatagtcccgagttgcaggtcaaggtcaccaagactataaaaaacggattcctgcactttgaaaacttcacatgtgtcgatgacgcagatgtggacagtgaaatggacccagagcaaccggtcacagaggacgagagcattgaagagatctttgaagagacccagacaaatgccacgtgtaattatgaaaccaagtctgagaatggagttaaggtggcaatgggctctgagcaagatagcacaccggagagtaggcacggcgcagttaagtccccattcctcccgttggctcctcagacagaaacacagaagaataaacagagaaatgaagtggacgggtcaaacgaaaaggcagcccttctgccagccccatttagccttggagacactaacataaccattgaggaacagctgaactctatcaatctgtcatttcaagatgaccccgacagctccacatccacattaggaaacatgctcgaactcccaggcactagctcctcctccaccagccaggagctgcctttttgccagcccaaaaagaagtcaacccccctgaagtatgaggtgggggatcttatctgggctaaattcaaacgtcgaccttggtggccatgccgaatttgtagcgatcccttgattaacacacactcaaagatgaaggtgagcaaccgcagaccttacagacaatactacgtggaggccttcggtgatccctctgagagggcctgggtggcggggaaagccattgttatgttcgagggtaggcaccagttcgaggaactgcctgttctgagacgtaggggcaaacaaaaggagaagggttatcgacataaggttccccagaagattctaagtaagtgggaagctagcgtcggtctcgctgagcagtacgatgtgcccaaggggtctaagaatcgaaagtgtatccctggatcgattaaactggatagcgaagaggatatgcccttcgaggattgcactaacgatcccgagagtgaacatgatttactgctgaacggctgcctaaaaagcctcgcatttgattccgagcactccgctgacgagaaagagaaaccatgcgcgaagtctcgcgcccggaagtccagtgacaatccaaagaggaccagtgtgaaaaaggggcatatccagttcgaggcccataaggatgagcgtagaggcaagattccagaaaatctcggactgaacttcatctccggggatatctctgacacacaggctagcaatgaactgtctaggatcgccaacagtcttactggaagcaacacagcacccggcagctttctgtttagctcatgtggtaaaaataccgctaagaaggaatttgaaacaagtaatggagatagtttgctcggcctcccagagggcgcgctaatcagtaaatgctcccgagagaagaataaacctcagagaagtctggtgtgtggctccaaggtaaagctgtgctacattggcgccggcgacgaggagaagcgctctgacagcatctcaatctgtacaaccagcgacgacggatcatcagacttggatcctattgaacattcttctgagagcgacaattcagtgctggagatccccgatgcctttgaccgaactgaaaatatgttaagtatgcagaagaacgagaagatcaagtacagccggttcgctgccaccaataccagggtgaaggccaaacagaagccactcatatcaaacagccacacagaccacctgatggggtgtactaagagcgccgagccaggaacagaaacttcacaggtgaatcttagtgacctgaaagcgagtactttagtgcataagccacagagtgactttacaaacgacgccctatctcctaaatttaacttaagctctagcatcagctcagaaaattcgcttatcaagggtggggctgccaatcaagccctgctgcactcaaaatccaagcagccaaaatttaggtccatcaaatgtaaacacaaagagaatcccgtgatggctgaaccgccagtgatcaatgaggagtgttccctgaagtgctgctcttcagacactaaagggtccccgttggcctccatttccaaaagtgggaaggtagatgggctgaagctgttgaataatatgcatgagaagacccgtgacagcagtgacatcgagacggctgtagtcaagcacgtgctgagtgagctgaaggaattgtcttacagaagtctgggcgaagatgtgtcagacagcggaacatcgaagccctccaagccgctgttgttctctagtgcctcgagtcagaaccacatacctattgagcccgactacaagttttcaactcttttgatgatgcttaaggacatgcacgattctaagacaaaggagcagcggctgatgacagcacagaacttggtgagctataggtctccaggcaggggcgactgcagtacaaactccccggtgggagtgtccaaagtgctggtgagcggtggctctacccataatagcgagaaaaagggtgacgggactcagaactcggccaatccttcaccaagcggtggggattcggctctttccggggaactgagcgcatctctccccggcctgctaagcgataagcgcgacctccccgccagtgggaaaagcagatcagactgtgttaccagacgcaactgtggaagatccaaaccctcaagcaagctgcgcgatgcttttagcgcccagatggttaagaacactgtcaacaggaaggcgctgaagaccgaacgcaagaggaagctgaatcaactcccctcagtgacacttgacgccgtgctccagggcgacagagagcgaggcgggtctctgcgcgggggggccgaagatccttcaaaggaagaccccctgcagattatgggacacctgacctcggaagatggcgaccattttagtgacgtgcattttgatagcaaggtgaagcagtctgacccggggaagatcagcgaaaaggggctctctttcgaaaatggaaagggtcccgaacttgatagtgtcatgaacagcgagaacgatgagctgaacggtgtgaaccaggtggttccaaaaaagcgctggcagcggctcaatcagcgccgaactaagccccgaaaaagaatgaacagatttaaggaaaaggagaactctgaatgcgctttcagagtactcctgccttcagacccggtccaggagggacgagatgagttcccggagcataggaccccatccgcgagtatcctcgaagagccccttactgaacagaaccatgctgactgcttagacagtgctgggccccgtcttaacgtctgcgataaaagctctgcttcaataggtgacatggagaaagagcccggtatcccgtccctgacaccccaagctgaactgcccgaacctgcggtgaggtccgagaagaagcgccttcggaagcctagcaagtggcttcttgagtacacagaagaatacgatcagattttcgctcctaaaaagaaacaaaaaaaagtccaggaacaggtgcacaaagtttccagccggtgcgaagaggagagcctgctcgcacgtggacggtccagcgcacagaacaaacaggtggacgagaattccctgataagtactaaggaagagcctcccgtgctggaacgagaggctcctttccttgaaggacctcttgctcagtcagaacttggcggaggccacgctgagctgccccagcttacccttagtgtgccagtggcacccgaggtgagcccaaggcctgccctcgaatccgaagagctactggtaaagactcccggtaactacgaatcaaagaggcagcgtaagcccactaaaaagttgctggagtccaatgacttagacccaggattcatgcccaaaaagggagacctgggattgtctaagaaatgctacgaggctggccatcttgagaatggcattacagaatcctgtgcaacatcatatagcaaagactttgggggagggacgacaaaaatctttgataagcctcggaagaggaagcgtcagcgccacgccgcggctaagatgcaatgcaaaaaagtgaagaatgatgacagttctaaagaaatccccggatctgaaggcgaattgatgcctcatcggaccgccacctcgccaaaggagacagtggaggagggggtcgaacatgaccctggtatgcccgcctcaaagaaaatgcagggcgaacgcggcggaggagctgctctgaaggagaacgtctgccagaactgtgagaagctaggggaattactcctttgcgaggcccagtgttgtggcgcgtttcacttggaatgcttgggtctgaccgagatgccacggggcaaatttatctgtaacgagtgccgcacggggatacacacctgctttgtttgcaagcagtctggcgaagacgtgaagaggtgcctgctgcctctgtgtggtaagttttaccacgaagagtgtgtgcagaaatacccccccactgtcatgcagaacaaaggcttccgctgctcactgcacatatgcatcacgtgtcatgctgccaaccccgctaatgtgtcagccagtaaaggtcgactgatgaggtgcgttcggtgccccgtagcctaccatgccaatgacttctgccttgctgcaggctctaaaatcttggcaagtaattcgattatctgtcctaaccacttcactcctaggcgcggatgcagaaaccacgagcatgttaacgtctcatggtgctttgtgtgttcggaaggtggctctctcctgtgttgcgattcctgtcctgcagcgttccatcgagagtgcctcaacatcgacatcccggagggtaactggtattgcaacgattgcaaagcaggtaaaaagccacattaccgggaaatagtttgggtgaaggttggtagatatagatggtggcccgcagaaatctgtcatccacgcgccgttccctcaaatattgacaaaatgcgccacgacgtgggcgagttcccagtgctgttctttggtagcaacgactatttgtggactcatcaggcccgggtcttcccttacatggagggagatgtgtcaagcaaggacaaaatgggcaagggagtcgacggtacgtacaagaaggctcttcaggaggcagctgcacgtttcgaggagctaaaagcacagaaggagctgcggcaattacaggaggacagaaaaaatgacaaaaaaccgccgccttataagcacattaaagtgaaccgcccgatcggacgcgtgcagattttcacagccgatctgtcagagatccccaggtgcaattgtaaggccacggacgaaaatccctgcggcatcgatagcgaatgtatcaatagaatgctcctgtacgaatgccaccccacagtgtgccctgcaggcgggcgctgtcagaatcaatgcttctctaagaggcagtatccagaagtggagatcttccgtaccctgcaacggggttgggggttgcgaaccaaaacggatattaagaagggtgagtttgtgaacgaatacgtcggagagcttatagacgaagaagaatgccgggcaagaattagatatgctcaggagcacgatattactaatttttacatgctgacgctagacaaggatcgcatcatcgatgcagggccaaaaggcaactacgcacgcttcatgaatcactgttgtcaaccgaattgcgaaacacagaagtggagtgtcaacggcgatacacgggtaggactctttgctctgtctgatattaaagcagggactgaattaacctttaattacaacctggaatgcctcgggaacggaaaaaccgtgtgcaaatgcggggcacccaactgcagtgggttcctcggcgtaagacccaaaaaccagcccattgcgaccgaggagaagagcaaaaagtttaagaagaaacagcaggggaagaggaggacccagggagaaattacgaaggagcgagaagacgaatgtttttcttgcggggacgccgggcagttggtgtcttgtaaaaaacctgggtgtcctaaagtgtaccacgcagattgtttgaatctcaccaaacgccctgccggaaaatgggaatgtccatggcatcagtgcgacatctgcggtaaggaggcggctagtttctgcgagatgtgcccatcatctttttgtaaacagcaccgggaggggatgctgttcatttcaaagcttgatggaaggctctcctgtacagaacatgatccctgtgggccaaacccgctggagcctggggagatccgggagtacgttccccctcctgtccccctgcctccaggacccagtacgcatctcgctgagcagtcaacaggtatggccgcccaagcgcccaagatgtcagacaagcccccagctgacaccaatcaaatgctgagccttagcaaaaaggccctagcaggaacttgtcagcgcccactgcttccagagaggccgcttgagagaactgactcccgaccacagccactggacaaagtgagggatcttgcaggcagcggtacaaagtcccaatcccttgtgtcctcccagcggcctctggataggccacccgcagtggcggggcctagaccccaactctccgacaagcctagtcctgtgacgagtccatctagttcacctagcgtcagatcacaacctttagaacgaccccttggcacagccgatcctagactagacaagtccattggcgctgcttcaccacgtccccagagtctggagaagacctctgtgccgactgggctcagactacctccgccggatcgcctcttgattacgtcttcacccaagccacagacatctgacaggccaaccgataagcctcatgcctctctcagccagcggttgcctccaccagagaaggtactgtctgctgtagtccagacactggtggctaaggaaaaggccttacggccagttgatcagaacactcagtcaaagaacagagcggcccttgtgatggacctgatcgatctgacaccacgccaaaaagaaagggccgcctccccccaccaggtgacgccccaggccgacgaaaagatgcctgtgctagagagtagctcctggccggcatccaaaggactaggacatatgcctagggctgtcgagaaaggttgcgtgtccgacccgcttcagacttctgggaaagccgcagccccgagcgaggacccctggcaagccgtcaagtctctgacccaagcccggcttctatcacaaccccccgcgaaagccttcctctacgaaccgactacgcaagcaagtgggcgggcgagcgcaggagccgagcaaacacctggccccctttcacagtcaccagggctagtcaagcaggctaagcagatggtcggaggtcagcagctgccggccctcgccgctaagtccggtcagtcgtttaggagtctgggaaaagccccagcctccctgccaactgaggagaagaagctggtcaccacagaacagtccccttgggctctggggaaggcctccagtcgggctggtctttggcctattgtcgcaggtcagaccctggctcagtcttgttggtcggcgggctccacgcagactcttgctcagacctgttggagcctgggaaggggacaagaccccaagcctgagcagaatactctccctgcattgaatcaggctcccagttctcacaaatgtgcagaatctgaacaaaaatag

SEQ ID NO: 126882 - DNA, 468 bp, synthetic construct
  misc_feature 1..468: note = Description of Artificial Sequence: Synthetic coding sequence
  source 1..468: mol_type = other DNA
atgcccctcaaaacccggactgctctgagcgatgatcctgattctagcacttccaccctaggtaatatgctggagcttcccggcacctccagcagttctacgtcccaggagctgccattttgccaaccgaaaaagaagagcacgcctttaaaatacgaggttggagacctgatatgggctaagttcaagaggcggccctggtggccttgccgaatctgttctgatcctcttatcaatacccacagtaagatgaaggtcagtaaccgccgaccttacagacaatattatgttgaagccttcggagatccctctgaaagggcatgggtggcgggaaaagcaattgtaatgttcgaggggcgtcaccagttcgaagagctacctgtgcttcgaagacgcgggaagcagaaggagaaaggctatcgccataaagtaccacagaagattttaagtaagtgggaagcctcatag

SEQ ID NO: 126883 - DNA, 375 bp, synthetic construct
  misc_feature 1..375: note = Description of Artificial Sequence: Synthetic coding sequence
  source 1..375: mol_type = other DNA
atgccactcaagacacgaacagctttgtccgatgatccggatagttccacatccactctcggtaacatgctcgaactgccggggacatctagcagttccacctctcaggaacttcctttctgccagcccaagaaaaaaagtactcccctcaagtatgaagtgggcgacctgatttgggctaagttcaagcggcggccttggtggccttgtcgaatttgctcggacccgctgattaatacacacagcaagatgaaggtgtctaatagacgaccttaccgccagtattacgtcgaagcattcggggatcccagcgaaagagcatgggtggctggcaaggctatcgtcatgttcgagggtagacatcagttcgaatag

SEQ ID NO: 126884 - DNA, 4200 bp, synthetic construct
  misc_feature 1..4200: note = Description of Artificial Sequence: Synthetic coding sequence
  source 1..4200: mol_type = other DNA
atgtccggtctgggggactcttccagtgacccagctaaccctgattctcataagcggaaggggtccccttgtgatactctggcttcctcaactgagaagcgccgcagagagcaggaaaataagtacttagaagagcttgctgagctgctgtcggcaaacatctccgacatcgatagcctgtcagtgaaaccagataagtgcaagatacttaaaaagacagtggaccaaatccaactcatgaaaaggatggagcaggagaagtccaccactgacgatgatgttcagaaatcagacatctccagctccagccagggagttatcgagaaggagtcactgggtcctttgcttttggaagcgctcgacggcttcttcttcgtcgtgaattgcgaaggacgaatcgtattcgtgagcgagaatgttaccagctaccttgggtataatcaggaagaactgatgaacacctccgtgtattccatcctgcacgtaggggatcatgccgaatttgttaagaacctcctgcccaaaagcctggtgaatggggttccatggccccaggaggccactcgacggaacagccacaccttcaattgtcggatgcttatccatccccccgatgagcccggaacggagaaccaggaggcctgccaaagatatgaagtcatgcagtgctttaccgtttctcagcccaagagcattcaggaggatggcgaggactttcaatcttgcctgatctgtatcgcccgcagactacctagaccaccagccattactggcgtcgagagcttcatgacaaaacaggatacaacgggaaaaatcatatccatcgacacatcttcgctcagggccgccggtagaaccggttgggaggatctagtgcgcaaatgtatttatgcgtttttccaaccccaggggagagaaccgagctacgccaggcagctgttccaggaagttatgacgagaggaacagcctctagcccttcttacaggttcattttgaacgacggcactatgctttctgcacacacaaagtgcaagttatgctatcctcagtcgcccgacatgcaaccatttatcatgggaatccatatcattgatcgagaacatagcgggctatctccacaagacgacactaacagcggcatgtctatcccaagggtgaatcctagcgtgaacccatccatttcccctgcacacggagtcgcaagaagttctacactcccacccagcaattctaatatggtcagcacccgcattaatagacaacagagtagtgatctccacagtagctcacactctaatagctccaattcccagggcagttttggctgcagccctgggagccagatcgtggccaacgtagccctgaatcaaggacaggcgagtagccagtccagcaaccccagcttgaacctcaataactctccaatggaaggaacaggcatctctctcgcgcagttcatgagcccacgccggcaggtgacctcaggcttagcaacacgcccaagaatgcccaacaattcctttcccccaaatatctcgacattgagttctccagtcggtatgacaagtagtgcctgcaacaacaacaatcgaagctactctaacattcccgtaacgtcactgcaggggatgaacgagggaccaaacaactctgtcggctttagcgctagtagtcctgttctgcggcagatgtcctcgcaaaatagcccgtcaagactcaacatacagccggcaaaggctgaatcaaaagacaacaaggagattgcttcaatactcaatgagatgatccagagtgataacagttcttcagacggcaaaccactcgacagcggcctgctgcacaataacgacaggttgtccgatggagacagcaagtattcacagacaagccacaagctggtgcagctcctcaccaccacagcagaacagcagctcagacatgcggatattgacacatcatgcaaggacgtactctcctgcaccggaacctctaactccgctagtgccaacagctctggggggtcatgcccctcaagccatagtagcctgaccgaacggcataagattctccaccggttactccaggagggatccccatctgatataaccactctgagcgtggagcccgacaagaaggatagcgccagcacctcagtttccgtcacgggacaggtgcaagggaattcgagcataaaacttgaattagacgcatcaaaaaagaaagaatcaaaggaccaccagctcctgcgctacctgttggacaaggatgaaaaagatctcaggagcaccccgaatctgtcattggacgatgtcaaagtgaaagtcgaaaagaaagagcagatggatccctgtaacacaaaccctacgcccatgacaaagcctaccccggaggaaattaaactggaagcccaaagccagtttaccgctgacctggatcagtttgatcagcttttgcctacactagagaaggcggcacagctccccggcctgtgtgaaactgatagaatggacggcgccgtgacaagtgtcaccattaaatctgagatcctgcctgccagtctgcagagtgccactgccaggccaaccagtagattaaacagactgccagaattagagctcgaagctatcgataatcagttcggccaacctgggacaggcgaccagatcccttggacgaacaacacagtgactgcaataaatcagtcaaagtctgaggatcaatgcatctctagtcagctggacgaactattatgcccgcctaccaccgtggaggggcggaacgatgaaaaagccttgctggaacaactcgttagctttcttagcggcaaagatgagaccgagctggccgagttggatagggcgctcggtatcgacaaacttgttcaaggcggaggattagatgtactgtccgagagatttcctcctcagcaggcaactccacctcttataatggaagagcgcccgaacctgtacagccaaccttactccagtccatctcccactgctaacttgccatcaccttttcaggggatggtgcgacagaaaccttcccttggaactatgccagtgcaggtaacaccgcctcggggagcctttagccctggcatggggatgcagccgagacagacacttaatcggccccctgctgcgcctaatcagttacggctgcaacttcagcaaaggttacaggggcagcagcagctcattcaccagaacaggcaagctattctgaaccagttcgcggccaccgcccccgtgggaatcaatatgagatccgggatgcagcagcaaattaccccccagccacccctaaacgcccaaatgctcgcacaacgccaacgagagctctacagtcagcagcatagacaaaggcaactcatccagcagcagagggccatgctcatgcggcagcaaagcttcggtaataacttgcccccatcttcgggcctaccggtccaaatgggaaatccacgtctcccacagggagcaccgcagcagtttccctatccccccaactacgggaccaatcccggcaccccccccgcaagcacatctccatttagtcagctcgccgctaaccccgaggcgtctcttgccaatcgcaattctatggtgtcacgcggcatgactggtaatatcggtggacagtttggcacgggaatcaacccacagatgcagcagaacgtgttccagtaccccggtgcgggcatggtgccccagggcgaagcaaatttcgcccctagtttgtccccagggtccagcatggtccctatgccgattcctccgccgcaatcttcccttttacagcaaacacctccagcttctgggtaccagagcccagatatgaaggcatggcagcagggagccatcggcaacaataatgtgttctcccaggccgtgcagaatcagcccacgccagcccagcctggagtgtataacaacatgagcatcaccgtgagtatggcaggtggaaatacaaacgtgcagaacatgaatcccatgatggctcagatgcagatgtctagccttcaaatgcctggcatgaatactgtttgtcctgaacagattaatgatcccgcactgcggcacacaggactgtactgcaatcagctgagcagcactgacctgcttaaaacggaggcagatggtacacaagataagaaaacggaggagttctttagcgtcgttactaccgattag

SEQ ID NO: 126885 - DNA, 4326 bp, synthetic construct
  misc_feature 1..4326: note = Description of Artificial Sequence: Synthetic coding sequence
  source 1..4326: mol_type = other DNA
atgtcgggattaggtgatagctcgtccgatccagcaaacccggactctcacaagcgtaagggatcgccctgcgacacccttgccagcagcactgagaaacgtagacgggaacaagagaacaaatacttggaggagctggcagagttgcttagcgctaacatttccgacatagattccctaagcgtgaagcctgacaagtgcaagattcttaaaaagaccgtggaccagatccagctgatgaagaggatggagcaggagaagagtacgactgacgacgatgttcagaagtccgacatctcatcctccagtcagggcgtgatcgagaaagagtctctgggaccactgctgcttgaagctctcgacggcttcttcttcgttgtgaattgtgagggcaggatcgtgttcgtatccgaaaacgtgacgagttatctcggatataaccaggaggaactgatgaacactagtgtgtacagtatcctacacgtcggagaccacgctgaattcgtaaagaatctcctgccaaaaagtctggtaaacggagtcccatggccacaggaagccactagacgaaatagccacacattcaattgtagaatgctcatccatcccccagacgagccaggtaccgaaaatcaggaggcatgtcaacgctatgaggtgatgcagtgtttcaccgtttcacaacctaagtctattcaggaggacggtgaggacttccaaagctgtctgatttgcatagctcgacgactcccccggccccctgcgatcaccggtgtggagtcctttatgacaaagcaagacactacaggaaaaattatatcaatagacacttcgagcttgagggccgctggaaggaccgggtgggaggatctggtccggaaatgtatatacgctttttttcagcctcaagggcgggagccttcctatgcaagacagctgttccaggaggtgatgactcggggtacagcctcttcgccttcgtataggttcatcctgaatgacggcacaatgctcagcgcccataccaagtgcaagctgtgctatccgcagtcgccagacatgcagccatttataatgggaatacatattattgaccgtgaacactccggcctatctccccaagacgacacaaatagcgggatgtcaatccctcgcgtgaacccctctgttaatccatcaatcagtcccgcccatggagtggctagatcctcaaccctaccacctagcaatagtaatatggtatcgactcgcattaacaggcaacagagcagcgaccttcattcttccagtcactccaacagttctaactcgcagggctccttcgggtgtagtcccgggtcacagatcgttgcaaatgttgccttgaaccaggggcaagcctcctcacagagttctaacccaagtctaaatctaaataactctcctatggagggaacaggcatcagcctggcccagttcatgagtccacggcggcaagtaacgagcggccttgctaccagaccgcgaatgcctaacaacagcttcccacctaatatttctacactgagcagccctgttggtatgacttcatctgcatgcaacaataataatagaagttacagcaatatcccggtgacctctctccaaggtatgaatgaaggccccaacaactccgtaggattcagtgcttcctccccagtcctgaggcagatgagcagtcagaactctccaagcaggctgaacatccaacctgccaaagcagaatcaaaagataacaaggagatcgccagtatcctgaatgaaatgatccagtctgataactctagtagtgacggcaagcctctggattcgggcttattgcataataacgaccgcctctctgatggagacagcaagtattcccagactagtcacaagctcgtacagctgttgactaccacggccgagcaacaactaaggcatgctgacattgacacatcatgtaaggatgtactttcttgcactggcacgtcaaattctgcctcagccaattcttctggagggtcctgcccgagcagccatagttcacttacagagagacataagattctgcatcggttactccaagaaggatctccatcagatatcaccactctgagtgttgagccagataagaaagatagcgcgagcacatcagtgtcggtcaccggtcaggtccaagggaacagctccatcaagttggaattggacgcaagcaagaagaaggaatcaaaagatcaccaacttctaagatatctactggacaaagacgagaaggacctgaggagtaccccgaacctgagcctcgacgacgtcaaggtgaaggtggagaaaaaagaacagatggatccatgcaataccaaccccacccccatgactaagcccacaccagaagagatcaaacttgaggcccagtctcagttcactgccgacttagaccaatttgatcagctgctgccaacacttgagaaggctgcacaattacctgggctgtgtgaaacggaccggatggatggtgcagtaacgtctgttactataaaaagcgagatcttacccgcttcccttcagagcgcaacggccagaccaacgtcccggttaaacagactaccagagctcgaactggaggctattgacaatcagttcggccagccaggcaccggggatcagattccatggactaataatactgttacggcgataaatcagtcgaaatcagaggaccagtgcatctcgtcccagctggacgagctgttatgtccccccaccaccgttgaaggcaggaacgacgagaaagcattgctcgaacaactggtcagcttcttgagcggtaaagacgaaaccgagttggcggagcttgatagggcactggggatcgataaactggtccaagggggaggtctcgacgtactcagtgagcgttttcccccgcaacaagccacaccgcccctcatcatggaggagcggcccaatctgtacagccagccttactcctctccttctccgaccgccaacctgccatctcccttccaagggatggttcggcagaagccctccctcgggaccatgcctgtccaggttactccacccagaggggccttctcccctggaatggggatgcagccaaggcagacactgaataggccacctgcagcccccaaccaactccgcctgcagctgcagcaacgtctgcagggacagcagcagctgatccatcagaaccgccaggccatccttaatcagtttgccgcaacggcccctgtgggaattaacatgcgaagcggaatgcagcagcaaataaccccacagcccccactcaacgctcagatgctggctcaacgccaacgggaactctatagccaacagcatcgccaacgccagctgatccagcagcagcgggcaatgttaatgcgtcagcagagctttggtaacaacttacctccatctagcggactccccgtgcagatggggaatcctagactgccacagggagctccccagcagtttccttacccacctaattatgggaccaaccctgggacaccacccgcaagtacctctcctttcagtcagctggccgcgaaccctgaggcctccttagctaaccgtaattctatggtgtctcggggaatgactgggaacattgggggccagttcggaacaggaatcaacccacaaatgcagcagaacgtctttcagtacccgggagcaggcatggttcctcagggcgaggccaactttgccccctcactttctccagggtcctcgatggttccaatgcctattcccccaccacagagctccctgctgcaacagaccccccctgcctctgggtatcagtctcccgacatgaaggcatggcaacaaggggctattggtaataacaacgtttttagtcaagctgtccagaatcaaccaacccctgctcaaccaggcgtgtacaataatatgagtataacagttagtatggccggtggaaataccaatgttcagaatatgaatcccatgatggctcagatgcaaatgagctccctccaaatgcccggcatgaacacagtgtgcccggaacagattaacgacccagcattgcgccacaccgggttatactgtaatcagctcagttctacggacctgttaaagactgaagccgacggcacccaacaggttcaacaagtccaggttttcgccgacgtgcaatgcactgttaatcttgtcggcggagacccctacctaaatcaacccggcccactggggactcagaagccaactagcggaccccagaccccacaggcacaacagaagagtcttctgcagcaactgctcacagaatag

SEQ ID NO: 126886 - DNA, 4323 bp, synthetic construct
  misc_feature 1..4323: note = Description of Artificial Sequence: Synthetic coding sequence
  source 1..4323: mol_type = other DNA
atgtctggcctgggtgatagctctagcgatccagctaatcccgacagccacaaacgtaaaggatccccttgcgacacccttgcaagcagcaccgaaaagcgaagaagggaacaggagaacaaatacttggaggagcttgccgagctcctcagtgcaaacatctctgacattgatagcttgtcagtgaagccagacaagtgcaaaatcttgaagaagaccgtcgaccagatccagctgatgaaacgcatggaacaggagaaatccacaactgacgacgatgtgcagaagtctgatatctccagctccagtcagggcgtcattgagaaggagtccctgggcccgctcctgttggaagctctggacggcttcttttttgtagtgaactgtgagggtcgaattgtgtttgtttctgagaacgtgaccagttatctggggtataaccaagaagagctgatgaatacatcagtctacagcattctgcacgtgggtgaccacgctgagtttgtgaaaaatctgctgcccaagagcctcgtgaacggcgtcccttggccacaggaagccaccagacgcaacagtcacactttcaactgtcggatgctgattcatcctccagatgagccaggaacggaaaatcaggaggcttgccagaggtatgaggtaatgcaatgcttcacggttagtcaacctaaaagtatccaagaggacggagaagatttccagtcatgtctgatttgcattgctaggaggctacccaggcctcccgcaatcaccggagttgagagttttatgaccaagcaggacactaccggcaagattatctccatcgatacatcttcgctgagagccgctggaaggacgggttgggaagacctggtgcgcaagtgcatttatgcttttttccaaccgcaaggacgagagccaagctacgcccgccagctgtttcaggaagtgatgactcggggaactgcttcatctccttcgtatcggttcattttaaacgatggaactatgctcagtgcgcacactaagtgcaagctatgttatccccagtcccctgatatgcagccctttatcatgggcatccacatcatcgaccgagagcacagcggattatcaccgcaggacgacaccaactccgggatgagtattccaagagtcaatccatccgtaaaccccagtatttcccctgcacacggtgttgcccgttcatcaacactgccgccctcaaactccaacatggtcagcaccaggatcaatcgccagcagagctctgatctgcacagttccagtcactcaaattcttcaaacagccagggcagcttcgggtgctcacccggtagccaaattgtcgccaacgtggctttaaatcaggggcaggccagcagccagagctccaatccaagcctcaacctgaataatagcccgatggagggtaccggaatcagcctcgctcaattcatgagcccacgacgccaagtgacctcagggctggcaactcggcctaggatgcccaacaactcatttcccccgaacatctcaaccctgtcctctcctgtgggaatgacctcttccgcctgtaacaataacaaccggagttactctaatattcccgtaactagcttgcagggcatgaatgaaggaccgaataatagcgtaggctttagtgcatcctctccagtacttagacagatgtcttcccagaacagcccctctcgtttgaatattcaaccagccaaggcagagtctaaagataataaagaaatcgcctcgatcttaaatgaaatgatacagtccgacaactcgtcgtctgacggcaaaccactggactcaggccttcttcataataacgacagattgagtgacggagactccaagtattctcagacctcccataagctggttcagctgttgaccacaacagctgagcagcagcttcggcatgcagatattgataccagctgcaaggacgttttatcctgtaccggaacgtctaactctgcctctgcaaacagctctggcggctcttgcccctccagccattcatctctgaccgaacgccacaagattcttcaccgtctgttgcaggaagggagcccgtcggacatcaccaccctaagtgtagagcccgacaagaaagactctgcaagtacctcggtgtctgtgactggccaagtccaggggaactcaagcatcaaactggaactggatgcctccaagaagaaagagtctaaagaccaccagttattgagatatttattagataaggacgagaaagatctaagatccactccaaatctgtccctggacgatgtaaaggtaaaagtggagaagaaggaacagatggatccctgtaacaccaacccaacccccatgacaaagccaacacccgaggagattaagctcgaagcacagtcacagttcaccgccgatctggatcagtttgatcaactgcttcccacactggagaaggcagcccaactgcccggcttgtgcgagaccgaccggatggatggcgccgtgacaagcgtaacaattaaatctgaaatcttgccggcgagtctccagtctgcaacagcccggccaacaagcagactgaaccgacttcctgaattagagctggaagcaattgataaccaatttggacagcccggcacaggcgaccagatcccctggacgaataatacagtaacagctataaatcagtcaaagtccgaagaccagtgcatctccagccagctggatgagctcctgtgcccacctactacagtggaaggccgcaatgatgaaaaggcacttctggagcagctggtcagctttttatccgggaaggacgagacggagctcgccgagctggatcgtgccctgggtatagataagctcgttcaaggaggtggattagacgttctgagcgagcgttttcccccccagcaggcaactccccccctaatcatggaagagcgcccaaatctctacagccagccttatagtagtcccagccccacagctaacctgcccagcccatttcaaggaatggtccgccagaagccgtctctcggaacaatgcctgttcaggtgactccacctaggggagctttctcacccggcatgggaatgcaaccccgacagaccctcaaccgccccccagccgcacccaaccagctgcggttgcagctacaacagcgactccagggccagcagcagttaatccatcagaacaggcaggcaatcctcaatcaatttgccgccacagctcctgtcggtatcaacatgcgatcgggcatgcagcagcagatcaccccccagccacctcttaatgctcaaatgcttgctcagagacagagagagctgtactcacagcagcaccggcaacgccagctgattcagcaacagcgggctatgctcatgaggcagcagagctttggcaataatttgcccccatccagcggcctcccagtccaaatgggaaaccctaggctgcctcagggggcccctcagcaattcccctatccccctaattatggtactaatcctggcacaccaccagcatctaccagtcctttttctcagcttgcggcaaacccggaggcctcgcttgccaatcgtaactcaatggtgagcagaggaatgactgggaacatcggcggccagttcggcactggcattaaccctcagatgcagcagaacgtattccagtaccctggcgcgggcatggtgccgcagggagaagccaacttcgcaccctcgcttagtcccggcagtagcatggtccctatgccaataccccccccccagtcaagcctcctgcaacagacccctcctgccagcgggtatcagagccctgatatgaaggcctggcagcagggtgctatcggtaacaataatgtcttttcacaggctgtacagaatcagccaactcccgcgcagccaggcgtttataacaacatgtcaattacagtttctatggcgggagggaatacaaacgttcagaatatgaacccaatgatggcacaaatgcagatgtcttccctgcagatgccggggatgaacaccgtttgcccggaacaaataaatgacccggccctgcgtcatacggggttgtattgtaatcagctgtcctctaccgatctgttaaagacggaagctgatggcacccaggtccagcaagtgcaagtcttcgccgatgttcagtgcactgtcaatttggtcggcggcgatccctatctcaaccagcctggaccgctgggtacccaaaaaccaacgagcggcccacagacccctcaggcccagcaaaaaagtctgctgcagcagctgctgaccgagtag

SEQ ID NO: 126887 - DNA, 4200 bp, synthetic construct
  misc_feature 1..4200: note = Description of Artificial Sequence: Synthetic coding sequence
  source 1..4200: mol_type = other DNA
atgtcaggccttggagatagttcctccgatccggcaaaccccgactctcataaacggaagggctctccttgtgacaccctcgcatcatcaaccgaaaagcgaaggcgagagcaagaaaacaaatacctggaggaactcgcagagttgcttagtgcaaacatctcagatatcgacagcctgtccgtaaagccagacaagtgcaagatcctgaagaagactgtcgaccagattcagcttatgaagcggatggaacaggagaagtcaaccacagatgatgacgtccaaaagtctgacataagctccagttctcagggagtgattgagaaagagagcctaggccccctgttattagaggctctcgatggatttttctttgtcgtaaactgcgagggacgcattgtttttgtaagcgagaatgtgaccagctacttaggatataatcaggaggaactcatgaatacgagcgtatacagcatacttcatgtgggagatcacgcagaatttgttaagaatctgctgcctaaatcactcgtcaatggcgtgccgtggccccaagaagcaaccagacggaactctcacactttcaactgtagaatgctgatccatcctcctgatgaacctggcactgaaaatcaggaagcatgtcaaaggtatgaggtcatgcaatgctttacggtgtcacagccaaaaagtatacaggaggacggagaggactttcaatcttgcctcatttgcatcgcacggagactccctagaccgcctgccattacaggcgttgaatcctttatgacgaagcaggacaccactggcaagatcatctccattgacacgtctagtttgcgggccgcaggcaggaccggatgggaggacctggtaaggaagtgtatatacgcattcttccagccccaagggcgagagcctagctacgcccgccagctatttcaggaggtgatgacgagaggaactgcctcttccccgtcttacaggttcatcctgaacgacggaactatgctcagcgcccatactaaatgcaagctgtgctacccccagtcaccagatatgcagcccttcatcatgggaattcacatcattgatcgcgaacactcgggcttgtcaccccaggacgatactaatagcggaatgtccattccacgcgtgaatccctctgtgaaccctagcattagtcccgctcatggcgttgctagatcatcgaccctgcctccatccaattctaacatggtctccacgaggattaatcggcaacagagctccgacctccactcaagcagtcactctaattcctcgaattcccagggctcattcggttgttctccagggtctcagatagtggcaaacgtcgccctgaaccaaggtcaggcttcctctcagtcaagcaacccctccctgaatctgaacaattcccccatggagggtacaggaatatctttggcccagttcatgagccctaggcgacaggtgacttccggtctcgccacccgccccagaatgcccaataactcattcccccccaacatcagcacgcttagctctccagtgggcatgacgtccagcgcctgtaacaacaataatagatcatattcaaatattcctgtgacttcccttcaaggcatgaacgagggccccaacaattccgtcggattttcagcgtcgtcacccgtgctgaggcagatgtcgtcacagaactccccctctagactgaacatccagcctgcaaaggccgagagcaaagataacaaggaaatcgcatctattctgaacgagatgattcagtccgataactcctcgtcagacgggaagcctctcgacagtggcctactgcataacaacgatcggctgtccgatggggactctaagtactcccagactagccataagcttgtgcagctgcttacgaccaccgctgaacagcagctgaggcacgctgacatcgatacttcatgcaaagatgtcctcagctgcactgggactagcaatagcgcatccgcaaattccagtggcgggagttgtccttcaagccatagcagtctcacggagagacataaaatcctgcatagactgctccaggaaggaagtccatccgacatcaccacgctatcggtggaaccagacaagaaggactcagccagcacaagtgtcagcgtaacaggccaggtccaagggaactcctcaatcaagctagagcttgatgcttcaaagaagaaagaatccaaggatcatcagttgcttagatatttgctggacaaagatgaaaaagatctgagatccaccccaaacttgtcattggacgacgtgaaggtcaaagttgagaaaaaggagcaaatggacccttgcaacactaatcccacccctatgacaaagcccactcccgaagaaattaagcttgaggcccagagtcaatttaccgcggacttggatcagttcgaccaacttctgcccactttggagaaagctgcccagttgcctggcctgtgtgaaaccgataggatggacggtgccgtgacttcagtgaccattaagtcagaaattcttcctgctagtctgcagtctgcaactgcccgtcctacaagtaggctaaatcgcctgcctgaactggaattggaggcaattgataatcagttcggccaacccggaacgggagaccagataccttggacaaacaacaccgttacagctatcaaccaatcaaagagcgaggatcaatgcatcagctcccagcttgacgagttgctgtgccctcctaccacggtggagggcaggaatgacgagaaagctcttctcgagcaactcgtgtccttcctgtccggcaaggacgagaccgagttggccgaacttgaccgggccttgggaatagacaaactggtgcagggcggagggctcgatgtgctatctgagagattcccaccccagcaggcaacaccacccttgatcatggaagagaggcccaatttatacagccagccatatagctctccctcacccaccgcgaacctgccatcgccgtttcaaggcatggtcaggcagaaaccatcactgggtaccatgccggttcaggttacgcctcccaggggggctttttcaccggggatgggtatgcagcctcggcaaactttgaatcggccaccggcagctcctaaccagctgaggctacagttgcaacagagactacaagggcagcagcagctcatccaccagaatcgtcaggcgattctgaaccagtttgccgccacagccccggtgggaatcaacatgagatcaggcatgcagcagcagatcaccccccagcctccattaaacgcccaaatgctcgcccaaaggcagcgagaattatattctcagcaacaccggcagaggcagctgattcagcagcaaagagccatgctaatgcgtcagcagtctttcggtaacaaccttcccccttcgagcgggctccccgttcagatgggtaaccctcgcctgccgcagggagcccctcagcagtttccttatccgcctaattacggaacaaaccctggtacccctccagcatccacatctccgttcagccagctggccgctaatccggaggcctcattggcgaatcgaaatagtatggtgtccagggggatgacaggtaacattgggggtcagttcgggacaggaataaacccacagatgcaacaaaatgtgtttcaataccccggagccggaatggtgccgcagggagaagccaattttgccccttcactctccccgggcagctccatggtgccaatgccaattccaccaccacagtcttccctgttacagcagacacctccagccagtggctatcagtctcctgacatgaaggcctggcagcagggagcaatcgggaataataatgtcttcagtcaggcagtgcagaaccagccaacgcctgcacagcccggagtgtacaataatatgagcattaccgtgagcatggccggtggaaacacgaacgtccagaacatgaatcctatgatggcccagatgcagatgtcttcgctgcaaatgcccggtatgaatacagtgtgccccgagcaaattaacgaccccgcattgaggcatacaggtctctactgcaaccaactttcctccacagatctccttaaaactgaagctgacggaactcaagacaaaaaaacagaggaattcttttcagtggtgaccacagattag

SEQ ID NO: 126888 - DNA, 4326 bp, synthetic construct
  misc_feature 1..4326: note = Description of Artificial Sequence: Synthetic coding sequence
  source 1..4326: mol_type = other DNA
atgagcggtcttggggactcttccagcgatcctgctaaccccgactcccacaagaggaagggctccccttgcgataccctggcatcttcgaccgaaaagcgacgtagggagcaggaaaataagtaccttgaagagctggccgagcttctgagcgccaacatctccgatattgattctctcagcgttaaacccgacaagtgtaaaattcttaaaaaaactgtcgaccaaattcagcttatgaaacgcatggaacaggagaagagcaccacagacgatgacgtccagaagtctgacatttcctcctcgtctcagggtgttatcgagaaagaatctctgggccctctgctattggaggcactggacggctttttttttgtggttaactgtgaggggcgcatcgtgtttgtctccgaaaatgtaactagctaccttggctacaaccaggaagagttaatgaacacctcggtgtacagcatattacacgtcggcgaccacgcagagtttgtcaagaatctgttgccaaagtccctggtgaatggcgtgccttggccacaggaagcgactcggagaaattcccacacttttaattgtagaatgctcatacatccgccagacgaacctggcaccgagaaccaggaagcctgccaaagatacgaggtgatgcagtgctttactgtgtcacagcccaagagcattcaggaagacggagaggattttcaatcctgtctcatttgcatcgctcggcggctccctcgaccaccagccataactggggttgagtctttcatgactaagcaagataccacgggaaaaataatcagtatcgatacgagcagtcttcgagccgccggaagaaccggctgggaggatttagtaaggaagtgcatctacgcctttttccagccccagggtagggaacccagctatgccagacagctcttccaagaggttatgacaagggggactgcttcgagtccaagctacaggtttatcctgaacgatggcacgatgctctcagcccacactaagtgcaagctttgttatcctcagtcccctgacatgcagccatttattatggggatacacatcattgatcgggagcattccggcctgtctccacaagatgacacgaattccggcatgagcattcctcgagtgaacccttcagttaacccctctatttctccagcccatggcgtggccaggagttcaaccctgcccccgagtaacagcaatatggtgtccactcgaatcaaccgccaacagagtagtgatttgcatagttcctctcactccaattcgtccaactcacaagggtcctttggttgttcccccgggtctcaaattgtggcgaacgtggcactgaaccagggacaagcctcaagccaaagttccaatccctccctcaatctgaacaactcccctatggaaggcaccgggatttcgttagcccagtttatgagcccacgcagacaggtgacgtccggactcgcaactcgaccgcggatgcctaacaattctttcccccccaacatctccactctgagctccccggtgggaatgaccagttccgcatgcaataacaacaaccggtcatacagcaacattccagtcactagcctacagggcatgaacgaaggccccaataacagcgtggggtttagtgcctcttcgcctgtgctccggcagatgagctctcagaatagcccgagccggttaaatatacagcccgccaaggcggaaagcaaggacaacaaagaaatagcttccatactgaacgagatgattcagagtgacaactccagttcggatggcaaacctttggactccggtttactccacaataatgaccgcctgtctgacggagatagcaagtattcccagacatcccataagctagtccagctcttgacaactacagcggaacagcagctcaggcatgccgatattgacactagttgcaaggatgtactcagctgcacgggcacgagcaatagtgccagcgctaattccagcggcggctcgtgcccttctagccatagtagcctaacagaaagacataaaattcttcacagactgctgcaagaaggctctccaagcgacatcaccacactgtccgtggagcccgacaaaaaggatagtgccagcacgtcggtgtcggtcaccggccaggtgcagggaaattcatccattaaactggaactcgacgcgtccaaaaaaaaggagtccaaggaccatcagttgctgcgctatctgcttgacaaggacgagaaagacctccggagtacgcctaatctctcccttgacgatgttaaggtgaaggttgaaaagaaggagcaaatggatccctgtaacaccaatcccactcctatgactaaacctacaccagaagagattaaactcgaggcgcaatctcagttcacagcagatttggatcagttcgatcaactgttacccactctggaaaaggccgctcagctccccggactatgcgagacagacaggatggacggagcagtcacgtcggtaacaattaagtctgaaatcttgccggcatctctacagtctgcaaccgctcgccccaccagcaggctgaatcggctcccagaactggagctagaggcaattgataaccaatttgggcagccaggaaccggagaccaaattccatggacgaataatacagtaacggcaataaaccaatccaagtccgaggaccagtgtataagctcccagctggacgagctgctgtgccctcccacgaccgtggagggtcgaaacgacgaaaaggcactgctagagcagctggtatcattcctttcaggtaaggacgagacagaactggcggagctggaccgggcactcggcattgacaagctcgtgcaggggggcgggttggatgtgctctctgagcgctttcccccccagcaagcaacaccccccctcatcatggaagaaagaccaaacttgtactctcagccgtacagctcaccctctcctacagcaaatctcccttcaccttttcagggaatggtgcgacaaaaaccctcactcggtaccatgcctgtgcaggttaccccacctcgtggagctttttccccgggaatgggcatgcagccccggcaaacattgaatagaccgcctgctgcccccaaccaactcagactgcaacttcaacagcgcttgcaaggccagcagcagctcatccatcagaatcgtcaggccattctgaaccaattcgcagcaacggcccccgtcgggataaatatgagaagtgggatgcaacaacagattacaccccagcccccgttgaatgcacagatgttggcacagaggcagagggagctctatagccagcagcacaggcagcgccagttaattcaacagcagagggcaatgcttatgcggcagcagtcatttggcaataatctgccacctagttcgggcctccccgtgcagatgggcaatccacgccttccacaaggggctccgcagcagttcccctaccccccaaattatggaacgaacccaggcaccccccctgccagtacaagccctttctcacaactggccgctaatcccgaggcatctcttgccaaccgaaacagcatggtctcaaggggcatgacaggcaacattggtgggcagttcgggaccggtatcaatccgcaaatgcagcagaatgtgtttcaataccctggcgccggcatggtgccacagggagaggcaaactttgccccatccctgtctcctggctctagcatggtgcctatgccaattccaccccctcagtcaagtcttctccagcaaactccccctgcttccggctaccaatccccagacatgaaggcctggcagcagggagccatcggaaacaataacgttttcagtcaggccgtgcagaaccagcccacacccgcccagcctggcgtttacaacaatatgtctattactgtatctatggctggcggtaacacaaatgtgcagaatatgaaccccatgatggctcagatgcagatgtcatccctgcagatgcccggaatgaataccgtttgtccagaacagattaatgacccggctctgagacatacaggactctactgcaatcaactgtcctccactgatttgttgaaaaccgaagccgacggcactcagcaggttcagcaggtgcaagtctttgctgatgtgcagtgcacggtgaatttggtggggggagacccatatctgaatcaacctggaccgcttggtacccaaaagccaacttcaggccctcagacccctcaagctcaacagaagagcctgcttcagcagttacttaccgagtag

SEQ ID NO: 126889 - DNA, 4200 bp, synthetic construct
  misc_feature 1..4200: note = Description of Artificial Sequence: Synthetic coding sequence
  source 1..4200: mol_type = other DNA
atgtctggccttggagacagcagctccgaccctgctaaccctgactcccataagcgcaagggaagtccatgtgatacccttgcttcctccaccgaaaaaaggaggcgggagcaggaaaataagtatctggaggaattagccgagcttttgtcagccaatatcagcgatatcgactcgctatctgtgaaaccagacaagtgcaaaatcctcaaaaagacggttgaccagatccaactaatgaagagaatggagcaggaaaaaagcactaccgacgacgacgtgcagaaaagtgacataagttccagttcgcaaggtgttatagagaaggagagcctcggtccccttttactcgaagccctggatggctttttcttcgtcgtaaattgtgagggccggatcgtgttcgtgtctgagaatgttaccagttacttagggtacaatcaggaggagctgatgaataccagtgtttacagcatcttgcatgttggggaccacgccgagtttgtgaaaaacctgctgcccaaatctcttgttaatggcgtgccctggccacaggaggccacccgcagaaattcacatacattcaattgtcgcatgctgattcatcctccagatgaacctggcaccgagaatcaggaagcttgccagcggtacgaggtgatgcaatgcttcaccgtgagccaacccaaaagtatacaggaggacggagaagattttcagtcgtgcctgatctgtatcgctcgacgcctgcccagacctcccgccattactggcgtggagagcttcatgacaaaacaggatactacgggaaagatcatcagtattgatacaagttccctgcgtgccgccggacggacaggatgggaggatctggttcgcaagtgtatctacgccttcttccaaccccaaggtagggaaccaagctatgcaagacaattgttccaagaagtgatgacaagaggaacggcgtcctccccatcctatagattcatcctcaatgacggaacaatgctgtcagctcataccaagtgcaaactctgctatcctcagagcccagatatgcaaccctttattatggggatccacatcatcgatagggagcatagcggactgagtccccaggacgacactaactcagggatgagcatcccgagagtgaatccaagcgtaaatccttcgatctccccagcccatggcgtggcgcgatcaagcacccttccacccagtaacagcaacatggtcagcacccgaatcaaccgccagcaaagctcagacttgcattcctccagtcattctaattcaagtaattctcagggctctttcggatgtagtcccggctcacagatcgtggctaacgtagctctgaaccagggccaggcatcatcccagtctagcaatcccagtctgaacctaaacaatagccccatggagggcactggtatctccttggcccagttcatgtcccctaggagacaggtaacttcgggcttggcaactaggccgagaatgcccaataacagctttcctccaaacatttcaaccctttcgagtcctgtaggtatgacatcttcagcatgtaacaataacaaccgatcctactcgaatatccctgtaaccagtctgcaagggatgaacgagggacccaataattctgtgggtttctctgctagttcccctgtgcttaggcaaatgtctagccagaactccccctcccgcctgaatatccagccagcaaaagcagagtccaaagacaacaaagaaatcgcaagtatactgaacgagatgatccagtccgacaattccagttctgatgggaaacccctggatagcggtctgttgcacaacaacgacaggctcagtgacggggactccaagtacagtcagacatctcacaaattggtccagttgttaactacgacagctgagcagcagcttaggcacgcagatatagatacaagttgcaaagacgtgctgagttgtaccggcacaagcaacagcgcctcagccaacagtagtggagggtcatgcccgagctctcactcttccctgactgagaggcataaaattttacataggctgctgcaagagggatcgccaagtgatattaccaccctgtccgtcgagccggacaagaaagattcagcttctacgtcagtaagcgttacaggccaggtacaggggaattcaagcattaaactcgaactcgatgcaagcaaaaaaaaggaaagcaaggatcaccagctcttgaggtacttactggataaggatgagaaagatttgcgctctacacctaatctgagcttagacgatgtgaaggtcaaagtcgaaaagaaggagcagatggacccatgtaatacaaatccaactccgatgaccaaaccaacccccgaagaaataaaacttgaagcccagtctcagttcactgcggacctggaccagttcgaccaactgctccctaccctcgagaaagctgctcagctgccgggcctttgtgagaccgatcggatggacggggcagtcacgagcgtaacaatcaagtctgagattcttcccgcctctcttcagtcagcaacagccaggcccacttcccgattgaataggttaccggagctagagctggaggcaattgataatcagttcgggcagccgggaactggtgaccaaatcccctggaccaataataccgtgactgccatcaaccagagcaaatctgaagaccagtgcatttctagccagctcgacgagcttctctgtccccctactaccgtggagggacggaatgatgaaaaggccctcctggaacaacttgtgagctttctgtcaggcaaggatgagactgaattggccgagctcgatagagcactaggcatagacaagcttgttcagggcggaggtctggatgtgctgtccgaaagattcccgccacagcaggctacgcccccactgataatggaagaacggccaaatctgtacagtcagccctattccagtcctagtcccactgctaatcttccaagcccattccaggggatggtccgacagaagccatctttaggaacaatgcctgttcaggtgacacccccacgcggggccttttccccaggcatgggcatgcaaccacgccagacgttgaatcggccgcctgccgcccccaaccagctccgcctccagctccagcagaggctgcaggggcagcagcaactgattcatcagaaccggcaggctatactgaaccagttcgccgccacagcgcccgtaggaatcaacatgcgttccggcatgcaacagcagatcacaccccagcctcctctaaacgctcaaatgctcgctcagcgtcaaagagagctatattcccaacagcacagacagcgccaactgatacagcaacagcgggcaatgctgatgcggcagcagtcatttgggaacaatctgcccccctcatctgggctcccagtgcagatgggaaacccccgcctcccccagggtgcaccccagcagttcccatacccaccaaattatggcacaaatcctgggaccccacctgcgtcaacatctccctttagccagctggcagccaatccggaggcttctctggccaaccgtaacagcatggtgtcaagaggaatgacgggaaatatcggagggcagtttggaacagggataaacccacaaatgcaacagaacgtgtttcagtatccaggtgctggcatggttccccagggggaagcgaactttgcaccatccttgagccccggctcaagcatggtcccaatgcctatccctcccccacagtcttcactgctccagcaaaccccacccgcaagcggctatcagtctccagatatgaaggcttggcaacagggggctatcggcaacaacaatgtgttttcccaggccgtgcagaatcagccgacacctgcacagcccggtgtgtacaataacatgtctatcactgttagtatggccggaggtaacacgaatgttcagaatatgaaccctatgatggcccaaatgcagatgagcagcttgcaaatgcctggaatgaacacagtctgcccagaacagattaatgacccagccttgcgacatacaggcctgtactgcaatcagctgtcctcgacagacctgctcaagacagaagcagatggcacacaggataagaagaccgaggaattctttagcgtcgtgaccaccgattag

SEQ ID NO: 126890 - DNA, 1659 bp, synthetic construct
  misc_feature 1..1659: note = Description of Artificial Sequence: Synthetic coding sequence
  source 1..1659: mol_type = other DNA
atgcagctgaccgcagaaaatagtccggtgacccctgtgggcgcgcagaagaccgctttgcgcatctctcagtcacgcatgatcggcaatagcgcatcacggccaaccatgcctagcggcgaatgggcgcctcagtcttcggcagtgcgcgtgacatgtgcagccaccacgtctgctatgaacagacccgtccaggggggcatgatcagaaatcctgccgccagtatccccatgcgccctagcagccagcctggtcagcgccagacactccagtcccaggtcatgaacatcggtccatccgaactagaaatgaatatggggggacctcagtactctcagcagcaggccccacctaatcagacagccccatggccggaatctatcctccccattgatcaggcctctttcgctagccagaaccggcaaccctttggtagctctccagacgacttactgtgtccgcaccctgccgccgaatccccgagtgatgaaggcgctttgctcgaccagctttatctggctctcagaaacttcgacggcttggaagaaatcgaccgggccctgggaattcctgaattggtgtctcagtcacaggcggtggatcccgaacagttctcctctcaggacagtaacatcatgctcgagcaaaaggcaccagtatttccccaacagtacgcttcacaagcccagatggcacaaggctcatacagcccaatgcaggaccccaattttcacacgatgggacagcggcccagctacgccaccctaagaatgcagcctagacctggcctgcgacctacaggcctggtacagaatcagcccaatcagctgcgcctgcaactccagcaccgactgcaagcgcaacagaatcggcaacctctcatgaaccagatttcaaatgtaagtaatgtgaacctgacacttagaccgggcgtgcctacccaagcccccattaatgctcaaatgctggcccagcggcagagagaaattcttaatcagcatctgagacaacgccaaatgcatcaacaacagcaagtgcagcagcgcacactaatgatgagaggtcaggggctgaacatgaccccatctatggtggccccctccggcatgcccgcaaccatgagcaatccaaggattccccaagcgaatgcacagcaatttccttttccccctaattatggtatctcccaacagccggaccccggatttaccggtgctaccaccccccagtccccactaatgagtccacggatggcccatacccagagcccaatgatgcagcagagtcaggccaacccagcctaccaagctcctagtgatatcaatggttgggcccagggcaacatggggggaaactccatgttcagccaacagagcccaccgcattttggacagcaggcaaatacctccatgtatagcaataatatgaatatcaatgtgagcatggccaccaatacaggcgggatgtcgtccatgaatcagatgactggacagatatcgatgacctccgtgacatcagttccaacatcaggactaagctcgatgggcccagagcaggttaatgaccccgctctgagaggcggcaacctgtttcctaaccagctgccaggcatggacatgatcaaacaggaaggggataccacacgcaaatattgctag

SEQ ID NO: 126891 - DNA, 4395 bp, synthetic construct
  misc_feature 1..4395: note = Description of Artificial Sequence: Synthetic coding sequence
  source 1..4395: mol_type = other DNA
atgagtggtatgggcgagaatacgagtgatccgtcaagggctgagacacgcaagagaaaggaatgtccagatcagcttggtccatctccaaagagaaatacagaaaagcgaaatcgcgaacaggagaacaaatacatcgaggagctcgcagagctcattttcgccaatttcaacgacatcgacaatttcaatttcaaaccagacaagtgcgcaattcttaaagagactgtgaagcagatccggcagatcaaagagcaggagaaagccgctgccgctaacatcgacgaggttcagaagtcagatgtgagcagcacgggccagggagtaatcgacaaggacgccctgggaccaatgatgctcgaagccctggatgggttcttcttcgtcgtgaacttggagggcaatgttgtctttgtctccgagaatgtgacacaatacctgcgatataatcaggaggaactcatgaataagtctgtgtactcaatcttgcacgtgggggaccatacggagttcgtgaagaatctgttaccaaagtctattgtgaacggggggtcctggtcaggcgagccaccaaggcggaacagccacacattcaactgtagaatgcttgtcaagcctctgcctgatagtgaagaggagggccacgataaccaggaagcccaccaaaaatatgaaacaatgcagtgctttgcagtttcccaacctaaaagtatcaaggaagagggtgaggaccttcaatcctgtctgatttgtgtggctcgacgagtgccaatgaaggagaggcctgtgcttccttcttccgaatctttcaccacccgccaggatctgcaggggaaaatcacatcactggatacatccacgatgagggccgccatgaaaccaggctgggaagacctagtgcgaaggtgcatacagaagtttcacgctcagcatgagggagaatcagtgtcatatgcgaagcgccatcaccacgaggtgctgagacagggactcgcattttcgcagatatatcggttcagcctaagcgacggcaccttggtggccgctcaaaccaagagcaagctcattcggtcacagaccacgaacgagcctcagttggtaatttctctccatatgctgcaccgggagcagaacgtgtgcgtcatgaaccccgatcttacaggtcagactatgggaaagccccttaatcctatatccagcaatagcccggctcaccaggctctctgctcaggtaacccagggcaggacatgacactgagctccaatatcaattttccaattaacggcccaaaagaacagatgggcatgcccatggggaggttcggcggaagcggaggaatgaatcatgtcagcggaatgcaggccactaccccccagggctcaaattatgctttaaagatgaacagtccctcccagtctagccctggaatgaatccaggacaacccacctctatgttatccccaaggcaccggatgtcgcctggagtcgctgggtccccacggattcctccctcccagttcagtccggccggaagcctccacagtccggtaggggtgtgttcaagcaccggaaacagtcacagctacactaacagcagcctgaatgccctgcaggccctgtccgagggtcatggcgtttccctgggatcaagcctggcctcaccagatctcaaaatgggaaatctgcagaatagcccagttaatatgaatccccctccattgtctaagatgggatctctggattcaaaagattgcttcggcctctatggtgagccatcagaaggtacgaccggacaagccgagagttcatgtcaccctggcgagcagaaagaaacaaacgatcctaacctgcctcccgcagtgagttcggaacgtgcagacggccaatcaaggctgcacgactccaaggggcagacaaaactgttgcaactcctgacaaccaagagcgaccaaatggagccttcacctctcgcttctagcttgagcgatacaaacaaagattcaactgggagtctaccaggatccggttccacccacggcacctctctcaaggaaaaacacaagattctccacaggctgctgcaggatagctcctcgcctgtggacctggccaagctgacagccgaggctacgggaaaggacctgagtcaggagtcttcgagcacagcacccgggtctgaggttacaataaagcaggaaccagtgagccctaaaaagaaagaaaacgctctgctccgctacctcttggacaaggacgatacgaaggacatcggcctgccagagattactccaaaacttgaaagactcgacagcaaaaccgaccctgccagtaatactaagctcattgctatgaagacagaaaaggaagaaatgagcttcgagcctggcgaccagccaggttccgaactggacaacctggaagagatactggacgacctacaaaactcacaactgcctcagttgttccccgacactcgccccggcgctcctgccggatcagtcgataagcaggccatcatcaacgaccttatgcagttaactgccgagaacagtccggtgactccagtaggggcccagaaaactgcactgcggataagccagagtaccttcaataaccccagacctggtcaactcggccggctgcttccgaaccagaacctacccctggatataactcttcagagtcccaccggcgcgggaccattccctccaatcaggaacagctccccctacagcgtcattccccagcccgggatgatgggtaaccagggcatgattgggaatcaaggcaatctgggaaactcctcaacaggcatgattggaaacagcgcgtccagacccacaatgccaagtggagaatgggccccgcagagtagcgccgtaagggtgacatgcgccgcaactacttccgccatgaacaggcccgttcagggggggatgattcggaatccggccgcgtctattcctatgcgtccctccagtcaacccggacagcgacagactctgcagtcccaggtgatgaacattggcccatcggagctagaaatgaatatgggagggccccagtactcacaacaacaggctccccccaatcagaccgccccctggcccgaaagcatcctccctatcgatcaggcgtcctttgctagccagaacagacagcctttcggctcctctccagatgacctcttgtgtccccatccagctgcggagagcccgagcgacgagggagcgctattggaccagttgtatttggccttgaggaattttgacggcctcgaggagattgaccgggctctgggcattcctgagttagtgtcccagtctcaggctgtcgacccagagcagtttagctcccaagattccaatattatgctagaacagaaggctcccgtctttcctcagcagtatgcctcacaggcccagatggcacaaggatcctacagtcctatgcaggatccaaacttccacacaatgggccaaaggccctcctatgccacattacgcatgcagcctcgacccgggttgcgaccgaccggactggttcagaaccagcccaaccaacttcgactgcagctacagcaccggttacaggcccagcagaacaggcagcctctgatgaaccagatctctaacgtgagcaatgtgaacttgacactgcggcccggagtaccaactcaggctcccattaatgctcagatgctggcgcagaggcagcgggagatcttgaatcagcacctccgtcagcggcagatgcatcagcagcaacaggtgcagcagcggaccttgatgatgcgtggccagggtctcaacatgaccccatccatggtagcgccctccggcatgcctgctaccatgtctaatccccgcattccacaggccaatgcccaacagttcccttttcctccaaactacggcatcagtcaacagcctgacccaggctttacgggggctacgaccccacagtcccccctcatgtcgccccgcatggcacatacccagagccccatgatgcaacaaagccaggcaaaccccgcgtaccaggccccatccgatattaacggctgggcccaggggaatatgggaggcaattctatgttcagccagcagagtccgccgcactttgggcagcaagcgaatacgagcatgtattccaataacatgaacatcaacgtctccatggccactaacaccgggggaatgtcatctatgaaccagatgactggacagatcagtatgacctccgtaacctccgtccccacttcgggcctgtccagcatgggacctgaacaggtgaatgatcccgcacttcggggaggcaatctgtttcccaatcagttgccaggaatggatatgataaagcaggaaggagataccactaggaagtattgctag

SEQ ID NO: 126892 - DNA, 51 bp, synthetic construct
  misc_feature 1..51: note = Description of Artificial Sequence: Synthetic coding sequence
  source 1..51: mol_type = other DNA
atgtccggcatgggagagaacacgtctgatccttcacgtgctgagacatag

SEQ ID NO: 126893 - DNA, 27 bp, synthetic construct
  misc_feature 1..27: note = Description of Artificial Sequence: Synthetic coding sequence
  source 1..27: mol_type = other DNA
atgagtggcatgggagaaaatacatag

SEQ ID NO: 126894 - DNA, 4263 bp, synthetic construct
  misc_feature 1..4263: note = Description of Artificial Sequence: Synthetic coding sequence
  source 1..4263: mol_type = other DNA
atgtccggcctgggcgaaaacctggaccctctcgcctccgacagcaggaagcgaaagcttccatgtgataccccgggccagggactgacctgctccggcgagaaacgacggagagagcaggaatctaagtatatcgaggaactagcggagctgatatcagctaatttgagtgatattgacaatttcaatgtcaaaccagacaagtgcgccattcttaaagaaaccgtgcgacaaatccggcaaatcaaggaacagggaaagacaatctcgaacgacgacgacgtccagaaagcagacgtgtcttccaccggtcagggagtgattgataaagactctctgggtcctctgcttctccaggcactcgacggttttcttttcgtggtgaaccgggatggaaacattgtgttcgtgagcgagaatgtaacacaatatctgcaatacaagcaagaggacttggtgaatacctctgtatataacatactgcacgaagaggaccgaaaggattttttgaaaaacctacccaaaagcaccgtgaatggcgtctcatggaccaacgagacccagagacagaaatcgcatacatttaattgcagaatgttaatgaagacccctcatgatattctggaggacatcaacgccagcccagagatgcgccagcggtatgagacaatgcaatgcttcgcactatcacagcccagggccatgatggaagagggtgaggacctacagagttgcatgatctgcgtcgcacggagaatcacaactggagagagaacctttccgagtaaccccgaatcatttatcactcggcatgatctgagcggaaaggtagttaatatcgacacaaactctctgcgctcatccatgcgccctggatttgaggacattattcgaaggtgcatccagcgtttcttctctctgaatgacgggcagtcatggtcacaaaaaaggcactaccaggaggcgtacctaaatggtcacgcagagacccccgtgtacaggttttcgttggcggatggcaccatcgtgaccgctcagacaaagtctaaactgttccgaaacccagttaccaacgaccgccacggcttcgtgtccactcattttctacagagagagcagaatgggtatcgtccgaacccaaatcctgtcggtcaaggcatcagaccccctatggcaggatgtaattcatcagtagggggaatgtccatgtcccccaatcaggggcttcagatgccatctagcagagcttatggcctcgctgacccaagcactacaggacagatgtccggggcgagatatgggggaagctcaaatatcgcaagtctcacccccgggcccggcatgcaaagtcctagttcctatcagaacaacaactacgggctcaatatgagctcaccaccgcacggctcgccagggctggcgcccaaccagcagaatatcatgataagccctaggaatagaggatccccgaaaatcgcctctcaccagttcagtcctgtggctggagtgcactccccgatggcttcctccggcaacactgggaaccacagcttttcctcctcttcactgtctgctttgcaggcgatctccgagggagtgggcacctctttgctctcgacactttcgagcccagggccgaagcttgacaacagccccaatatgaacataacacagcccagtaaggtgagcaatcaggatagcaagtcgcctctcgggttctactgcgatcagaacccagttgaaagttctatgtgccagtccaacagtagagatcaccttagtgataaagagtcaaaagagagttctgttgagggcgctgagaatcaacgtggcccactggagtctaaaggccacaagaagctgctgcagctcctgacctgtagttcagatgatagagggcactcgtctctcaccaatagtcctttagactcatcgtgtaaagagagtagtgtctcggtgacgtctcccagtggcgtttcatcctcgactagcgggggggtttcctccacaagcaatatgcatggatctctgctgcaggagaaacatcgaatcctgcataaactgctgcagaatgggaactctcctgccgaggtggctaaaataacggcggaggccacaggaaaagacacatcatctatcacgtcatgtggggatgggaacgtcgtgaagcaagagcagctttcaccaaagaaaaaagaaaacaatgccctgctgaggtatctcctggatcgcgatgatccatcagatgctctctcaaaggaactacaaccacaggtggaaggggttgataacaagatgagccagtgcaccagttccactattccttccagcagtcaggagaaggaccccaaaatcaagacagaaacctctgaagagggatctggcgacctggacaaccttgacgcaattttgggcgatttgacctcatcagacttctataataacagtatttcgtcaaacggtagccacctgggaaccaaacagcaggtgttccagggtaccaatagtttagggctgaagtcaagtcagtcggtacagtctattagacccccatataacagagccgtgtcacttgactccccagtgtccgtgggatcttctccacctgtgaaaaacatctcagccttccctatgctgcccaaacagccaatgctgggagggaatcctagaatgatggattcacaggagaactatggctcctccatgggcggacctaacagaaatgtgactgttacgcagactcctagctcaggcgattggggactgccgaactcaaaagctggaagaatggaacctatgaacagcaactccatgggaaggcccggaggcgactacaacaccagcctgccgagacctgcactgggaggctctattccaacactccccctacgttccaactccattcctggggcgaggccagtcctacaacagcaacagcagatgttgcagatgcggcctggtgagatacctatgggaatgggtgctaatccttatgggcaggctgctgcctcaaatcaactgggtagctggccggacggtatgttgagtatggaacaagtgagccatgggacacagaatcgcccactgctcagaaattcactggacgatttggtcggccctccatctaacctggaaggccagagcgacgagcgggctttactggatcagctgcacacactcctctctaatactgatgctactggccttgaggaaattgacagagccctagggatacctgaactggttaaccagggacaggcactcgaacctaaacaggacgcgtttcagggtcaggaagccgccgtcatgatggaccagaaggcgggcctgtatggccagacttatccagcgcagggaccacctatgcaaggtggctttcacctccagggccagtctccgagttttaactcgatgatgaaccagatgaatcaacagggcaacttccccttgcaaggtatgcaccccagggcaaacattatgcggccccgcaccaatactcccaagcaactgagaatgcagctgcagcagcgtctgcaaggccagcagttcctcaaccagagccggcaggctctggaattgaaaatggagaacccaactgccgggggtgccgctgtgatgcgccccatgatgcagccccagcaggggtttctgaacgcacagatggtggctcagcggtcgcgggagctgttaagtcaccatttccgacagcaaagagtagccatgatgatgcaacagcagcagcagcaacaacagcagcaacagcagcagcagcagcagcagcagcagcagcaacaacaacaacagcagcagcagcagacccaggcctttagtccccccccaaacgtcactgcgtccccgtctatggacgggttgctggctggacccacaatgccacaggcgccaccacagcaatttccctaccagcccaactacggtatgggccaacagcctgatcccgcctttggcagagtaagcagtccgccgaatgccatgatgagttcccgcatgggacccagtcagaacccgatgatgcagcacccacaggccgcatctatttatcagtccagcgaaatgaagggatggcccagcggcaatctggctcggaactcctccttcagccagcagcagttcgctcatcagggaaatcccgccgtctactccatggtgcatatgaacgggagctcaggacacatggggcagatgaatatgaatccaatgccgatgtcgggaatgccaatggggccagatcagaaatactgctag

SEQ ID NO: 126895 - DNA, 4053 bp, synthetic construct
  misc_feature 1..4053: note = Description of Artificial Sequence: Synthetic coding sequence
  source 1..4053: mol_type = other DNA
atgagcggcctgggcgaaaatcttgacccactggcctccgactcccggaagcgcaagctcccatgtgacactcctggccaaggattgacatgcagtggagagaagcgaagaagggagcaggagtccaagtacattgaggaacttgctgagcttatctccgccaacctgtctgacatcgacaactttaatgtgaagccagacaagtgtgccattttgaaagagaccgtgcggcagatcagacagatcaaggaacaagggaagacgatttctaacgatgatgacgtccagaaggccgacgtctccagcactggtcagggcgttattgacaaggattccctcggcccactcctcctgcaggccctggatggcttcctcttcgttgtgaaccgagatgggaatattgtctttgtttctgaaaacgtgacgcagtaccttcaatataagcaagaagatttggtgaacacatcggtctataacatcttgcacgaagaggacaggaaagattttctcaagaacctgccgaaaagtacagtgaacggtgttagttggacaaatgaaacacagcgccagaagtcacatacctttaactgtcgtatgctgatgaagactccgcacgacatcttggaggacatcaacgcctccccagagatgaggcagcggtatgaaacaatgcagtgcttcgccctttctcaacccagagctatgatggaggaaggagaagatctgcagtcatgcatgatttgtgtggctaggcgcatcacaacaggtgagagaacattcccttccaacccagagagtttcatcactaggcatgaccttagcggtaaggtcgtgaacatcgataccaacagtctgcggtctagcatgcggcctggctttgaggatattattcgacgctgcatccagcggttcttctcgcttaacgacggtcaatcttggagtcaaaagaggcattaccaagaggtcacaagcgatggaatcttcagccccacagcatacctgaatggccacgcagaaacgcccgtgtaccgctttagcttggccgatgggactatcgtgacagcacagaccaagtccaaacttttccgcaatcctgtaacaaacgacagacatggctttgtgtcaacgcatttcttgcagcgggagcagaacggatatcggccaaatcctaaccctgtgggacaagggatacgtccacccatggccggctgtaactcctctgtggggggaatgtccatgtccccaaaccagggcctacagatgcccagttcgcgcgcatacggcctggccgacccgtccacaactgggcagatgtcaggggctcggtacggtggctcttctaacatcgcaagcctgacaccaggacccgggatgcagagtccctcctcataccagaataataattacggactgaacatgtcgagccctccccacggcagcccaggactggccccaaaccagcagaatataatgatttctccccgaaaccggggcagccccaaaatcgccagccatcagttcagccctgtcgccggcgtgcatagccccatggcgtcatctggaaacacaggaaatcacagtttttcttcttcttccctctctgctctccaagctatttccgagggggtgggcacctcactgctcagtaccctgtctagtccggggcccaaactggacaatagtccaaatatgaacatcacgcagccatcaaaggttagcaaccaagattcaaaaagtcctttgggcttttactgcgatcaaaatcctgtcgagtcatccatgtgccaaagcaattcccgggatcacttatccgacaaagaatcaaaggagtccagcgtggaaggggccgaaaaccaacgcggccctctggaaagcaaagggcataaaaagttgctccaactactgacctgtagctctgacgaccgcggccactcctctctcactaattccccgctggacagctcatgcaaggaaagcagtgtgtctgtcacctccccttccggcgtgagctcttcaaccagtgggggggtgtcaagcacctccaatatgcacggaagcctattacaagaaaagcaccgtatactgcacaaactgctacagaatggtaacagccccgctgaggtcgctaaaattacagcggaggctactggaaaggatacatcctctattacttcctgtggagatggcaatgtcgtcaagcaggaacaactatcgccgaagaagaaggaaaacaacgcgctccttaggtacttactggatcgcgacgaccccagcgatgcactttctaaagaactgcagccacaagttgagggggttgacaataagatgtctcaatgcacaagcagcaccataccaagctcctcacaagaaaaggaccccaagatcaagactgaaacatctgaggaagggtcaggggatctcgataacttggatgctatcttgggcgatttgacctctagcgatttttacaataatagtattagctcaaacggatcacacctcggcactaagcagcaggtttttcaaggtacaaactcactcggcgattgggggctgcctaactctaaggccggaaggatggagcctatgaacagtaactctatgggtaggcccggtggagattataatacttcattgccccgccccgccctcggcggtagtatcccgacactgcccctccggagtaattcaatccccggggcgaggcccgtactgcaacaacaacaacaaatgttgcagatgaggcccggcgaaattccgatgggaatgggagcaaatccatatggacaggcagccgcctctaaccaactcggctcttggccagacggaatgctgagcatggaacaggtctcccatggcacgcagaatcgaccgctgctccgtaactcattagatgatctggtgggaccacctagcaatttagaaggacagagtgacgaaagggctctgctcgaccagttgcacacccttctgagcaatacggacgcgactggcctcgaagagattgatcgggccttgggtatcccagagttggttaaccaagggcaggctctggaacccaaacaggacgccttccaaggccaggaggccgccgtgatgatggaccagaaagccgggctttacggccaaacatatcccgcacaggggccgccaatgcaggggggcttccacctgcagggacagtcccccagcttcaattctatgatgaaccagatgaaccaacagggcaacttcccactgcaaggcatgcatccaagggccaacatcatgcgacctagaacaaacacaccgaaacagctgagaatgcagctgcagcaaagactgcaggggcagcagtttctgaatcagtcacgacaagctctagaactgaagatggagaacccaaccgcaggcggggccgccgtcatgagaccaatgatgcaacctcaacaggggttccttaatgcccagatggtggcccaacggagccgggagctgctttcacatcattttaggcagcaacgggtcgcaatgatgatgcagcagcagcaacagcagcagcagcagcaacagcagcagcagcagcagcaacaacagcaacaacaacagcaacagcagcaacaacagacccaagctttttctccaccccctaatgtgacagccagccctagtatggatggattacttgctggcccaacgatgcctcaggcacccccgcaacaattcccttatcagcctaattatgggatgggccaacagcccgatcctgcctttggcagggtaagtagcccgcctaatgcaatgatgtcctcgagaatgggccccagccagaaccctatgatgcaacatccacaggccgcctccatttaccagtcatcagaaatgaaaggctggcctagtggcaacctggcacgcaactcctccttttcccagcagcaatttgctcatcagggtaatcccgccgtttacagcatggtgcatatgaatggttcttctggacatatgggtcaaatgaatatgaaccctatgcccatgtctgggatgccaatgggccccgatcagaagtattgctag

SEQ ID NO: 126896 - DNA, 4248 bp, synthetic construct
  misc_feature 1..4248: note = Description of Artificial Sequence: Synthetic coding sequence
  source 1..4248: mol_type = other DNA
atgtcaggcttaggagaaaacttagaccccctggcatctgattccaggaaaagaaagctcccatgcgacacaccgggccagggtttgacctgcagcggcgagaagagacgtagggaacaggaaagcaagtatatcgaagagctggcggagctgatttctgcaaacttgtctgatatagacaatttcaatgtgaagccagacaagtgtgccatccttaaggagaccgtgaggcagatccgtcagattaaagagcagggtaagacaattagcaatgatgatgatgtacagaaagcagacgtaagcagcaccggccaaggcgtgatagataaggacagtctgggacctctccttttgcaggccctcgatggtttcttgttcgtggttaaccgtgacgggaacatagtattcgtgtccgaaaatgtgacacagtacctgcagtataaacaggaggatctagttaatacgtccgtgtacaacattttgcacgaggaagataggaaagattttcttaagaacctccctaaatctaccgtgaacggcgtctcctggacaaatgagacacaacggcagaaatcccatacattcaactgccgtatgcttatgaaaacacctcacgatattctggaagacattaacgcctctccggagatgcgtcagagatatgaaacaatgcagtgcttcgccctgagccagccacgcgccatgatggaagaaggggaggacctacagtcctgtatgatctgcgtggccagacggattactacaggcgagcggacctttcctagtaatccagaaagttttataacccgacatgatctgtccggaaaagttgtgaacatcgacactaactccctgaggagttccatgagacccggcttcgaggatattatcagaagatgcattcagcggttcttttctctgaacgacggccagagctggagccagaagcgccactatcaagaagtgacgtccgacggtatattttctcctactgcttatctgaacgggcacgccgagacaccagtgtacaggtttagcctggctgatggaacaattgtgactgcacagacaaagagtaaactgttccggaaccctgtcacgaatgacaggcacggattcgtttccacccactttctccaacgcgaacagaatggctatcggcccaacccaaaccccgtcggacagggcatccgaccgcccatggctggttgcaactcatcagtgggcggaatgtccatgtcacccaaccagggcctacagatgcctagctcacgagcgtacggactcgccgaccccagcacaactggacaaatgtccggagccaggtatggcggatcaagtaacatagcctcacttacaccagggccaggtatgcagtccccaagcagttaccagaacaacaattatgggctaaatatgagctctccaccccacgggtcccccgggctggctccaaaccagcagaacataatgataagtcctcgcaacagaggatcaccaaaaatagcgagccatcagttctccccggtcgctggggtgcacagcccaatggcaagcagcgggaatacgggaaaccattcctttagctcttcttccctgagtgctttacaggcaattagcgaaggggtagggacgtcattgctgagcaccctttcaagtccagggccaaaactagataactctcccaacatgaatatcacccagccttccaaagtgagtaatcaagacagcaagtcgccccttggtttttattgtgaccagaaccctgtggaatctagcatgtgccaatccaactctagagaccatctgtccgataaagagtcaaaagagtcatctgttgagggcgcagagaaccagaggggtcccctggagagcaagggccataagaaactacttcagctgctcacgtgttctagtgacgatcgcggtcattcctcccttaccaattcacccttagatagctcatgcaaagaaagtagcgtatccgtcacttccccaagtggagtctcatcctcaacatccgggggcgtgtcctccacctcaaatatgcatggatccctgctgcaggaaaaacaccgcatcctgcacaagctgcttcaaaacggaaacagccccgcggaagtggccaaaattaccgccgaagctacgggcaaggatacgtcgtcaatcacatcttgtggtgacggtaacgtggtgaagcaggagcagctctccccaaaaaagaaagaaaacaatgcattgctgagatacttgcttgacagagatgacccctctgacgcgttgagcaaagaattgcaacctcaggtcgagggagtcgacaataagatgtcccagtgtacaagcagcactatcccttcatcgtcccaggagaaagatcccaagataaagacagagacttcagaggagggttcaggtgacctggataatttagatgcaatactaggagatctaacctctagtgacttctataacaacagcatcagctctaatggctcacaccttggtaccaagcagcaggtgtttcagggcaccaatagcctcgggcttaagagcagtcaaagcgttcagtcaatacggccaccctataatcgcgccgtgagcctcgattcgccagtgagcgtgggctcttctccaccagtgaaaaatatctccgcctttcccatgcttccgaaacaacctatgttggggggtaacccacgcatgatggactcgcaggagaattatggctcgagcatgggcgactggggtctgccaaacagtaaagcaggacggatggagccgatgaattccaacagtatgggccgtcccggcggagactacaatacctcgctgccccggccagctcttgggggatctatccctactttgccgctcagatctaactcaattcctggggcacgacccgtgttgcagcagcagcaacagatgcttcagatgcgcccgggcgagatccccatggggatgggagctaacccctacggacaagctgccgctagtaatcaactagggtcttggcccgatgggatgctcagcatggagcaggtgtcccacggtacgcagaatagacctctcctccggaacagcctggacgacttggttggaccgccatccaatctggaaggccagagcgatgaaagggcactgctggaccagcttcacactctcctatcaaacacagatgccacgggtctggaggagatcgatagggccctggggatccctgaactggtgaatcaggggcaggctctggagccaaagcaagacgcctttcagggacaggaggccgctgttatgatggaccaaaaggccggtctctacgggcaaacctacccagctcaaggacctcccatgcagggcgggttccatctccagggtcaatccccaagcttcaattctatgatgaatcaaatgaatcaacaaggaaactttcccctccaaggaatgcacccacgagcaaacataatgagaccacgcaccaacactccaaaacagctcagaatgcagctgcagcaacgcttgcagggacagcagttcctgaaccaatctcgccaggcactcgagttgaagatggaaaacccaaccgctggtggcgctgccgtgatgaggcctatgatgcagccgcagcagggcttcctgaatgcccagatggtggctcagcggagtagggaattattatcccaccacttccggcagcaacgcgtagcaatgatgatgcaacaacagcaacagcaacaacagcagcagcagcagcagcaacaacagcagcagcagcaacagcagcagcagcagcagcaacagcagacacaggccttctcaccccctcccaacgtgaccgcaagcccgagcatggacgggttgttggccggcccgacgatgccacaggctccgccccaacaatttccataccagccaaactatggcatgggccagcagccagatcctgcctttggacgggtgagttcgccacccaacgcaatgatgtccagccggatgggcccctcccagaaccccatgatgcagcaccctcaggctgccagtatttaccagtcatcagagatgaagggctggccatcagggaacctggcacgcaatagcagtttctctcagcagcagtttgcacaccagggcaatcccgccgtctattccatggttcatatgaacggaagtagcgggcatatggggcagatgaacatgaaccctatgcctatgtctgggatgccaatgggaccagaccagaagtactgttag

SEQ ID NO: 126897 - DNA, 4275 bp, synthetic construct
  misc_feature 1..4275: note = Description of Artificial Sequence: Synthetic coding sequence
  source 1..4275: mol_type = other DNA
atgtcaggcttgggcgagaatctggacccgctggcaagcgattctaggaagcgcaagcttccttgtgacaccccaggccagggcttgacttgcagcggtgagaagaggaggagagagcaggagtcaaagtatatcgaggaactcgccgagctcatcagcgctaatctgtcggacatcgacaactttaacgtgaaacccgacaaatgtgcaatccttaaggagacagtaagacagattcgacagattaaggaacaaggtaaaaccatttctaatgatgacgacgtgcaaaaagcggatgtttccagcacagggcagggcgtgatcgacaaggacagcctgggcccattactgctgcaggccctggacggcttccttttcgtggttaaccgggacggcaacattgtcttcgtcagcgagaacgtgacccagtacctgcagtataagcaagaggacctcgtcaacactagcgtgtacaatatcctccacgaggaagatcggaaggacttcctcaaaaatctgccaaaatccactgtgaatggagtgagctggacaaacgaaacgcaaagacagaagtcacacacgtttaactgccgaatgttgatgaagaccccccacgacatcttggaggacattaatgcgtcccctgaaatgagacaacggtacgaaaccatgcagtgttttgcactctcacagccacgcgcaatgatggaggaaggggaggacctacaatcttgtatgatctgcgtggcaagacgaatcacaactggggagaggactttcccctccaacccggagtcctttatcacacgccatgacttgagtggaaaggtggtgaatatcgacacgaattcattacgcagctctatgcggccaggcttcgaagacattatccgacgttgtatccagcggttcttcagtctgaatgacgggcagtcctggagccaaaagaggcactaccaggaggcatacctcaatggccatgcagaaacacccgtatatcggttttccctggcagacggtacaatcgtcacagctcagactaaaagcaagctctttagaaaccccgtgaccaatgacaggcatggttttgtttctacacacttcctgcagagggagcagaatgggtacagacccaaccccaaccccgtcgggcaaggcataaggcccccaatggcaggctgcaactcctcagtcggtgggatgtcgatgtccccaaaccagggcctgcagatgccctcctctcgggcatatggcctggcagatccttcaactacgggacaaatgtcgggcgcccggtatggaggctcgagtaacattgcatctctgacacctggtcccggtatgcagagcccgtccagctaccaaaataataactatggtctgaacatgagctccccccctcacggcagcccaggtctggcgcccaatcagcaaaacataatgattagcccacggaacagggggtcaccaaagattgcctcacaccagtttagcccagtggccggggtgcatagccctatggcatcatccggcaacacaggaaaccacagcttctcttctagttcactgtccgctctccaggccatcagcgaaggagttgggacttccctgcttagtaccctctcgagtccaggcccgaaattagacaattctccaaatatgaacatcacccagccctccaaagtgtctaatcaggatagcaagtccccactggggttttattgcgaccagaatccagtggaatcaagtatgtgccaaagcaacagccgggatcatctgagtgataaggaatccaaagaaagttcggtggagggagctgaaaatcagcgaggccctctggaaagcaaaggccataaaaaactgctccagctccttacctgttcctctgacgacaggggccatagcagtctcaccaatagtcctttggactcatcctgcaaggagagctcagtttcagttacttccccctccggagtatcctcaagtacatccggaggggtgtcctctacaagtaatatgcacggctcactccttcaagagaagcatagaatccttcataagcttcttcagaacggaaatagcccagccgaggtggctaagattaccgcagaagccactgggaaagacaccagcagtattacatcttgcggtgacggaaacgtggtgaagcaggaacagctttcccctaagaagaaggagaataacgccctcctccgctacttacttgacagggacgacccaagcgacgcactctcgaaggaactgcaaccgcaagtcgaaggcgtggataacaagatgtcgcagtgtacatcctccaccataccttcatcaagtcaagagaaggatcccaagatcaagacggagacttcagaggaagggtcgggcgacctggacaaccttgatgccatcctgggtgatttaacctcttccgatttttacaacaatagcatctcttccaacggaagtcacctcggcacaaagcagcaggtgttccagggcaccaacagcctgggactgaagtctagtcagtcagtccagtcaataaggcccccttacaatcgtgccgtgtctctggactcaccggtctctgtcgggtcttcccctcctgtgaagaatatttccgcattccccatgctgcctaagcagccaatgctgggaggaaaccctcgtatgatggactcccaggagaactacggttcttccatgggaggtccaaaccgtaatgttacagtgacacagaccccaagctctggcgattggggccttcccaactctaaagcaggccgcatggaacctatgaacagcaattcaatgggccggcctggcggcgattacaatactagcctaccacgaccggcccttggagggagcatacctaccctgccactgcgcagcaattccatacctggagcgcggcctgtcttacagcagcagcagcagatgttgcagatgcgtccaggggagattccgatgggcatgggcgcgaatccatacggacaggcagccgcctccaatcagctagggtcttggccggacggcatgttgtctatggaacaggtgtcacacggcacacaaaaccgacctttgctgagaaacagtttggacgatttggttggccccccctcgaatctggaggggcaatccgatgagcgagctctgttggatcaactccatacccttctcagcaatacagacgcaactgggttagaggagattgacagagcgctcggcatccccgagctggtgaaccaaggacaggccttagaaccaaaacaagacgcattccagggccaagaggcagccgtgatgatggatcagaaggccgggctgtacggccagacttaccctgctcaaggccctccaatgcagggcgggtttcatctgcaaggacaatccccttcctttaattctatgatgaaccagatgaaccagcaaggaaacttccccttgcagggcatgcacccgcgcgcaaatataatgaggccccgcacaaatacacccaagcagttgcgcatgcaattacagcaacgtctgcagggacagcagtttctgaaccagagtcggcaggcgctggaattaaagatggaaaacccgaccgccggaggcgctgctgtcatgcgccctatgatgcaacctcaggtctcctcccagcagggattcctgaacgcccagatggttgcccagcgatcccgggaattactgagtcaccattttaggcagcagagagtggcgatgatgatgcagcagcagcagcagcagcagcaacagcagcagcagcaacagcagcaacaacaacagcagcaacagcagcagcaacagcagcagcagacgcaggcattttctcctcctccgaatgttaccgctagcccgtctatggacgggctactggctggcccaaccatgcctcaagcccctccccagcagtttccataccagccaaactatggcatgggacagcagcccgatccagccttcggccgtgtctcctccccgcccaacgctatgatgtcttctagaatggggccgagccaaaatcccatgatgcagcacccacaggccgcgtctatttatcagtcatctgagatgaaaggttggccctcaggtaatctggcccggaactcgtcattttcccaacagcagtttgcccaccagggcaaccccgcagtgtattccatggtgcacatgaacggcagctccgggcatatggggcagatgaatatgaaccccatgcccatgagtggtatgcccatgggacctgatcagaaatactgctag

SEQ ID NO: 126898 - DNA, 4263 bp, synthetic construct
  misc_feature 1..4263: note = Description of Artificial Sequence: Synthetic coding sequence
  source 1..4263: mol_type = other DNA
atgtcaggtctgggtgagaacctggaccctctggctagcgactccagaaagcgaaaactgccttgcgacactcctggccagggtctgacctgcagcggcgaaaaaagaagaagagagcaggagtctaaatacatcgaggagctggccgagctgatcagcgccaaccttagcgatatcgataatttcaatgtgaagcccgacaagtgtgcaatattgaaagagacagtacgccagatcagacagattaaagagcagggcaaaaccatctccaatgacgatgacgtgcagaaggccgatgtgtcaagcaccggtcaaggggtgatcgacaaagacagcttggggcctctgttgctgcaggcacttgacgggttcctgtttgtggtgaacagggatggaaatattgtctttgtcagcgagaacgtcacccaatatttacaatataagcaggaggatttagtcaacacatccgtgtacaacattttgcatgaggaagataggaaggattttctgaaaaatctgccgaagagcaccgtgaatggggtgagctggacaaatgaaacacagcgacagaaatcgcataccttcaattgcaggatgctcatgaaaactccacacgacatcttggaagatattaatgccagccccgaaatgagacaacgctatgaaaccatgcagtgtttcgcactgagtcaacctagggcaatgatggaagagggtgaggatcttcagagctgcatgatttgcgtggcgagaaggatcacgacaggcgagaggacctttccttccaatcccgagagctttatcacccgacacgacctgtcagggaaagttgtcaatattgatactaactctcttaggtcctctatgcgcccaggctttgaggatatcattaggcgttgtattcaacggtttttctcgcttaacgacggccagtcatggtcacagaagcgccattaccaagaagcttaccttaacggacacgcggaaacacccgtctaccggttttctctggctgatggcaccattgtgacagcacaaacaaagtcaaagctcttcaggaatcccgtgaccaacgacagacatggattcgtgagtacacacttcctgcagcgtgaacagaacggatatagacccaatcccaatcctgtggggcagggaataaggcctccaatggctggatgtaactctagcgtgggtggcatgagcatgtcccccaatcagggcttgcagatgccatcctctagggcctatgggctggctgatccttctaccaccggtcaaatgtcaggcgccagatatggaggatcaagcaacattgccagcctgactcctggccccggcatgcagtccccctccagttaccagaacaacaattacggactgaatatgagctccccaccccacggctctcccggcctggcccccaatcagcagaatatcatgatttcccccagaaatcggggcagccccaaaatcgcctcacatcagttctccccggtggctggggtgcacagtcccatggccagcagcgggaatacaggaaaccacagctttagtagttcctcccttagcgccctgcaggctattagtgagggcgtcggaacctcacttctttccactctcagttcccccggccccaagctggataactcgcccaacatgaatatcacacagcccagtaaggtgtccaatcaagacagcaagtcccccctcggcttctactgtgaccaaaaccctgtggaatcatctatgtgccagagtaactctcgagaccatctgtccgataaggaatctaaagaaagttctgtggaaggggctgagaatcaacgaggaccattggaatctaaagggcataagaagcttcttcagctgctgacatgctcatccgacgaccgcggccattccagcttgaccaattctccgctggacagtagctgcaaggaatcctcagtaagtgtgacaagcccgagcggagttagttcctctacatctggcggtgtttccagcacctctaatatgcatgggtccttattacaagagaaacaccgaatactgcataagctcctgcagaatggcaactctcctgcagaggtcgccaagataactgctgaggctacaggtaaggacacatcgagcatcacgagctgtggcgacggtaacgttgtcaagcaggagcaactgtcaccaaagaagaaagaaaacaatgcattactgagatacctgttggaccgggatgatccctctgatgcgctcagcaaggaactccaaccacaggtcgagggcgtggacaacaagatgtcacagtgtacctcttctaccataccgtcctccagtcaggaaaaggatcccaagatcaagactgaaaccagcgaagaaggttcaggcgacctcgacaacctcgacgcgattctgggggaccttacctcttccgacttctacaataacagcatatcaagcaacggctcccacctcgggactaagcaacaggtgtttcaggggactaattctctcggccttaaatcttcacagtccgtgcagagtatcaggcccccttacaatcgagccgtgagtctggatagccctgtgtccgtgggcagctccccgccagtcaagaatatctccgcatttcctatgcttccaaaacagcccatgctgggcgggaaccccagaatgatggactcacaagaaaattacggctcttctatgggaggtcccaataggaatgtgaccgttactcaaacaccctccagtggggattgggggctccctaattccaaagccggtagaatggagcccatgaacagtaattccatgggacggccaggaggtgactacaatacttcattacctcgcccggctctgggcggttcaattcctacactgccccttagatcgaattcaatccccggggcccgcccagttttacaacagcagcagcagatgcttcagatgaggcccggagaaattccaatgggaatgggggcgaatccttatggccaggccgcagcttctaatcagctgggatcctggccagatgggatgctgagtatggaacaggtgtctcacggcacacagaataggccattgctgcggaactcactggatgatctggtggggccacctagtaatttggaggggcagtcggacgagcgcgctctattagaccagctgcacactttactgtccaatactgacgccacgggtctggaggaaattgacagagccctggggatacccgagctggtgaatcaaggacaggcactggaaccaaaacaggatgcctttcaaggtcaggaggctgcagtcatgatggatcagaaggccggtctctacggacagacatacccagcccaaggaccgccaatgcaaggaggttttcacttacaggggcagtcccctagctttaatagtatgatgaatcagatgaatcagcagggcaacttcccactgcagggtatgcaccctagagccaatattatgcgccctcgcactaacaccccaaagcaactgcgcatgcagctgcagcagcggttgcaaggccagcaattcctcaatcagtccaggcaagctctcgaactaaagatggagaaccctactgccggtggagccgcggtgatgcgaccgatgatgcaacctcagcagggcttcctgaacgctcaaatggtagcccagaggagcagagaactgctgtcccatcactttcgacaacagagagtagctatgatgatgcagcagcagcagcagcagcaacagcagcagcagcagcaacagcagcagcagcagcaacagcagcagcagcagcagcagcagcagcagacgcaagctttctccccacctccaaacgtgaccgcctctcccagtatggatggcctgctcgccggccccaccatgccccaggcacctccccagcagttcccctatcaacctaactacggtatgggccaacagcctgaccccgcatttggcagagtgtccagtccacctaacgctatgatgtcctcaaggatgggcccctctcagaatcctatgatgcaacacccgcaggccgccagcatttatcaatcctccgaaatgaaaggctggccgagtggcaacctggctaggaattcaagtttctcacagcagcaatttgcccaccaggggaatccagccgtttactctatggtgcacatgaacggatcttcagggcatatgggacagatgaatatgaatcctatgcctatgtcaggcatgcctatgggacccgaccagaaatactgttag

SEQ ID NO: 126899 - DNA, 774 bp, synthetic construct
  misc_feature 1..774: note = Description of Artificial Sequence: Synthetic coding sequence
  source 1..774: mol_type = other DNA
atgatggaggaaggagaagacctgcagtcatgtatgatttgcgtcgcacgccgaattacaacaggtgagaggacttttcccagtaatcccgagtcatttatcacacgtcatgacctgtccggtaaagtggtgaatattgacacaaattcactccgcagttcaatgagaccagggtttgaggacataattcgacggtgcattcagcgatttttcagtctgaacgatggccagtcctggtcacaaaaacggcattaccaggaggcctacctgaatggtcatgcagagactcccgtttaccgattctctctggctgacggtacaatcgtgactgcacagaccaaaagcaagttgtttaggaacccggtgacaaacgaccgacatggattcgtgagtactcacttcctgcaacgagagcagaatggatatcggccaaaccctaaccccgtcggccaagggatccggccgcccatggcaggatgcaacagtagtgttggtggaatgtcaatgagccccaaccaaggccttcagatgcctagttcccgcgcttacggactagcggaccctagcactaccgggcaaatgagtggcgcccggtatggaggatcgtccaatatcgcttccctcactcccggcccaggcatgcagagcccatcttcctaccaaaacaacaactacggcctaaacatgagtagtcccccccatggttcacccggtctagctccgaaccagcagaatatcatgattttgctagtgatcgtgggtgtgcagcgctag

SEQ ID NO: 126900 - DNA, 864 bp, synthetic construct
  misc_feature 1..864: note = Description of Artificial Sequence: Synthetic coding sequence
  source 1..864: mol_type = other DNA
atgaacacgtttcaggaccagtctggaagctcttccaacagagagccgctgctgcgatgtagtgacgctcggcgtgacctggagctcgccatagggggtgttttgcgggccgaacagcaaattaaggataatttaagagaagttaaagctcagattcacagttgtatatctagacacctcgagtgtttgagaagtcgcgaagtttggctgtacgagcaagtggacttaatataccagttaaaagaagaaactcttcaacaacaggcacagcagttatactctctgctaggccagttcaattgtctaactcaccagctggagtgcacccagaataaagacctggccaaccaggtgtctgtctgtctggagaggctgggctcactgacccttaagcctgaggatagcacagtgttgctctttgaggccgatacaatcacactacgccagaccataacgacctttggaagccttaagacaatacagattcccgagcacctaatggctcacgcctcctccgcgaacatcggaccatttctggaaaaaagggggtgcatctcaatgccagagcagaaatcagcatctggcatagtggccgtaccatttagcgagtggctgctcggaagcaagccggcctcaggttaccaggctccctacattccatctactgacccgcaggattggctgacgcagaagcagacactggagaactctcagcaggaggtgttgctgaactcccctctacaggaagagcacaactttccccccgaccactatggattacctgctgtctgtgacctcttcgcgtgtatgcagctgaaagtggacaaagagaagtggttatataggacaccccttcaggtttag

SEQ ID NO: 126901 - DNA, 1845 bp, synthetic construct
  misc_feature 1..1845: note = Description of Artificial Sequence: Synthetic coding sequence
  source 1..1845: mol_type = other DNA
atgaacaccttccaagaccaatccggatcgtcgtcaaatagggagcctttactgaggtgtagcgacgcccggcgggatttggagctggcgatcggaggagtactgagggccgaacagcagattaaagataaccttagggaggttaaagcccaaattcatagttgcattagtcgtcatctggaatgcctgcggtctcgcgaagtctggctgtatgaacaagttgacctcatttaccagctaaaagaagagacactgcagcagcaggctcagcagctctattcattgctgggccaattcaattgtctgacccaccagctcgagtgtactcaaaataaggacctcgcaaatcaggtgtccgtgtgcctcgaacggttaggctccctaaccctgaaaccggaagacagcaccgtattactgttcgaagcagacaccatcactctcaggcagaccatcacgacattcgggagcctgaaaacgattcagatacctgaacatttgatggcccatgccagcagtgccaatatcggaccgtttctcgagaaaagggggtgcatatctatgcctgagcaaaagtccgctagcgggattgtcgcagtgccctttagcgagtggctgcttggatctaaaccagcctccggttaccaggcaccgtacataccctcaactgacccccaagattggcttacacagaagcagactctcgagaactctcagacaagttcccgtgcttgtaattttttcaacaacgtgggtggaaatctgaagggcctggagaactggttactgaagtcggaaaagagctcataccagaaatgtaactctcatagcaccacgtctagtttctctattgaaatggaaaaagtgggcgatcaggagcttcctgatcaagacgagatggatctgagtgactggctcgtcactccccaagagtcacataaactccgaaagcctgagaatgggagtagggaaacgagcgagaaatttaagctgctgttccagagttacaatgtgaacgactggctcgtgaagaccgactcttgcacgaactgccagggcaaccagcccaagggcgtagaaatagagaacttggggaacctcaaatgtctaaacgatcatctggaagccaagaaacccctgtctacccccagtatggtcacggaagattggctcgttcagaatcatcaagacccctgcaaggtggaggaagtctgcagggctaatgaaccctgcactagctttgcagaatgcgtgtgtgatgagaactgtgaaaaggaagcgctctacaagtggcttctgaagaaagaaggcaaagataagaacggtatgcctgtggaacccaaacctgagcccgaaaaacataaagattccctgaatatgtggctttgccctcggaaggaagtaatcgaacagactaaagccccaaaggccatgacaccaagccgcatcgctgattcatttcaagtaataaagaatagccccttatcagaatggctgatacgtcccccatataaagaaggctcgcccaaggaggtgcctggtaccgaagaccgagcaggtaagcagaaatttaaaagccctatgaacacttcttggtgctcgttcaacacggccgactgggtactccccggtaagaaaatgggcaacctctctcaactgtctagcggcgaagacaaatggctgctcagaaagaaggctcaggaagtcctgctgaacagccccctccaggaggagcacaactttccccccgaccattatggtctgccggcagtgtgcgacctctttgcttgcatgcagttgaaggtagacaaagagaagtggttatacaggaccccactgcagatgtag

SEQ ID NO: 126902 - DNA, 1728 bp, synthetic construct
  misc_feature 1..1728: note = Description of Artificial Sequence: Synthetic coding sequence
  source 1..1728: mol_type = other DNA
atgaatacttttcaagatcagtctggatcttccagcaacagagaacccctgcttcgctgctctgacgcccgacgggacctggaactagcaatcggaggcgtgctgagagcagaacaacagattaaagataatttgcgggaggtaaaagcccagatccatagctgtatcagcaggcatctcgaatgccttaggtcccgggaagtctggttatacgaacaggtagacctgatataccagctcaaagaggagacgctgcagcaacaggcacaacagctatacagtctccttggtcagttcaactgcttgacacaccagctcgagtgcacacagaacaaggatctggcgaaccaggtcagcgtctgcttggagaggctgggctctctaactctcaagcctgaagactccaccgtcctcctattcgaagcagataccatcactctgcgccaaaccattactaccttcggatcactgaaaacaatccagattccagagcacttgatggctcacgcatctagtgccaacatcggcccattcctcgaaaaacgcggctgcatttctatgcctgagcagaagagtgccagtggaattgtcgccgtccccttttcggagtggctcttggggagtaagcccgcatcaggatatcaggcaccttatatcccatccaccgacccccaggattggctgactcagaaacagaccctggagaacagccagacatccagtcgtgcttgcaacttcttcaacaatgttggcggaaatctcaagggcctggaaaattggctgctgaaatcggaaaagagctcctaccagaagtgtaatagccattctactacctccagtttctcgatcgagatggaaaaggtaggcgatcaggagcttccagatcaagatgaaatggatttgagtgattggctggtaacaccccaggagtcacacaagcttaggaagcccgaaaacgggtcgagggagacttctgaaaagttcaaactcctgttccagtcgtacaatgtgaacgactggttggttaagacagactcctgtacgaattgtcagggtaaccaacctaagggagtggaaatagagaatctgggcaatctaaaatgcctgaatgaccatctagaggctaaaaagcccctctctaccccaagtatggtgaccgaggattggttagttcagaatcaccaggacccatgtaaggtggaagaggtctgtagggcaaatgagccatgtacctccttcgctgaatgtgtatgtgatgaaaattgcgagaaggaggccttatacaagtggctgctgaagaaagagggcaaagacaagaacggcatgccagtggagccaaagcctgagcctgagaaacacaaggatagcctgaatatgtggctgtgcccgagaaaggaggtcatagaacaaacaaaggcacctaaagccatgacgccctcccgaatcgctgactcattccaggtcatcaagaactccccgttgagcgagtggctaattcgacctccctataaagaaggcagcccaaaagaggtaccagggacggaggatagggccggaaaacagaaatactacctgatccacctgtataggaggaacatcacctcaccgcagaccatcatggcatctttacagtttgtgatatctctgcccgtatgctcattaaaactgattaaacgctctggatacatcgaactgctctatcgctgtgaaggtatggacaagtcctag

SEQ ID NO: 126903 - DNA, 1845 bp, synthetic construct
  misc_feature 1..1845: note = Description of Artificial Sequence: Synthetic coding sequence
  source 1..1845: mol_type = other DNA
atgaacaccttccaggaccaatctgggagtagtagtaatagggagcccttattacgctgcagtgacgcaaggcgggatcttgagttggccatcgggggcgtgctaagggcggagcaacaaatcaaggacaacctccgagaggtcaaagcacagattcacagctgtatctcgcgccacttggaatgtctgcggtctagagaagtctggttgtacgaacaggttgacctgatttatcaactcaaggaggagacactgcagcagcaagcacagcagctatactccctccttgggcagttcaattgtctaacacaccagctggagtgcacccaaaataaggacttggcaaaccaagtgagcgtttgtttggaacgcctgggatcactgaccttgaaacctgaggatagcactgtgctgctgttcgaggcagataccatcacacttagacaaactatcactaccttcggcagtttaaagacaattcagattccagagcacttgatggcccatgcctctagtgccaatatcggcccatttttagaaaaaaggggctgtatcagcatgccggagcaaaaatctgccagcggcattgtagctgtccccttttccgaatggcttctcggctctaagcccgcaagcggctaccaagccccttatattccttcaaccgatccacaggactggctgacacagaagcagacccttgagaatagtcaaacctcttcgagggcgtgtaacttttttaacaatgttgggggtaacttgaagggcttagaaaactggctcctcaaatcggaaaagagcagctaccaaaaatgcaactcacattctactacaagttcttttagcatcgaaatggagaaggtaggggatcaggaactccccgatcaggatgaaatggacctatcagattggctagttaccccacaggagagccacaaactaaggaagcctgagaacggctcaagggagaccagcgagaaattcaaattgctgttccaaagctacaatgttaacgactggttggttaagaccgactcctgtaccaactgccaagggaaccaacctaaaggtgttgagatcgaaaacttgggtaacttgaaatgtctaaacgatcacctggaggctaagaaacccctctctactcctagcatggtgactgaggactggctcgtgcagaatcatcaggatccatgcaaagtagaggaggtgtgcagagcaaatgaaccttgcacatcattcgctgagtgtgtgtgtgacgaaaactgtgagaaggaggcactgtacaagtggctgcttaaaaaggaagggaaggacaagaatggaatgccagtggagcccaaaccggaaccagagaagcataaagatagcctcaatatgtggctgtgtccccgaaaggaagtcattgagcagaccaaggccccgaaggccatgactccgagcaggattgctgacagttttcaggtgattaagaattcgcctctaagcgagtggctcattagacccccctataaagaaggttcaccaaaagaggtccctggcaccgaggatagagccggtaagcagaaattcaagtctcccatgaatactagttggtgttccttcaatactgcggattgggtgttgccaggaaaaaaaatggggaatttgtcccagctctctagtggcgaggacaagtggctcctccggaagaaggcgcaggaagtgctgttgaacagtcccctgcaggaagaacataacttcccgcccgatcattacgggctcccagctgtctgcgacctattcgcgtgtatgcaactgaaggtagataaggagaaatggctttataggaccccactccagatgtag

SEQ ID NO: 126904 - DNA, 1347 bp, synthetic construct
  misc_feature 1..1347: note = Description of Artificial Sequence: Synthetic coding sequence
  source 1..1347: mol_type = other DNA
atggcacatgcctcttcggcgaatattggtccgttcctcgagaaacggggttgcatctctatgcccgagcagaaatccgcatccgggattgtggcagtaccgttcagtgagtggctgctgggatctaagcccgcaagtggctaccaggccccatacatcccgtccaccgacccgcaggactggctgacccagaaacagaccttggaaaacagccaaaccagcagccgagcatgcaacttctttaataatgttggtgggaatctgaagggcctcgaaaattggctgcttaagagtgaaaaaagctcgtaccagaagtgtaacagtcacagcactacctcttctttctcaattgagatggagaaagtaggagatcaggaattaccagaccaggacgaaatggatctcagtgattggctagtgacccctcaagaatcacataaactgcggaaacccgaaaatgggtcacgggagacttctgagaaattcaagctgctgtttcaatcctacaacgttaacgactggctggtgaagaccgactcctgtactaattgtcagggtaatcagccaaagggtgtagaaattgaaaacttgggcaacctgaaatgcctgaatgaccacctcgaagctaagaaaccactttcaacgccctccatggtcactgaagactggctggtgcagaatcatcaagacccctgcaaagtggaggaggtgtgccgagcgaacgagccatgtacttcatttgctgaatgcgtctgcgatgagaattgtgagaaggaagccctgtacaaatggctgctcaagaaggaaggcaaagataagaacggcatgcctgtggagccgaaacctgagccagagaaacacaaagactccctgaacatgtggctgtgtcctcgtaaagaggtcatcgaacagacgaaggctccaaaagcgatgacccccagccggatcgctgatagcttccaggtcatcaaaaattcgcccctgtcagagtggctgatacggccgccgtataaggaagggagcccaaaagaagtccctggcaccgaggatcgcgccgggaagcaaaaatttaaatcaccaatgaacacgtcatggtgtagcttcaataccgccgactgggtgctgccaggtaagaagatgggaaatctctcccagttgtcttccggggaggacaaatggctgctcaggaaaaaggcgcaggaggtgctgctgaatagtcccctccaggaggagcacaatttcccccccgaccactatggcttgccagctgtatgcgatctgttcgcatgtatgcagttaaaggtggacaaagagaagtggttgtacaggacccctctacagatgtag

SEQ ID NO: 126905 - DNA, 1545 bp, synthetic construct
  misc_feature 1..1545: note = Description of Artificial Sequence: Synthetic coding sequence
  source 1..1545: mol_type = other DNA
atgaacaggtggactctattcatttccttgaagcgccgccactttaattctaggttaagcagctccactcggttaggatccctgaccctgaagccagaggattcaaccgtcctcctgtttgaagccgacaccatcactctccgacagacaataaccaccttcgggtccctcaagactatccaaattccagaacacctgatggctcacgcctcaagcgcaaacattggaccctttctggagaaaagaggatgtatctctatgcccgagcagaagtccgccagcggaattgtagctgttccattctccgaatggttgttggggagtaaacctgcgtcaggataccaggcaccctatatccccagtactgacccacaagattggctgacccagaaacaaactctggagaacagccagactagtagccgggcttgcaactttttcaacaacgtgggtggtaacctgaagggactcgaaaattggcttctgaaaagtgagaaatcatcatatcagaaatgcaatagtcactccaccacctcctcattcagtattgagatggagaaggtaggagaccaagagctccccgaccaggacgagatggacctctctgattggctggtgacacctcaagaatctcataagctcaggaaacccgaaaatggctctagagagacatcggaaaaatttaagctgctgttccagtcttataatgttaatgattggttagtgaagactgactcctgtaccaactgtcagggcaatcagcctaaaggcgtggaaatagaaaacctcggtaatctgaagtgtttaaatgatcacttagaagcgaagaagcctttgtcgacaccatctatggtcactgaagactggctggtgcagaaccaccaggatccgtgcaaagtggaagaagtttgccgagcaaatgagccatgtacgtcttttgctgagtgtgtatgcgatgaaaactgtgaaaaggaagctctttacaagtggctcctgaaaaaagagggcaaggataagaacgggatgcccgtcgagccaaaaccagagcctgagaagcacaaagatagcctcaacatgtggctctgccctcgcaaagaggtcatcgaacagactaaagccccaaaggcaatgacaccttcgaggattgctgactcattccaagtgataaaaaactctccattaagtgaatggctaattcgacctccctataaagaagggtctcctaaggaggttccaggcaccgaagacagagcggggaaacagaagttcaagtctcctatgaacaccagctggtgctcatttaatactgccgattgggttctgccgggaaaaaaaatggggaacctgtcccagctatcctccggggaagacaagtggcttctgcgtaagaaggctcaggaagtattattgaattcccccctccaagaggaacacaacttcccgcctgatcattacggactgcctgccgtctgtgatttatttgcctgtatgcagctgaaagtagacaaggaaaaatggctgtaccggacgcccctgcaaatgtag

SEQ ID NO: 126906 - DNA, 795 bp, synthetic construct
  misc_feature 1..795: note = Description of Artificial Sequence: Synthetic coding sequence
  source 1..795: mol_type = other DNA
taatgtacccctgcttgggctgccgagttggatagcgtctccaaacaaaaaaagaatccaaagcccacatttaagaaaaagactgaggagcggacctgtgaggtgaaaaaagtcagtcgactgggctctctgaccctgaaacctgaggactctacggtactacttttcgaagcggatacaataacgctcaggcagaccataaccactttcggttctctgaagactatccagattccagaacatttaatggctcatgccagcagcgcaaacatcgggcccttcctggaaaaacgaggctgtatcagcatgccggagcagaagtcggcttctggcatcgttgctgtgcctttctcagagtggctgttaggtagcaagccagcatccgggtaccaggctccttacatccccagcactgatccccaggattggctgactcagaaacaaaccctagaaaactctcagacatctagtagggcctgtaatttttttaataacgtgggcggtaatctgaagggactggagaattggctactgaagtctgagaagagcagctaccagaaatgtaattctcattccacaacaagcagtttttccatcgaaatggagaaggtgggggatcaggaactcccagatcaagatgagatggatctgagcgattggctggtgaccccccaggagagccataagctgcgaaagcctgaaaacgggtcccgagaaacgtcggaaaagtttaaacttctgttccagagttacaatgtgaacgactggcttgtaaaaaccgacagctgcacatag

SEQ ID NO: 126907 - DNA, 1893 bp, synthetic construct
  misc_feature 1..1893: note = Description of Artificial Sequence: Synthetic coding sequence
  source 1..1893: mol_type = other DNA
atgggagcacagctgacgacattcgcattggctggagccgtccgaagaatgaatacatttcaagaccagtctggatcgtcctcaaacagagaaccgttgctgagatgctccgatgccagacgtgacctggaactggccatcggcggcgttctgcgggcagagcagcaaattaaggacaacctccgagaggtgaaggcccagatccacagttgcatttctaggcacctcgaatgtctgcgcagtcgggaggtgtggctttacgaacaggtagatctgatctaccagctcaaagaggaaaccctgcaacagcaagcacagcagctgtactccctcttggggcagttcaactgcttgacccaccagctcgaatgtacacagaataaagaccttgctaatcaggtgtctgtttgtctggagagactcggatccctcactctgaagcccgaggacagtaccgttctgctgttcgaggccgatacgatcactctgcgtcaaactatcacaactttcggttcccttaagactattcagatccccgagcacctcatggcgcatgctagttcagccaacatcgggccatttttggaaaaacgaggatgcatcagcatgccagagcagaagtctgcgagcggtatcgtggcagttcctttctctgagtggctacttggctcaaaacccgccagtggttaccaggcgccctacatcccgagcacagatcctcaggattggctgacacagaagcagaccttggaaaactcccagacatcgtctagagcttgcaactttttcaataatgtgggagggaacttgaaaggcttagaaaattggctgctgaagtcggagaagtcatcctaccagaagtgcaactcccacagcacaacatcaagcttttcaattgagatggaaaaggtgggcgatcaggagttgcccgaccaggacgagatggaccttagtgattggctggtgacccctcaagaatcacacaagttacgcaagcctgagaacggttccagggagacatctgaaaagttcaagctgctgtttcagagctataatgtcaacgactggctcgttaaaacagatagctgtactaattgccagggcaaccagcccaaaggcgtcgaaatagaaaacctgggaaacctgaaatgtcttaatgaccacttggaggctaaaaagcctctttctactccttccatggtgacagaggattggctggttcaaaatcatcaggacccctgcaaggtggaagaggtgtgcagagctaacgagccttgcacctcattcgcagagtgcgtgtgcgatgagaactgtgagaaagaggcactgtataaatggttattgaaaaaggagggaaaagataagaatggtatgccagttgagcctaaacctgaacccgaaaagcataaagactcactgaacatgtggctttgcccgcggaaggaggttattgaacaaactaaagctccaaaggccatgactccttcaaggatcgctgactcttttcaagtgattaagaattcacccctctccgagtggctcattcgacctccctataaggaaggctcccctaaagaagtgcctggcaccgaggatcgagccggaaaacaaaaattcaaatcaccaatgaacacgtcctggtgctcattcaacacagctgattgggtgcttcctggcaagaaaatggggaatctctcgcagctgtccagcggagaagataagtggttgctaaggaaaaaagcccaagaagtgttactaaattcacccctccaggaagaacataacttccccccagatcactatggcctgcccgcggtctgtgacctgtttgcgtgtatgcagcttaaggtagataaggagaagtggttatatcgcacaccgctgcagatgtag

SEQ ID NO: 126908 - DNA, 1845 bp, synthetic construct
  misc_feature 1..1845: note = Description of Artificial Sequence: Synthetic coding sequence
  source 1..1845: mol_type = other DNA
atgaatactttccaggatcagtcaggatcctcttctaatagggaacccctgctgcggtgttcagacgcccgcagagatctagagctagccataggcggtgtgctgagggcagaacagcagatcaaagacaacctgcgggaggtgaaagcccaaatccattcctgcatctccagacatctcgagtgcttgaggtctcgagaagtgtggttgtacgaacaggtggatctaatttaccagctgaaagaagaaacactacagcagcaggctcagcagttgtactccctcctggggcagttcaactgtttaacccaccaattggaatgcacccagaacaaggacctggcaaaccaggtgtctgtctgtctggaacgtctggggtcgttaaccctgaagccggaggacagtactgttttgctgtttgaggccgacacaataactctcaggcagactattaccaccttcggaagccttaaaaccatccagatacctgagcatctcatggcgcatgcttcaagcgccaatatcggccccttcctggaaaaacgaggctgtatctccatgccagagcagaagtccgcctccggtattgtggctgtgcccttctcagagtggctcctgggtagtaagccagctagtggttaccaagcgccatatattccttcgacagatccacaggattggctgacccagaagcagaccctcgagaactctcaaacatcaagccgggcctgcaacttctttaacaatgttggggggaatttgaagggactggagaactggctgctgaagagcgagaagtctagctatcaaaagtgtaattcacactctactacctcgagtttttctattgaaatggagaaagtgggggaccaggagctgcccgaccaggacgaaatggacctgagtgactggttggtcacacctcaggagagccacaaattgcggaagccggaaaacggatcacgcgaaacctccgaaaaatttaagcttctgtttcagagttataacgtcaacgactggcttgtaaagaccgatagctgtacaaactgccagggcaatcaacccaagggggtggagatagagaacctcgggaacctcaagtgcttaaacgaccacctcgaagcaaaaaagcctttgtccacacccagcatggtgactgaagactggctggtgcagaatcatcaagacccctgcaaagtggaagaggtgtgtcgagcgaatgagccatgcaccagttttgcagagtgcgtgtgtgacgaaaattgcgaaaaggaggcactgtataagtggctgctgaaaaaggagggcaaagacaagaacggaatgcccgtggagccaaaacctgaacccgagaagcacaaagatagtctgaatatgtggctctgccctaggaaggaagttattgagcaaaccaaagccccaaaggctatgacccctagccgcatcgccgacagcttccaggtgattaagaacagcccactgagtgaatggctgatcaggcctccatacaaggagggctcacccaaggaagtacctggaaccgaggacagagccggtaaacagaagttcaaaagccccatgaacaccagctggtgctcctttaacaccgcggactgggtgctccccggcaaaaaaatgggtaatctttctcaactgtcctctggagaggacaagtggctgttaagaaaaaaagcccaggaggtcctgctcaactctcctctgcaggaagagcacaatttcccaccagaccactacggattacccgccgtgtgcgacctctttgcttgtatgcagctgaaagtcgacaaagaaaaatggctctatcgtacacctctacagatgtag

SEQ ID NO: 126909 - DNA, 1953 bp, synthetic construct
  misc_feature 1..1953: note = Description of Artificial Sequence: Synthetic coding sequence
  source 1..1953: mol_type = other DNA
atgggcgcccaactgaccactttcgctctggccggagccgtccggcggatgaacaccttccaggatcaatcaggatcatcgtccaaccgggaacctctgctgcgctgctccgacgcacgtcgcgacctggaactcgctattggcggtgtgttaagagccgagcagcagattaaagataacctgagggaggtgaaggcccaaatccactcgtgcatctccaggcatctggaatgcctgcgaagccgcgaagtgtggctgtacgaacaggtggacctgatttaccagctgaaggaagagacccttcagcaacaggctcagcagctgtacagccttctcggacagtttaactgtttgacacaccaactggaatgcacccagaataaagatctcgcaaaccaggtctcagtgtgccttgagcggttaggttccctgacattgaaaccagaagacagtacggttctcttgttcgaggctgacaccatcacactaagacagaccattaccaccttcggctctctgaagaccattcagatccctgagcacctgatggcccacgcttcttccgccaatatcggtccttttcttgagaaacgtggatgtatatcaatgcccgagcaaaagagcgctagcgggattgtcgccgtgccattctcggagtggcttctcgggagtaagcccgctagtgggtaccaggctccctatatcccctccactgacccccaggactggctgacacaaaaacagacccttgaaaatagccagacatctagtcgggcctgtaattttttcaataatgtcgggggcaacctgaagggactcgaaaactggcttcttaaatcagagaaaagctcataccagaaatgtaatagccactcaactacttctagcttctcgattgaaatggagaaagttggggatcaggaactacctgatcaagatgagatggatctctctgattggttggtgactcctcaggaatcgcacaagctcaggaaaccagagaatggctctcgcgaaacttctgaaaaattcaaactgctcttccagagctacaacgtgaatgactggctagtgaagaccgacagttgtacaaactgccagggcaatcagcctaagggagtggaaatcgagaacctcggtaatctgaagtgtttgaacgatcatctggaagccaagaaacctctcagcaccccctccatggtgactgaagactggctcgtgcagaaccaccaggacccttgcaaggtggaagaagtctgtagagccaatgagccatgcacaagtttcgccgaatgcgtctgcgacgagaactgcgagaaggaagctctgtacaagtggctcttgaaaaaagaagggaaagacaaaaacggcatgcctgtggagcccaagcccgagccggagaagcataaggattccttgaatatgtggctatgtccacgcaaggaagttattgagcagaccaaggcacctaaggcaatgacccctagtcggatcgccgattctttccaggtcatcaagaatagcccactttccgagtggttaatcagacccccttacaaagaagggtctccaaaggaagtgcctggcaccgaggaccgcgcaggtaagcagaaattcaaatcccccatgaatacgagttggtgtagctttaacaccgcagactgggtgttgccgggaaagaaaatgggcaacttgtcacagctgtctagcggggaggacaagtggctgctccggaaaaaggcccaagaggtgctcctgaattcccctctccaggaggagcacaacttccctccagaccattacgggcttcccgcggtgtgtgacctctttgcatgcatgcagctgaaagtggacaaagaaaagtggctgtaccggaccccacttcaagcgtattttaaaatgaatttccaggacgttaccgtgggcaacttccaaataccttgcggattctag

SEQ ID NO: 126910 - DNA, 6192 bp, synthetic construct
  misc_feature 1..6192: note = Description of Artificial Sequence: Synthetic coding sequence
  source 1..6192: mol_type = other DNA
atggtgctggatgacctcccgaacttagaggacatctatacatctttgtgttcaagtactatggaagactcagagatggattttgactctggtctcgaagatgatgacacaaagtccgactccatattggaggactccactatcttcgtggccttcaaaggcaacattgacgataaggatttcaaatggaaattagacgccatcctgaagaacgttccgaacctacttcacatggagtccagtaagctaaaggtccagaaggtggagccatggaactctgtacgggtaacctttaatattccccgcgaggccgccgagcggctacgcattctagctcagagcaataaccagcagctgcgtgaccttgggatactttccgtccagattgagggagagggcgccattaacctggcattggcacagaacagaagtcaggacgtgcgtatgaacgggcccatgggggcaggtaactctgtgagaatggaagctggctttccaatggccagcgggccaggcatcatacggatgaacaaccccgcaaccgtaatgattccccctggcggcaacgtaagttcaagtatgatggcacccggtccgaacccagaactccagcctagaacaccgcggcccgcgtcccaatccgatgcgatggacccactgctgtcgggactgcatatacagcaacagtcacacccatcaggaagtttagctcctccccaccatcccatgcaacctgtctcggttaatcgccagatgaaccccgctaattttccccagctccaacagcagcaacagcagcagcaacaacagcagcagcagcagcagcaacagcaacagcagcagcagcagcagcaactgcaggctcggcctccccagcagcatcagcagcagcagcctcaaggcattcgaccacagtttacagctcctacgcaggtgcccgtgccccctggctggaatcagctgccgtccggggctcttcaaccgccgcccgcacaggggtctttggggacgatgactgccaaccaggggtggaagaaagccccgctgccggggcctatgcagcagcagctccaggctcggccttcactggctacagtacagacaccgagccacccaccacccccctatccttttggctcccagcaggcctcccaggcgcatactaacttccctcagatgagtaaccccggtcaatttaccgccccccagatgaagtctttacagggtggcccatccagagtgcccactcccctgcagcaaccacacctcaccaataagtcccccgcgagttccccatcaagcttccaacaaggctcacccgcctccagtccgactgtgaaccagacacagcagcaaatgggcccgcggccacctcagaataacccccttccccagggcttccagcaaccagtgagcagcccgggcagaaacccaatggtgcagcaaggaaatgtgccacctaatttcatggtgatgcagcagcagccccccaatcagggcccccaatctctccacccaggtttaggcggcatgccaaaacgactgccgccgggcttttctgccggtcaggccaatcctaacttcatgcagggccaggtgccaagcactaccgctaccactcccggcaactccggggcaccacagcttcaggcaaaccagaatgttcaacatgcagggggacagggggcggggccgcctcagaatcagatgcaggttagccacggaccccccaacatgatgcaaccttcgctgatggggatccacggaaatatgaataaccaacaggccgggacctccggagtgcctcaggtaaatctttccaacatgcagggtcagccgcagcaagggcctccatcacagctcatgggcatgcaccagcagatcgtgccaagccaggggcaaatggtgcaacagcaggggaccctcaacccccagaatcccatgattctgagtagggcacaactcatgccacagggacagatgatggtgaaccctccctcacagaatctgggccctagcccccagcggatgacacctccaaaacagatgttgtctcagcagggaccccagatgatggcgccgcacaatcagatgatggggccccaaggccaggtgctgctccagcagaatccaatgattgaacagattatgacgaaccagatgcagggcaataagcagcagtttaatacacagaatcagagcaatgttatgcccgggccagcacagatcatgcgtggacctacacccaatatgcagggcaatatggttcagttcactggccagatgagcggacagatgctgcctcagcaggggcccgtaaacaattcaccgagtcaggtcatgggcatccaagggcaggtgctccgtcccccaggcccttctcctcacatggcccaacagcacggcgatcccgcaacgacagccaacaacgacgtgagcctgtcccaaatgatgccagacgtatctatacagcaaacaaacatggtcccaccgcacgtgcaggccatgcaaggtaattccgcctcaggaaatcatttcagcggtcacggcatgagtttcaacgcaccattcagcggagcacctaatgggaaccagatgtcctgcgggcaaaaccccgggttccccgtgaacaaggatgtgacattaacatctcctttactcgtcaatcttctgcagagcgacatttccgccggccatttcggagtcaacaacaagcagaataatacaaatgccaacaaaccaaaaaaaaaaaagcctcccaggaaaaaaaaaaatagccagcaggaccttaacacacctgatacaagaccagcaggccttgaggaagctgaccagcctcctctccccggtgagcagggcatcaacctcgataattctggcccaaaactgcccgaattctctaatcgtcctcctggataccctagtcaacccgtggaacagagacccctgcaacaaatgcctccccagctgatgcagcatgttgcaccaccacctcagcctcctcagcagcagccacaacctcaactgccacagcagcagcagccaccccctccctctcaaccccagagtcagcagcagcaacagcaacagcaacagatgatgatgatgctgatgatgcagcaagaccctaaatcagtgcgtctgcctgttagtcagaacgtccaccctccccgaggcccactgaacccggattcccagaggatgcctatgcagcagtctgggtccgtcccggttatggttagtttgcagggccctgcctccgtgcctccatcccccgataaacagcgaatgcccatgcccgtcaacactcccctgggtagcaacagcagaaaaatggtctaccaagaatcaccgcagaatccctcctcctcacccttagccgaaatggcgtcccttcccgaagccagtggatctgaggctccctccgtgccaggcggccctaataatatgccctcgcacgtagtcctgccccaaaatcagttgatgatgaccgggcccaaacccggtccgtcaccgctgtctgctacccagggagccacaccccagcagcctcctgtgaatagcctgccgagctcacatggccatcactttcctaatgtggcagctccaactcaaacaagtagacctaagactccaaatcgggcttcccctcgcccgtattatccacaaacgcctaacaacagacccccctcaactgaaccaagcgagatctccctgagtcccgagcgtctgaacgcatccatagcagggctatttccaccccagataaacataccattgccaccacggcctaaccttaatcgagggttcgaccagcagggtttgaacccaacgaccctgaaggcgattgggcaagcgccgagcaacttaaccatgaatccatccaattttgcaaccccacagacacacaaactggacagtgttgttgtcaatagtggaaagcagtccaatagtggtgcaactaagagagcctctcctagtaatagccggagaagcagcccaggcagctcaagaaagacaacacccagtccgggaaggcagaattcaaaggcgccaaaattgacacttgccagccaaaccaatgccgcccttctgcaaaatgtcgaactgccacgaaatgttctggttagtccaacacccctggccaatccacccgtgccaggatcctttccaaacaatagtggcctcaatccacagaactcgaccgtgagtgttgctgcagtaggcggggtcgtggaggacaataaggagtcactcaatgtaccacaagatagcgactgtcaaaacagccagagccggaaggaacaggtcaacatcgaactgaaggctgtcccagcacaggaagtgaaaatggtcgttcccgaggatcagagcaagaaagatggtcagccgtctgaccccaacaagctccccagcgtcgaagaaaacaagaatcttgtatcgccagccatgcgcgaggcccctacctcactgagccagctgctggacaatagtggtgcccctaacgtgacaattaagccccctggtctcactgatcttgaggtgactcctccagtggtgtccggagaagatctcaagaaagcaagcgtgatccccaccttgcaggatttaagtagcagtaaggagcctagcaattcactgaatctgccacattctaatgagctatgcagctctctggtacacccagagctatcggaggtatcttccaacgtcgccccctcaatacctcctgttatgtcccgtccagtgtccagctcaagcatctcaacacctctgccaccgaatcagatcaccgtgttcgtgacgtctaaccctataactacgtctgcgaacacctctgcagccctgcccactcacctgcagtcagcgctgatgagcacggtagtcaccatgccgaacgcgggatccaaggtgatggttagtgaggggcaaagtgcagcccaatccaacgccaggcctcagtttataacccccgtgtttataaactcctctagcatcatccaggtgatgaaggggtcccagccatcgactatccccgctgcgcccttgactactaatagcgggctaatgcccccttcggtggctgtggtcggaccacttcacatcccccagaacattaagttctcctctgcccctgtccccccaaacgcactgagttcatctccagcccctaatatccagactggcagaccactggtgctttccagcagggcgaccccagttcaacttccgtctccgccgtgtacatcctcaccagtagtgccatcccatccccctgtgcagcaggtgaaggaactgaatccagatgaagcctcacctcaagtgaacaccagtgccgatcaaaacactctgccttcttcgcagagcacaacgatggtgagtcctctgttaaccaatagccctggaagctccggcaaccgccgcagtccagtgagtagttcgaaggggaagggcaaagtcgacaaaatcggccagattctcctgaccaaggcctgcaagaaggtgacagggtcactggaaaaaggagaagagcaatacggagcggacggtgagacagaaggtcagggattggacacaactgcccccggtctgatgggaacagagcagctgtcaacagagctggacagcaagactcctacccctcccgctcctaccttattaaagatgaccagcagtcctgttggcccggggactgctagcgcgggcccatccctgcccggcggcgctctgcctacatccgtgcgctcaatcgtgacaacccttgtgcctagtgaactcatcagtgccgtgcctaccactaaaagcaaccatgggggtattgcctccgagtctctggctggaggcttggttgaagagaaggtgggaagtcacccagagctccttccttccattgcaccaagccaaaatctggtaagcaaggaaactagcaccacagctctgcaggccagtgtcgctcgacctgagctggaagtgaatgccgccatcgtgtcgggacagagcagcgagcccaaggagatcgtggagaagtccaagattccggggcggaggaactcccggaccgaggaacccacagtagcgagcgaatctgtcgagaacgggcaccgcaaacggtccagccgtccagccagcgcaagctcaagcacaaaagatattacatctgccgtgcagagcaaacggcgaaagtccaaatag

SEQ ID NO: 126911 - DNA, 6192 bp, synthetic construct
  misc_feature 1..6192: note = Description of Artificial Sequence: Synthetic coding sequence
  source 1..6192: mol_type = other DNA
atggttttagacgatctgcctaacttggaggacatatacacctccctgtgctccagtaccatggaagatagcgaaatggatttcgacagcggccttgaagatgacgatactaagagtgacagcattcttgaggacagtactatcttcgtggctttcaaagggaatatcgatgacaaggactttaagtggaaactggacgccatcctgaagaatgtgccgaacctccttcatatggagtctagcaagctcaaggtgcagaaggttgagccatggaattcagttcgcgtgacttttaatatccctagagaagcagctgaacgccttcggatactcgctcaatccaacaatcagcaactcagggatctgggcatcttgtccgtccagattgagggggaaggggccatcaaccttgccttagcacaaaatcgcagccaggacgttagaatgaacgggcctatgggcgcaggtaattccgtgcgaatggaagccggctttccaatggcttctgggccagggataatccgaatgaacaaccccgctaccgtcatgattccacctggggggaatgtaagctcttcgatgatggcccccgggcccaatcctgagctccaacctcgaacccctcgacctgcatctcagtccgacgcaatggatccactgctttctgggctgcatatccagcagcagtcgcacccctcagggtcactggctcctccccatcaccctatgcaacctgtgtcagtaaaccggcagatgaaccccgcaaatttcccccagctgcagcaacagcagcagcagcaacagcagcagcagcagcaacaacagcagcagcaacagcagcaacaacagcagcagcttcaggcccgccctccacagcagcatcagcagcagcagccacagggtatccgcccccaattcaccgcaccgacccaggtgcccgttcctcccggatggaatcagctccctagcggtgcccttcaaccacctcccgcacagggcagcctgggaactatgactgcaaatcagggatggaaaaaggccccactccccggccctatgcagcaacaactgcaagcccggccttctttagccacggtgcagacaccaagtcatccccctccaccctacccttttggttcccaacaagcctcacaggcacacactaactttccacagatgtcgaaccccgggcagtttacagccccgcagatgaagtctctgcaggggggcccctctagagtcccaactcccttgcagcagcctcatctcacaaacaagtctcccgcctctagcccctcgtctttccaacaggggtctccggcaagcagcccaaccgtgaatcagacccagcagcagatgggaccccgtccaccacagaacaatccacttccacagggatttcagcagcctgtgtcttctcccgggcgcaatcccatggtacagcaggggaatgtacctcctaatttcatggtcatgcagcagcagccacccaatcaggggcctcagtcgcttcacccaggccttggcgggatgccaaagaggttgccccctggattctctgccgggcaggccaacccaaacttcatgcagggccaggtgccctctacaacagccactactccaggaaactcaggtgcacctcagctccaggcgaaccagaacgtgcagcacgctgggggacagggggccggtccgccacagaaccagatgcaggtgtcgcatgggccacctaacatgatgcagcccagcctgatggggatccatggaaatatgaataaccagcaggcaggaacaagcggagttcctcaagtgaatctgtctaacatgcagggccagccccaacaaggtcccccgtcccagctcatgggcatgcaccaacagattgtgccttcccagggccaaatggtacaacagcaaggtactttgaacccacaaaaccccatgatcctgtctagagcccagctgatgccacaaggccaaatgatggtgaatccaccgtcgcaaaatctaggcccatctcctcagcgcatgacacctcccaagcagatgctgtctcagcagggcccacagatgatggcaccgcacaatcaaatgatgggaccccagggacaagtgctgcttcagcagaatcccatgatcgagcagataatgaccaatcagatgcagggcaataaacagcaatttaacactcagaaccagagcaacgttatgcccgggccagcccaaatcatgcggggccctacaccaaacatgcagggcaacatggtccagttcacggggcagatgagcggccagatgttgccacagcagggaccagtgaacaacagtccaagtcaagtcatgggaattcaaggccaggtgctgagaccgccaggaccatcaccgcacatggcccagcagcacggtgatcctgccacgaccgcaaacaatgacgttagtttatcacagatgatgccagatgtgagcatacagcagacaaatatggtaccacctcacgttcaggccatgcaggggaactctgctagcggcaatcacttttctgggcatggtatgagctttaatgctccgttttcaggggcaccaaacgggaaccagatgagttgcggtcagaatcccggcttcccagtgaataaagacgtgaccctgacttctcccctcctggtgaacttactgcaaagcgatatctcagcgggacacttcggcgtcaataataaacagaataatacaaacgccaacaagcccaagaagaaaaagccgcctcgtaaaaaaaaaaactctcagcaggacctgaacaccccggataccagacctgcgggactggaggaggcagatcagcctcccttgccaggggaacaggggattaacctagacaactctgggcccaagctgccagagttcagcaatcggcctcccggatatccctcccagcctgtggagcaaagaccattacaacaaatgcctccgcaactgatgcagcacgtggctcctcctccacagcctccacagcagcaaccgcagcctcaactccctcagcagcagcagccccccccgccttcccagccgcagtcccagcagcagcaacaacagcagcaacagatgatgatgatgctcatgatgcagcaagaccccaaatccgtgaggttgcctgtcagtcagaatgttcatcccccccggggacctcttaaccccgatagtcaaagaatgcctatgcagcaaagtggctcggttcccgtaatggtgagcctccaaggaccagcttcagttccaccgtccccagataagcagcggatgcctatgccagtcaatacccccctgggatccaattcaaggaaaatggtttatcaggaatcgccacagaacccatcatcctctcctcttgctgagatggcatcattgcccgaagccagcggcagcgaggcaccgtctgtcccgggaggaccaaacaatatgccgagccacgtggtgcttccccagaatcagctcatgatgaccggccccaagccagggccttctcccctgtccgctacacagggagcaaccccacagcagcctccggtgaactctctcccctcttcccatgggcaccactttcccaatgtagccgccccgacacagaccagtcgtccaaagacgccaaatagagcgagccctcggccttattatccacagacccctaacaaccgcccaccaagtaccgaaccctcagaaatctcgttgtctcctgaacgattaaatgcttcaatcgccggcctgtttcccccccagattaatattccccttccaccaagacctaatcttaatcgagggttcgaccagcaggggctgaatccaactaccctcaaagccattggacaggcccccagcaatctcaccatgaatccttcaaacttcgcaacaccacagacacataaactcgattctgtggtggtcaacagtgggaagcaatcaaattcaggggccacaaaaagggctagcccgagcaacagcaggagatctagtccagggtcctctaggaaaactacaccctctcccggccgccagaatagcaaagcaccaaagctgacactcgctagtcagacaaatgctgccctgcttcagaatgtagagttaccacggaacgtgctggtgtctccaaccccccttgcaaatccacccgtgccaggatcattcccaaataattctggcctgaatccacagaatagcactgtatcagtggccgctgtggggggtgttgttgaggacaataaggaatccttaaacgtgccgcaggatagtgactgtcagaactcacagagcaggaaagagcaggtgaatatagagctcaaggcggtcccagcacaagaagttaagatggtcgtgcctgaggatcagtctaagaaagacggacagccctccgatccaaacaaattgccaagcgtcgaggagaacaaaaacctcgtgtcccccgccatgcgcgaggctccgaccagcctgagccagctgttggataattcaggggccccaaacgtcaccattaagccaccaggtctgaccgacctggaagtcactccacccgtggtttcgggggaggaccttaaaaaagcttcagtaatcccgacccttcaagatcttagttcttctaaggaaccctccaactcactgaacttgccccacagcaacgaactgtgcagcagccttgttcatcccgaactgtctgaagtctctagtaatgtcgccccctcaatcccaccagtgatgagcaggcctgtgtccagtagttctatctctacacctctgccacctaatcaaatcactgtttttgttacctctaaccctatcacgactagcgccaacacttctgctgcactccctactcatctgcaatcggctctgatgtccacagtggtgacaatgcccaacgccggtagtaaagtcatggtgtctgagggacagagtgcagctcaaagtaacgcgcgcccccagttcatcacccctgtattcattaactccagttctatcatccaggtcatgaaggggagtcagccttcaaccatcccagccgccccactgaccacaaactctgggttaatgcctcccagtgtggccgtagtgggaccactccatattccccagaatattaaattcagctccgcgcccgttccacctaatgcgctgagctctagccctgccccaaatatacagacaggtaggccccttgtgctctcttctcgagcgacccctgtgcagttaccttcaccaccttgtacttcttctccggtggtcccatcgcatcccccagtacagcaggtaaaagaattgaacccagacgaagccagccctcaggttaacacaagtgctgaccaaaacaccttaccaagcagccagagcacaacgatggtgagccccctgctgacgaatagtcctggctcctccggcaatcgaagatcccctgtgtcctcctctaaggggaagggcaaggtcgacaaaattgggcagattctgcttacaaaagcgtgcaaaaaggtcacagggtccctcgagaagggcgaagaacaatacggcgctgatggcgagaccgagggccagggccttgatactacggctcccggactcatgggtactgaacagctgagtacagagctggactctaagacacccactccccccgcgcctactctgttgaaaatgacaagctccccagtgggccctggtaccgcctctgctggtccctcactgcctggcggcgccttgcctacgtcagtgcgaagcatcgtaaccacactagtgccttctgagctcatttccgccgtgccaactaccaaaagtaaccatggtgggattgcatctgaatctctcgctggagggctagtggaggaaaaggtgggcagccatcccgagttgttgccctccatagcccctagtcagaacctcgtcagcaaggaaacttccactacggccttgcaggctagcgtagcccgaccggagctggaggtgaacgcagcaattgtaagcgggcagtcctccgagcccaaagagattgtggagaagagtaagattcctgggcgccgcaattcgcgaacagaagagcccactgtcgcctccgaaagcgtagagaatggccaccgcaagaggagttctcggcccgcctcagcctcctccagcacaaaggatattaccagcgctgtccagagcaagcgaagaaaaagtaagtag

SEQ ID NO: 126912 - DNA, 1086 bp, synthetic construct
  misc_feature 1..1086: note = Description of Artificial Sequence: Synthetic coding sequence
  source 1..1086: mol_type = other DNA
atggtactcgatgatctgccgaatttggaggacatctacacatctctctgttcctctacaatggaggattcggagatggacttcgacagtgggttggaagatgatgacacaaagtcagactctatccttgaggactcaacaatatttgtggcatttaagggcaacattgacgataaagatttcaagtggaagctggacgctatcctcaagaatgtaccaaacctgctgcacatggagagctcaaaactgaaggtgcagaaggtcgagccatggaatagcgttcgggtgacattcaacatccctagggaggccgccgaacggcttaggatcctcgcgcagagtaataaccagcagctgcgggatctcgggatactctctgtgcagatcgaaggtgaaggggctataaacctcgcactggctcaaaatcgctcccaggatgtccggatgaacggtccgatgggcgccggtaatagcgtgagaatggaggccgggttcccgatggccagcggccctgacgcaatggatcccctcctgtccggtctccacatccaacagcagagccacccctctggatccctcgccccaccgcatcatcctatgcagcctgtaagcgtgaataggcaaatgaatcccgccaatttcccacagttgcaacaacaacagcagcagcagcagcagcaacagcagcaacaacagcagcaacaacagcagcagcagcagcagcaactgcaggctaggccgccccagcagcatcagcagcagcaaccgcagggaataaggccacaatttacggccccaacccaggtgcccgtaccccctggttggaaccagcttccatctggagcgctacaacctcccccggcacagggcagcttggggaccatgacggccaaccagggctggaaaaaggccccactccccggccccatgcagcagcagctgcaggctaggcctagcctcgctacagtccagacgcctagtcatcctcctcctccttacccattcggttcccagcaggcctcccaggcccacacgaacttcccccagatgtccaatccgggtcagttcactgctccccagatgtag

SEQ ID NO: 126913 - DNA, 549 bp, synthetic construct
  misc_feature 1..549: note = Description of Artificial Sequence: Synthetic coding sequence
  source 1..549: mol_type = other DNA
atggccgaggaacaggtcaatagaagcgccggcctcgcccctgactgtgaggcgtccgcaactgccgaaaccactgttagctctgtgggtacatgtgaggcagccggcaaatcccctgagcccaaagactatgattccacatgcgtgttctgcagaatcgctggccggcaagatcccggcacagagctactgcattgcgaaaacgaggatctaatttgttttaaggacatcaaacccgctgccactcatcactatctcgtggtgccaaagaaacatatcgggaactgccggacgctgcgcaaagaccaagtcgagttggtggagaacatggtgaccgtagggaagacaatattggagcgcaataatttcacagactttacgaacgtccggatgggcttccacatgccacccttctgctccatttcccacttacacttacacgtactcgcccccgtggaccagctgggattccttagcaagctggtctacagggtgaattcctattggtttattacagcagaccatctcatcgagaagttgagaacctag

SEQ ID NO: 126914 - DNA, 552 bp, synthetic construct
  misc_feature 1..552: note = Description of Artificial Sequence: Synthetic coding sequence
  source 1..552: mol_type = other DNA
atgggagccgcacatagtgtgtgggaagtggatcacctatataccttctttgtgcagtggtcaccggatgtttacggcaaagacgcaaaagagcaggggtttgtggtggtggagaaagaggagcttaatatgatagataatttttttagcgagccgaccaccaaatcgtgggaaataatcacggtggaggaagccaaaaggcgcaagtcaacctgtagctattatgaggacgaggatgaggaggtgcttcccgtgctccgtccccattctgccttgctcgagaacatgcacattgaacagctcgcacggcgcctacccgcccgtgtacagggctatccctggcgtctggcctactccacgctggaacatgggacatccctgaagacgttataccggaagagcgcatccctggacagtccggtgctcctggttatcaaggatatggacaatcagattttcggtgcctatgctacccacccatttaagtttagtgatcattactacggaaccggagagacttttctgtatacgttttcgccacactttaaatag

SEQ ID NO: 126915 - DNA, 2829 bp, synthetic construct
  misc_feature 1..2829: note = Description of Artificial Sequence: Synthetic coding sequence
  source 1..2829: mol_type = other DNA
atggatacaaaagaagaaaagaaagaaagaaaacaaagctattttgccagactgaaaaaaaagaagcaagctaagcagaacgctgagacagcatcggccgtggcaacgcgcacgcacaccggaaaggaggataacaataccgtcgtgctcgaaccagacaaatgtaacatcgcggtagaagaagagtacatgaccgacgaaaaaaagaaacggaagtcaaatcagttaaaggagatccgtcggactgaactaaaacggtattatagcatcgatgacaatcagaacaagactcacgataaaaaagaaaagaagatggtggtgcagaagccacatggcacgatggagtacacagctgggaatcaagatacactcaacagcattgccttgaaattcaatatcactccaaataaactggtggagctgaataagctgtttacgcacaccattgttccagggcaggttctgtttgttcccgatgcgaactctccgtcttctacccttaggctatccagctcgtcacccggagctacagtcagcccctcttcctcagatgccgaatacgacaagttgccagacgcagatttggcaaggaaagcactgaagccaattgaacgagttctctcatccacgagtgaggaggacgagccaggcgtggtgaagtttctgaagatgaactgcaggtactttacagacgggaaaggggtggtcgggggagtgatgatagtgacaccaaacaatataatgtttgacccacacaagtcagacccacttgttattgaaaacggatgcgaggaatacggcctgatatgcccaatggaggaggtcgtgtcaatagctctgtataatgatatctcccacatgaagatcaaggatgccttgccctccgacctgccgcaggacctatgtcctctctataggcctggcgagtgggaggaccttgcctctgagaaggacattaacccgttttccaaattcaagtccatcaacaaggaaaagcgacagcagaacggggaaaagattatgacatccgattccagaccaatcgttcctctggaaaagtctacaggccatacacccactaagcccagcgggagcagcgtgagcgaaaaactcaagaaactggatagcagcagggaaaccagccacggatccccaacagtaacaaaactgagcaaggagccttccgatacttcgtccgcttttgagtccaccgctaaagagaatttcctgggcgaggacgacgatttcgtcgatcttgaggagctatcttctcaaactggggggggaatgcataagaaagataccttgaaagagtgtttgtcacttgatccagaagagcgcaagaaagccgaatctcagatcaacaatagtgcagtcgaaatgcaggtacagagtgccttagcttttcttgggaccgagaatgatgttgagctcaaaggagcccttgatttagagacctgcgagaagcaggacattatgccagaagtcgacaagcagagcggcagtccagaatccagagtagaaaacacactcaatatccacgaggacctcgataaggtcaagttgatcgaatactacctgacaaagaacaaggagggtccacaagtaagcgagaacctgcaaaagacagagctgtcagacggtaagagcatcgagcccggaggcattgatatcacactctcttcctcgctgagccaggctggtgacccaataacggagggtaacaaggaaccagacaagacttgggtgaagaagggcgaacccctcccagtgaaattgaacagttccacagaagctaatgtgattaaagaagctctagactctagcctggagtcgactctggacaactcttgccagggcgctcagatggacaacaaaagtgaagtgcagttgtggctcctgaagagaatacaagtgccaattgaagatattctacctagtaaagaggaaaaatcaaaaacaccccccatgtttctctgtattaaggtaggcaagcccatgcggaaatcattcgccactcacaccgctgcaatggtccaacaatacggcaagcggcggaagcagcccgagtactggttcgcagtcccaagggaaagagtggatcacttatacacgttttttgttcagtggagtccagacgtatatggcaaagatgcaaaggagcagggattcgtcgtggttgagaaagaggaactgaacatgattgacaactttttttctgagccgaccaccaagtcctgggagatcatcacagtcgaagaggcaaagcgacgcaagtcaacatgttcctattatgaggacgaagacgaggaggttctccccgtgctgcggcctcactctgctctgctggaaaatatgcatatcgaacagctggctagacggctgcctgcgcgggtgcaaggttatccctggaggttagcttacagcaccttagaacatggcacttccttgaagacgctttaccgtaagtcagctagcttagatagccctgttctgctggtcattaaggacatggataaccaaattttcggtgcctatgcaactcacccctttaagttctctgatcattactacggaaccggcgaaactttcctgtacacattctctccacatttcaaagtgtttaagtggtctggcgaaaatagctattttattaatggggatatctccagcctggaactgggaggtggcggcggacgctttggcctgtggctcgacgctgatttgtatcatggacgctccaactcgtgcagtacattcaacaatgatattctttctaaaaaggaagactttatcgttcaagatctagaggtatgggcatttgattag

SEQ ID NO: 126916 - DNA, 2829 bp, synthetic construct
  misc_feature 1..2829: note = Description of Artificial Sequence: Synthetic coding sequence
  source 1..2829: mol_type = other DNA
atggacactaaggaggaaaagaaagagaggaaacagtcctacttcgcgaggctgaaaaagaaaaagcaggctaagcagaacgcagaaacagctagtgcagtggctaccagaacccataccggtaaagaggataacaacacggtggtgctggagccagacaagtgcaacatcgcagttgaggaagaatatatgaccgatgagaagaaaaaaaggaagagtaaccaactgaaggagattcgcagaacagagcttaagagatattactcaattgatgacaatcaaaacaaaactcacgacaagaaagagaaaaaaatggttgtgcaaaagccccacggaacaatggaatacaccgctggaaatcaagacactttgaactccatcgccctgaaattcaacattacacctaataaattagtggagttaaataaattattcacccacacaattgttccaggacaggtcctgtttgtgcccgacgctaactccccctctagtaccctgcgactgtcctcttcttctccaggggcaactgtgagcccatcatccagtgacgctgaatacgacaagctccctgatgcggacctggcgcgcaaagctctaaagccaatcgaacgtgtgctatcatcaacttcagaggaggatgagcctggagtagtcaaattcctgaagatgaactgtcgatacttcactgatggtaagggcgtggtgggcggggtgatgatcgtgactcccaacaacattatgtttgacccccacaagtccgacccgctggtgattgaaaatggctgtgaggagtatgggttgatatgccccatggaggaagtggtgagcatagctctatataacgatatctcccacatgaagataaaggacgccttgccgtcagacctgccccaagacctatgtccgctctaccgaccgggagagtgggaggacctggcctcagagaaggatataaacccatttagcaagtttaagagtattaacaaggaaaagcgccagcagaatggcgagaagattatgactagtgattctcggccaatagtgcctctggaaaagtccacaggccatacacctacaaagccctccggctcctccgtcagtgagaaactgaagaaactagactcgagtagagaaacctcccacgggagcccgaccgtgacaaagctttcaaaagagcccagcgatacatcttcggccttcgagtcaacagcaaaagagaatttccttggagaagacgacgacttcgtggacttagaggagctgagctcacagacgggcggtggaatgcacaaaaaagacacactgaaggagtgtctgtccctggatccagaagagaggaagaaagctgagtcacaaatcaataattccgccgttgagatgcaggtccagtcggcacttgcatttttggggaccgagaacgatgtggagctgaaaggcgcactcgacctagaaacatgcgaaaagcaagatatcatgcccgaagtggacaaacagtcaggcagcccagaaagccgagttgaaaatactctgaacattcatgaggacctcgacaaagtcaaacttatcgagtactacctcacgaagaacaaagagggaccacaggtctccgaaaatctgcaaaaaactgagctgtctgatgggaaaagtattgaaccagggggtatcgacattactttatcaagtagcttgtcccaggccggggaccctataacagagggaaacaaggagcctgataagacctgggtcaagaagggggaacctctacccgtgaagttgaactcctcaactgaggcaaacgtcataaaagaagcattggactcctcccttgagtcaactcttgataactcatgccagggagcgcagatggacaacaaatccgaggtccagttatggttgcttaagcgcatccaggtcccgattgaggacatactcccctccaaagaagagaagtcgaagacgccgcccatgtttctctgcatcaaagttgggaaacctatgcgaaaatcattcgcaacccacacagctgccatggtgcagcagtacggcaagcgccgtaaacagcctgagtattggttcgcagtgccccgggagagggttgatcacctgtatactttcttcgtgcaatggagtcctgacgtgtatgggaaagacgccaaggagcagggttttgtggtcgtggagaaggaggaattgaatatgatcgataactttttctcagaaccaaccactaagagttgggagatcattaccgtcgaggaggcaaagcgccggaaaagcacctgcagctattacgaggatgaggacgaagaggtgctcccagttctcaggcctcactccgcactcttagagaacatgcatatcgaacagctcgctcgcaggctccccgccagagtgcaaggctacccatggcggctggcttattccacactcgaacacggaacatccctcaagactttgtatcgcaagtcagcaagcctggactcccctgtactgctggtaataaaggatatggataatcagatctttggagcctatgccactcatcccttcaagttttccgaccactactatggaaccggagaaacatttctgtataccttcagcccgcactttaaagtctttaagtggtctggcgaaaatagctactttattaacggagatatatcatcattggagctgggcgggggaggggggcgcttcggcctgtggcttgatgccgacctgtaccacggccgaagtaacagttgctcaactttcaacaatgacatcctctcaaagaaggaagacttcatcgtgcaggatctcgaagtgtgggcgttcgattag

SEQ ID NO: 126917 - DNA, 1323 bp, synthetic construct
  misc_feature 1..1323: note = Description of Artificial Sequence: Synthetic coding sequence
  source 1..1323: mol_type = other DNA
gacgctgatctcgctcggaaggctctgaaaccaattgaacgggtgttgagttcgacctcggaggaggacgagcccggtgtggtgaagtttttgaaaatgaattgccggtacttcacagacgggaagggtgtcgtgggaggcgtgatgattgtgaccccgaacaatatcatgttcgatccccacaagtccgatcctttggttatagagaatggctgtgaagaatacggacttatatgtcctatggaggaagtcgtctcgattgccctgtataatgatatttcgcacatgaaaatcaaagacgccctgccttcacccggtgagtgggaggaccttgcctctgagaaggacattaatcccttctctaagtttaagtccatcaataaggaaaaaagacaacagaatggcgaaaagatcatgacgtccgactcaaggccgatcgtccccctcgagaaaagtacaggccatactcctaccaagccctccggttcaagcgtgtccgagaaactcaagaagttagactcctctagggagacgtcccacggatcaccaacagtgacaaagctgtccaaggagccatctgacaccagctcagcctttgaatccaccgccaaggagaatttcttaggcgaggatgacgattttgtggacctggaggaattgagttctcaaacaggtggcggcatgcataagaaggacacgctcaaggagtgtctgagtttagacccagaagaacgcaaaaaggccgagtctcagatcaataacagcgcagtggaaatgcaggtccaatctgccctggccttcctgggaacggagaatgatgttgaactaaagggagctctggatcttgagacatgcgaaaagcaggacattatgccggaagtggacaagcaatctggttccccagagtccagggtggagaacaccttgaatatacacgaggaccttgacaaagtgaagcttatcgaatactatctgacaaagaacaaggaaggccctcaagtgagcgaaaacctccaaaaaacagaattatctgatggaaagtccattgaaccggggggtattgatattaccctctcttcatcactcagccaggccggcgaccctatcactgaaggcaataaggaaccagacaaaacgtgggtaaaaaaaggggaaccactacccgtgaagctcaattcctcgactgaggcaaatgttatcaaggaagccctagattcatcattagagagtacactggataatagctgtcagggtgctcagatggacaataaatctgaagtgcagctgtggttactcaagagaatccaggttccgattgagtag

SEQ ID NO: 126918 - DNA, 576 bp, synthetic construct
  misc_feature 1..576: note = Description of Artificial Sequence: Synthetic coding sequence
  source 1..576: mol_type = other DNA
atggacacgaaagaagaaaaaaaggaaagaaagcagtcatactttgcgcgacttaagaaaaagaagcaagcgaagcagaacgccgaaaccgcgtctgcagtcgcaaccagaacccatacaggaaaagaggataataacacggtcgttctggagccagataagtgtaacatcgctgtcgaagaggagtatatgacggatgagaagaaaaagcggaagagtaaccagctgaaggagattcgcagaactgagctcaaaagatattattccattgacgacaatcagaataagactcacgataaaaaggagaagaaaatggttgtccagaaacctcacgggacgatggagtacacagccggcaatcaggatactctaaattccattgctctcaaattcaacataacaccaaacaagctcgtggagttgaataagttgttcacacacactatcgtgccgggacaagtgctgttcgtccctgacgcaaatagtccgtcctctaccctgcgcctgtcaagcagcagtccaggggctactgtgagtcccagtagcagcgacgctgaatatgataagctgccctag

SEQ ID NO: 126919 - DNA, 354 bp, synthetic construct
  misc_feature 1..354: note = Description of Artificial Sequence: Synthetic coding sequence
  source 1..354: mol_type = other DNA
atggacaccaaagaagagaagaaagagcgaaaacagagctacttcgcccgcctgaagaagaaaaaacaggccaagcagaacgcagagactgctagcgcggtcgccacacggacgcacacaggcaaagaagataacaacactgtggtccttgaacctgacaagtgtaatattgccgtggaggaggaatacatgacagacgagaaaaaaaagagaaaatctaaccaacttaaggagatcaggcgaacagagttaaagagatattactctatcgacgataaccagaataagacacatgataaaaaggagaaaaagatggtcgtccagaaaccacacggaaccatggaatatacctag

SEQ ID NO: 126920 - DNA, 273 bp, synthetic construct
  misc_feature 1..273: note = Description of Artificial Sequence: Synthetic coding sequence
  source 1..273: mol_type = other DNA
atggacactaaggaagagaagaaggagagaaagcagagttatttcgcccgattgaaaaagaaaaaacaagctaagcagaatgccgagacagcctccgctgtggctactaggacacacaccggtaaggaggacaacaacacagtggtgcttgagcccgataaatgtaatatcgcagtggaagaggaatacatgactgatgagaagaagaagagaaagtctaaccagctcaaagaaatcagaaggactgaattgaaacgatattattcgatctag

SEQ ID NO: 126921 - DNA, 273 bp, synthetic construct
  misc_feature 1..273: note = Description of Artificial Sequence: Synthetic coding sequence
  source 1..273: mol_type = other DNA
atggacacaaaggaagaaaagaaggagcggaaacaaagctattttgctagacttaagaagaaaaaacaggcaaaacagaacgcagaaaccgctagtgcggtggccactcgtacacacacaggaaaagaagacaacaacaccgttgtgctagagccagataagtgtaatatagccgtcgaggaagaatatatgacggacgaaaaaaaaaagaggaaaagcaatcagttgaaggagatccgacggactgagctaaaaagatactatagcatttag

SEQ ID NO: 126922 - DNA, 552 bp, synthetic construct
  misc_feature 1..552: note = Description of Artificial Sequence: Synthetic coding sequence
  source 1..552: mol_type = other DNA
atgggggccgctcattccgtttgggaggtggatcatctatatacgttctttgtacagtggtctccagatgtgtacggtaaggatgccaaggaacagggattcgtagtcgtcgagaaggaagaacttaacatgattgataacttctttagtgaacccacgacaaaatcatgggaaattattaccgttgaggaagccaagagaagaaagtctacatgcagttattacgaggacgaagatgaggaggtgctacccgtgctgcggcctcactcggcattgttggagaatatgcacattgaacagctagcacgaagactgcccgccagggtgcagggctatccttggagattagcctactccaccctagagcacggtacatcccttaaaaccctctatcggaagtccgctagtctggatagccccgtcttactggtgatcaaagatatggataatcaaatctttggcgcatatgccacacatccatttaagttctccgatcactactatgggaccggtgagaccttcctatatacatttagcccccatttcaaatag

SEQ ID NO: 126923 - DNA, 714 bp, synthetic construct
  misc_feature 1..714: note = Description of Artificial Sequence: Synthetic coding sequence
  source 1..714: mol_type = other DNA
taagagaagacttgttctagtctggaaagagagcctcacttcagtttgctcactatgagggggcaaaggctacccctggatattcagatattctactgcgccagaccagacgaagagcctttcgtcaagattatcaccgtcgaagaagcgaaaaggcgaaagtctacctgttcctattacgaagatgaggatgaagaggtgctgccagtacttcgcccgcactctgccctgctagagaacatgcatattgagcagctggcaagaagactgccagcacgagtgcaaggctacccgtggaggttggcttattcaaccctcgaacacggcacttctctaaaaacactttataggaaaagtgcctccttagatagtcccgtcctgctggtgataaaggacatggataatcagatctttggggcgtacgccactcatccttttaagttttctgaccattattacggtacgggcgagaccttcctgtatactttctcaccccacttcaaagtgtttaagtggtccggggagaactcttacttcattaacggagacatctcctctctcgagcttggcgggggaggcgggaggttcggcctgtggctcgacgcagacctgtatcatgggcggtcgaattcttgttcaaccttcaacaatgacatcctgagcaagaaagaggattttatagtccaggatcttgaggtctgggcattcgattag

SEQ ID NO: 126924 - DNA, 534 bp, synthetic construct
  misc_feature 1..534: note = Description of Artificial Sequence: Synthetic coding sequence
  source 1..534: mol_type = other DNA
taagagaagacttgctctagcttggagagggaaccccattttagcttactcacgatgcgcgggcagcgtctcccactcgacattcaaattttttattgcgcaagacccgatgaggagcctttcgtgaaaattatcactgtggaggaagccaaacgacgcaaatccacttgttcttactatgaagacgaagacgaagaagtcctgccagttctgaggcctcacagcgcattgcttgagaacatgcatattgaacagttggcccgacggctccccgcccgcgtgcagggatacccctggcggcttgcatattccacactggaacatggaacaagcctaaaaacactttatcggaaaagcgcctctctagactcccccgtactcctggtgatcaaagatatggataatcagatcttcggcgcatatgccactcacccatttaaattttcagaccactactacgggactggtgagacattcttatacactttctcgccacacttcaaggggactatatggtttatggccagatgttag

SEQ ID NO: 126925 - DNA, 573 bp, synthetic construct
  misc_feature 1..573: note = Description of Artificial Sequence: Synthetic coding sequence
  source 1..573: mol_type = other DNA
taggaaaagacatgctcatctttagagagggaaccccacttcagcctgctgaccatgagaggccagcggctgcccctcgatatacagatcttttactgcgctcgacccgatgaagagccatttgtgaagatcatcacggtcgaggaagccaagaggagaaaatctacatgcagctactatgaggacgaagatgaagaagtgttacccgtcttgagaccacactccgccctgctggaaaacatgcacattgaacagctggcccggcgactgccagccagagtgcagggctacccgtggagactggcctattctactttggagcacggaacctcactcaagaccctgtaccgcaaaagtgcctctctcgattcgcctgtcctgcttgtgataaaggatatggataatcagatctttggcgcttatgcaactcaccccttcaagttctcagaccactactatggtacaggtgaaaccttcctgtatacgttttcaccccacttcaagtggtcaggcgagaatagttatttcatcaacggcgatatctcgagcctggagctgggggggggcggttag

SEQ ID NO: 126926 - DNA, 273 bp, synthetic construct
  misc_feature 1..273: note = Description of Artificial Sequence: Synthetic coding sequence
  source 1..273: mol_type = other DNA
atggatacaaaggaggagaaaaaagaacggaagcaatcctatttcgctaggctcaagaaaaagaaacaggccaagcaaaatgccgaaacggcgtccgccgtagcaacaagaacacacacaggtaaggaggataataatacagtggtgctcgaacctgataagtgtaatattgcggttgaagaggagtatatgaccgacgaaaagaaaaagcgaaagtcaaatcaactcaaagaaatacgtcgcaccgagctaaagcggtactattccatttag

SEQ ID NO: 126927 - DNA, 7566 bp, synthetic construct
  misc_feature 1..7566: note = Description of Artificial Sequence: Synthetic coding sequence
  source 1..7566: mol_type = other DNA
atgagtgggtcaacccaacccgtggcccagacttggagagcgactgagccgagatacccacctcactccctgagttatccggtgcaaatcgcgcgtacccacactgacgtaggacttttggagtatcagcatcattccagggattatgcatctcacctgtcccctggctcaataatccaaccccagcgcagacgaccatccctactttccgagttccagcctggaaacgagcggtcacaggaactgcacttgaggccggagtcacattcatatctacccgaacttgggaaatcagagatggagtttattgagagcaagcggccacgcctagagctgctacccgaccccctcctccgcccatctccgcttctggccactgggcagccggcaggaagcgaagatctcaccaaagaccgctcattgactggaaagctggagcctgtgagccctccctcgcctcctcacacggatccagagctggagctcgtgccccccagactttccaaagaggagctcatccagaacatggatagggtggaccgggaaataactatggtcgagcagcagataagtaaattaaagaaaaagcagcagcaacttgaggaggaagccgccaaacctcctgagccagagaaacccgtctccccccctcctatagaaagcaaacacaggagcctggtgcagatcatctacgacgagaacagaaaaaaggccgaggctgcccacagaattcttgagggcctcggaccacaggtcgagcttcccctgtataatcagccctccgacacccgacagtaccacgagaacatcaaaattaaccaggccatgcgaaagaagttgatcctatatttcaagcgaaggaatcacgcccgtaagcagtgggagcaaaaattctgtcaacgatatgatcagctcatggaggcgtgggagaaaaaggtggagcgaatcgaaaacaacccccgacgaagagccaaggagtctaaagtgcgcgagtactacgagaagcagtttccggagattcgcaaacagagagaactccaggagcgcatgcaatcgcgagtggggcagaggggatcggggttgtctatgtcagcagctaggagtgagcacgaggttagcgaaatcatagacggcctgtctgaacaggaaaatcttgagaaacaaatgcgccagctcgccgtaattccccctatgctgtacgacgcagaccagcagaggataaagttcattaacatgaatggattaatggctgatcctatgaaggtttacaaggacagacaggtgatgaatatgtggtccgaacaggagaaagagacgtttcgggagaagttcatgcagcatcccaagaatttcgggctgatcgccagctttttagaaagaaagaccgtagccgagtgtgttctctattactacctaaccaaaaagaacgaaaactacaaatctctggtaaggaggagttacaggcggcggggtaagtctcagcagcagcagcaacagcaacagcagcagcaacagcagcaacagcagcaacctatgcccaggagtagtcaggaggagaaggacgaaaaagaaaaagaaaaggaagccgagaaggaagaagagaagcccgaggtggagaacgacaaggaggacctgctgaaagagaagacagatgatacctcaggagaagataatgatgagaaagaggcagttgcctcgaaaggacggaaaacagccaattcacaaggtaggaggaaaggccgaattacacgcagcatggccaacgaggctaactccgaggaagcgattaccccccagcagtcagccgaactggcctcgatggagctgaacgagtcatcgcgatggacggaagaagagatggaaactgctaagaaggggctcctggagcacgggaggaactggagcgctatagcacggatggttggctcaaaaactgtgagccagtgtaagaacttctattttaactataaaaaaagacagaatttggatgagattctacaacagcacaagctgaagatggagaaggaaagaaacgcacgaaggaaaaagaagaaggctcccgcagccgcctctgaggaggcggcgttcccacccgttgtggaggatgaagaaatggaggcttctggcgttagtgggaatgaggaggaaatggtggaagaggctgaggcgctccatgccagtggcaacgaagtcccacggggtgagtgcagcgggccagccacagtgaacaattcaagcgataccgaatcaattcctagtcctcataccgaggccgctaaagataccgggcagaatggccctaagccgccagctaccctgggtgcggatggaccgccacccggacctcccactccacccccagaagatattccggcccctaccgaaccgacacccgccagtgaagcgaccggcgcgcccacaccgcctccggctcctccctctccttccgcccccccccccgttgtgccaaaggaagaaaaagaggaggagaccgctgctgcaccaccggtggaagaaggggaagagcaaaaacctccagcagcagaagagctggcggttgacaccgggaaggccgaggaaccggtgaagagcgaatgcactgaagaggccgaagagggacccgcaaaggggaaggatgctgaggccgctgaggccactgccgaaggagccctcaaggcagaaaaaaaagaaggaggttccggccgcgctaccactgcgaaaagctcaggcgctccacaggacagcgatagcagcgctacatgtagtgccgatgaggtggatgaagcagaaggtggtgataaaaatcgccttcttagtcctcgaccctcacttctgaccccaactggggacccacgggcgaacgcaagcccccaaaaacccctggacctcaaacagctgaagcagcgtgccgccgcaatcccacccatcgtaacaaaagtccatgagccgccgcgggaggatgcagcacccactaaacctgctcccccagcaccgcccccaccacagaacctccagcccgagtccgatgccccccagcaacctggcagctccccacgaggtaagtctcgatcaccggccccacccgcagacaaagaggctgagaagcccgtgttctttccagccttcgctgcagaggcccagaaattgcctggcgacccgccttgttggacttccggcctcccctttcctgtccccccacgcgaggtgataaaggctagtcctcacgcccctgatccttcagcatttagctacgctccacctggtcaccccctgccactgggcttgcacgacacagcccggccggtcctgccaagacccccaaccatctccaacccaccgcccctcatcagctctgccaagcatccctcggtcctggaaaggcagataggtgctatcagccagggcatgagtgttcaactgcatgtgccttactctgaacacgccaaggcgccagtggggcctgtaactatggggctacctctccccatggacccgaaaaaactcgcgccattcagcggcgtgaaacaagagcagttgagtccgagaggacaggctggcccccctgagagtctgggcgtgccaacggctcaggaggcttccgttctgcgtgggacagcgttgggctctgtgccgggaggctccatcactaaagggatccccagcactagggtgccatcagattcagcaattacataccgcgggtctattacccacggcaccccggccgatgtcctgtacaaaggtactatcacccgaattatcggcgaggacagccctagtcgcttggaccgcggccgggaagatagccttccgaaaggtcatgttatttatgagggcaaaaagggtcatgtgttgtcctacgagggagggatgtcagtaacccagtgttcaaaagaagatggcaggtcatcaagtggtcccccacatgagaccgcagctccaaaacgtacctatgatatgatggagggtagggtcggcagggcaatttcgagcgcgtccattgaaggtctgatgggccgagccatccctccagagcgacactcgcctcatcacctgaaagagcaacatcatatcagagggtcaattacgcaagggattccacgctcttatgtcgaggcccaggaggactacttgcgccgggaggcaaagctgctgaagcgtgaaggaacgccccctcctcctcccccttccagggacctgactgaagcttacaagacacaggccctggggcccctgaagctgaaaccagctcacgaaggactcgtcgccactgttaaagaggctggtagatccatccacgagatcccccgagaagagctccgccatacaccagaactcccccttgcaccccgacctctgaaagagggttccattacccagggaacgccgctgaaatatgacacaggtgccagcactaccggatctaaaaagcacgatgttagatcgctgatcggatcccctggacgtacatttcctcccgtgcaccctctagatgtgatggctgacgcccgggcactggaacgggcttgttatgaagagagtttaaagtccagacccgggacggcttcctcctctggtggatccatcgcgcgcggggccccagtaatcgtgccagaactaggtaaacccagacagagccctctcacttacgaggaccacggcgcacctttcgctggtcatctccccagaggctccccagttaccacacgggagccaacgcctcggctgcaggagggatcgttgagctccagcaaggcctcacaagaccggaaattgaccagcacccccagggaaatcgcaaagagtccccactcgacagttccggaacatcacccgcatcccatcagcccctatgagcatctattaagaggtgtatcgggggtggacctttatagaagccacatcccattggcgtttgatcccacttccatcccacgcgggataccgctggacgcagcagcagcttactatcttccgagacacctggctccaaatccgacatacccccatctctatcctccatacctgatccgaggctaccccgatactgccgcactggagaatcggcaaacaattatcaacgattatatcacctcgcagcagatgcaccacaatgcggccacggcgatggcccaaagggccgatatgctgcggggcctatctcctcgggaatcttccctggccctcaattacgccgctggtcccagaggcatcatagacctgtctcaggtgccacatctgcccgtcctcgtgccacccacccccgggacacccgccaccgctatggaccggctggcttacttaccgactgcgccccagccattcagttcaaggcactcctcttcacccttgagccccggcggaccaacacacctgaccaagccaaccacaacaagctctagcgaaagggaacgcgacagagaccgcgagagggatcgcgatagggaacgggagaaatccatactgacgagcactacaacagttgagcacgccccaatatggcgtccgggcactgagcagagcagcggaagctctggcggcgggggcggctcttcgagccgccctgctagtcattctcacgcacatcagcacagccctatctctccacgcacacaggatgcacttcagcaaagaccttccgtgctgcataacaccggaatgaagggaattattaccgccgtggagcctagcacacccacagttctccgaagtaccagcacttcatccccagtgagacctgcagccacattcccgcccgccacgcactgcccgctgggaggaaccctcgacggggtgtacccgactctgatggagcctgtgctgctgcccaaggaggccccgagggtggcccgcccagagagacctcgggccgatacaggccacgcctttctcgccaaaccccctgcacgttctgggttggaacccgctagctccccttccaaggggtctgagcctcgccccctggtacctccagtgagcggtcatgctacaattgcacggacccccgcgaagaacctggcccctcatcacgcctctcccgacccacctgcccctcctgctagcgccagtgaccctcatagagaaaagacccagagtaaaccattttccattcaggaactcgaattgcgaagcttggggtatcacggcagctcgtatagtcctgagggtgtcgagcccgtgagccccgtgagctctccctcgctgactcacgacaagggacttccaaaacaccttgaggagctcgacaaaagtcacctggagggggagctacggcccaagcagccggggccagtgaaactggggggagaggctgcacaccttccacaccttcggcctctcccagaatcacagccatcttcatcccctctgctgcagactgccccaggcgtgaaggggcatcaacgggtcgtaaccctggcccagcacattagtgaagtcatcactcaagactacactcgtcatcatccacagcagttgtcagcccccttgcccgcaccgctttatagttttcccggtgcttcatgccctgtgctggatctgaggaggccccccagtgatctatacctgccccctccggaccatggcgcccctgctaggggctcaccccattctgaaggtgggaagagatctcccgagcccaataaaaccagcgtgctgggcggaggcgaagatggcatcgagccagtttccccccctgaaggcatgactgaaccaggacactcgcggtcagccgtgtaccctctgctgtacagagacggtgagcagactgaaccctcccgcatgggcagcaagtcacctggaaacacttctcagccaccagcattcttcagtaagttgacagagtcaaactctgcaatggtaaaaagcaagaagcaggagattaataagaagttgaatacccacaacaggaatgagcctgagtacaacatcagtcaacctggcaccgagatcttcaatatgccggccatcaccgggactgggcttatgacataccgttcacaggccgtgcaagagcatgcctcaaccaacatggggctggaggcaataattcgcaaagcgttgatgggcaagtatgatcaatgggaggagagcccaccccttagcgccaatgcgttcaatcccctcaacgcgagcgcttcccttccggccgcaatgcccatcacggccgctgatggcagatcagaccataccctgacctcacctggaggcggcggaaaagcgaaagtgagcgggaggcccagttccaggaaagctaaatcccctgcacctgggctcgcctccggcgaccgaccacccagcgtgtcgagcgtgcactcagagggtgactgtaacagacgcacccccctaacaaacagagtatgggaagacagaccttccagtgccggctcgacgcctttcccctataatcccctgattatgcgcctgcaggcaggagttatggcgagccccccccctccgggacttccagctggttctggaccactggccggcccccaccacgcctgggacgaggagcctaaacctcttctatgtagccagtacgagacactcagcgatagcgaatag

SEQ ID NO: 126928 - DNA, 7380 bp, synthetic construct
  misc_feature 1..7380: note = Description of Artificial Sequence: Synthetic coding sequence
  source 1..7380: mol_type = other DNA
atgagcggctccacacagcctgtggctcagacttggagggctacggaacccagataccctccccactccctttcatatcctgtgcagatcgctcggacccataccgatgtgggtctgctcgagtaccagcaccacagcagggactatgcaagccacttgagcccaggctctatcatacagccccagaggaggcgtccctccctcctgagtgaattccagcccgggaatgagcggtctcaggaattgcatctgaggccagaatcccacagctatcttccggaactcgggaaatccgagatggagtttattgagtccaagaggccccgtttagagctgctgccagaccctttgcttcgccccagtccccttctggccaccggccaacctgccgggagtgaagacttaacaaaagataggtcattaacaggcaagctggagcctgtgtcacctcccagccctccccacaccgatcccgagctggagctggtaccacctcggttgtccaaagaggaactaatccagaacatggatcgcgtggatcgggaaataacaatggttgagcaacaaatttccaagctgaagaagaaacaacagcagctggaggaggaagccgcgaagccacctgaacccgagaagccggtaagcccacccccaattgaaagtaaacatcgctccctggtgcagatcatttacgacgagaaccggaaaaaagcggaagccgctcataggatccttgaaggattaggcccccaggtcgagctcccactttataaccagcccagcgacacccgccaatatcacgagaatatcaagattaatcaggccatgcggaaaaagctcatcctgtactttaaaaggaggaatcatgcacgaaagcagtgggaacagaagttctgtcagcgctatgatcagctgatggaagcgtgggagaaaaaggtggaaaggatcgaaaataacccaaggagaagagccaaagaatcaaaggttagggaatactatgaaaaacagttcccagagattcggaaacagcgtgagctgcaggagagaatgcaatctcgggtggggcaacgcgggtctggtttgtctatgtctgctgccaggtctgaacacgaggtatcggagattatcgatgggttgtccgagcaggaaaacttagagaaacagatgcggcagctagctgtgattccaccaatgttatacgatgccgatcaacaacggatcaaattcattaacatgaacgggttaatggcagacccgatgaaagtgtacaaagatcgacaggtgatgaatatgtggtctgaacaggagaaagagacatttcgcgagaagtttatgcagcatccgaagaatttcggccttatagcaagctttctggagaggaagacagtggccgagtgcgtgttgtactattacttaacaaagaaaaacgagaactacaaaagcctggtacgcagatcctatcggcgccgcggaaaaagccagcaacaacagcagcagcagcagcagcagcagcagcagcagcagcagcagcctatgccacgctcctcacaagaggagaaggatgaaaaggaaaaggagaaggaggcagagaaagaagaggagaagccggaagttgagaacgataaagaggatttacttaaggaaaaaaccgatgatacgagcggtgaagataacgacgagaaagaggctgtcgcaagcaagggtaggaaaactgctaacagccagggccggagaaaagggcggattacacgttctatggcgaacgaagctaatagtgaggaagctatcacaccccagcaaagcgccgaactggcaagtatggaacttaacgaatcctcccggtggacagaggaagagatggaaactgccaaaaagggcctgctggaacacggtaggaattggtccgccatcgcccgcatggtgggcagcaaaactgtcagccaatgcaagaatttttattttaactataaaaaaaggcaaaatttagatgagatcttgcagcaacacaagttaaagatggaaaaggagcgtaatgctcggaggaagaagaaaaaggcacctgcggcagcttcggaggaagctgccttcccccccgttgtggaagatgaggaaatggaggcatccggcgtgtctggaaatgaggaggaaatggtagaggaggccgaggccacagtgaacaacagcagcgacacagaaagcattccctcaccacacaccgaagcggctaaggatacaggacagaacggacccaagcctcccgctaccttaggggccgacgggcctccgccagggccacctacgcctccacctgaagacattcctgcccctaccgagccaactcctgcgtcagaagcaaccggtgctccaacgccaccgccagctcccccctcaccttccgctccaccacctgtcgtgccaaaggaggagaaggaagaagaaacggcagctgcccctcctgtggaagagggcgaagagcaaaaaccgcctgcggccgaagaattggcagtagacaccggaaaggccgaagagcctgtgaagagtgagtgcactgaggaagctgaagagggaccagctaaaggtaaggatgcagaggccgctgaggctacggctgaaggtgctctgaaggcggagaagaaggaaggaggctcaggacgagcgaccactgcaaaatcgtcaggcgctccgcaggactcagactcatccgctacttgttccgcagacgaagtggatgaagcagagggcggcgataagaaccgactgctgagccccagaccctccctcttgacccctactggagatccccgggcaaacgcttcacctcagaaacctctggatttgaagcagttaaagcagcgcgccgctgcaatcccgcccatccaagtgaccaaagtccatgaacccccaagagaagatgctgctcctactaaacccgccccacctgcgcccccccccccgcaaaacttacaacccgagtccgacgccccccagcaaccaggcagttccccccgtggcaagagccgctctcctgcacccccagcagacaaagaagcagaaaagccagtcttcttccccgccttcgctgcagaagcccagaaacttccaggcgaccctccttgctggaccagcggcctcccttttcccgttccaccccgggaggtcattaaagcctcaccccacgctcccgaccctagcgcatttagttacgccccacccggccacccactgcctctaggtctccacgatacggcccgtccagtgctgccccgcccacctactatatccaaccctcctcctctgatatcatcagccaaacacccatccgtcctggagcgccaaatcggagccatatctcagggaatgtccgtgcagcttcacgtcccttactccgagcatgccaaggcccccgtggggcctgtcaccatgggcctgcctctccccatggacccaaagaaactggctcctttttcaggagttaagcaggaacaactgagtcctagaggccaagctggcccccctgaaagtttaggtgttcctactgctcaggaagcatccgtgcttagaggcaccgctttgggctcagtcccaggcggctccattacaaaagggatcccgtcaacacgcgtaccatcagattccgcgatcacttataggggcagtatcactcatgggacacctgctgatgttttgtacaaaggaaccatcacgcggataattggtgaagatagtccttctcggctggacagagggagggaagactcgctccccaaagggcacgtcatttacgaaggcaaaaaagggcatgtacttagttatgagggggggatgagcgtaacccagtgcagcaaagaagatgggcgcagctctagtgggcctccccacgaaactgccgcacccaaacggacctacgacatgatggagggccgcgtcggtcgcgccatttccagtgcatccatcgaagggctgatgggtcgggcaataccaccagagagacacagcccccaccatctgaaggagcagcaccatatcagaggaagtattacacagggaattcctcgatcctacgtcgaggcacaggaggattatttgaggcgtgaggccaagttattaaagagggagggcacccccccgcccccacctcctagtagagacttgacagaggcatacaagacacaggccctcgggccgttgaaattaaagccagcccatgagggcctggtcgcaacagttaaagaggccggaagatcaatacacgagatcccaagggaggagctaaggcacacccctgaattacccttggcccccaggccactgaaggagggctccattacacaggggactccgctcaagtacgatacaggcgcctcaaccaccgggtctaaaaaacacgacgtgcgtagcctaataggaagcccaggtcgcactttccctccggtccacccactagatgtaatggccgacgctcgggcgctcgagcgggcctgttatgaggagtctctgaagtcccgcccaggcacagcttcctccagcggagggtctattgcacgcggggcccctgtgatcgtccctgagctgggcaagcctcgccagagccccctgacctacgaagatcatggagcaccctttgcaggacaccttccacgcgggagtccagtgaccactcgggagccaactcctcggcttcaagaaggatccctttctagctcaaaggccagtcaggatcgcaaactgacctcaactcctcgggaaattgcgaagtccccccattcaactgtcccagagcatcatcctcacccaatctcgccttatgaacacctcctgaggggcgtcagtggcgttgacctgtataggtctcatatccctctagcattcgatcctacctccattcccagaggcatcccgctcgacgcagccgcagcttattatctgccgaggcacctcgcaccaaaccctacgtacccacacctgtaccctccatatcttatccgggggtatcctgacactgcggctttggagaaccggcaaactatcataaacgattacattacaagtcaacagatgcatcacaacgctgccacagccatggcccagagagcggatatgttgcgaggcctcagtcctagagagtctagtctagccctaaattacgcagccgggccccgcggtattatcgatttatctcaggtccctcacctgcctgtcctggtgccaccaacccccgggacacctgccacggcaatggataggctggcatacctgccaaccgccccccaacctttctcatcccggcactctagtagtccactgtctccaggcggccctactcacttgactaaacctaccacaacaagctcgagcgagagggagagggaccgcgatcgggagcgcgacagagacagagagcgggagaagtccattctgacttccacaactaccgtggagcacgccccgatatggagaccagggacggagcagtcgtcgggaagcagcggaggcgggggcggctcctcttcccgccctgcctcccatagccatgcccaccagcacagccccatttccccccgcacacaggatgcgcttcagcagagaccttcggtcctccacaatactggcatgaaagggattatcacagctgtggaaccgtccacgcccacagtgctgcggtctaccagtacatcatctcccgtccgccctgccgccactttcccgcccgcaacacattgccctctgggggggaccctggatggcgtatatccaactctaatggaaccagtcctgttgccaaaggaggcccctagagtagcccgtcccgagcggccccgggccgataccggtcacgcatttctggccaagccgccagcccgcagcggattggaacctgcctcaagtcctagtaagggatcagaacctcgcccgcttgtgccaccagtgagcggccacgctaccattgctagaacgccagccaaaaatctggcacctcatcacgctagtccagacccccctgctcctccagcctcagcctccgaccctcacagggagaaaactcagagcaagccttttagcatccaggagctcgagcttagatctttgggctatcacgggagcagctactcccccgagggcgtggaaccagtgtctccagtctcttccccaagcctgacgcacgacaagggcctgcccaaacatcttgaggaacttgataaaagccacctcgaaggggaactcaggcctaagcaacccggccccgtcaagctcgggggggaagctgcccaccttcctcatttaaggccgctgccagagtcgcagccctcttcctcacccttactgcaaaccgctcccggagtgaagggtcatcagcgagtggtgacattggcccagcacatttccgaagtcattactcaggattacacccggcatcacccacagcagctctcagcacctttgcccgcaccactctatagctttcctggtgcctcttgccctgtactggatttaagaagaccaccgagcgacttgtatttaccaccgccagaccacggggccccagcaagaggaagcccccactcagagggcggtaagagatctccagagccaaataagacgtccgttctggggggcggtgaagacggcatcgagcctgtctccccacccgagggcatgaccgaacccggacactctcggagtgccgtatatcctctgttgtatcgcgacggcgagcaaaccgagccaagccggatgggtagcaagtcaccaggcaataccagtcagcctcctgctttcttctcaaagctgaccgaatctaactccgccatggtgaagagtaagaaacaagagataaacaaaaagctgaatacccataaccgtaatgagccagaatacaacatcagtcagcccggaaccgagatattcaacatgcccgcaattacgggcacaggccttatgacttacaggagccaagccgtgcaagaacacgcaagcacaaatatggggctcgaggccattatcagaaaggctctgatggggggcggaggaaaagccaaagtgagtgggaggccaagctctcggaaggcaaaaagcccagcacccggtctggcctccggggaccggccaccatccgtgtcctccgtgcacagtgaaggcgactgcaacaggagaaccccccttacaaaccgagtgtgggaagacagaccatcgtccgctggttccacccccttcccgtataatccacttataatgaggctccaagccggagtcatggcctcgcctccacctcccggcttgcctgccggatcaggcccccttgccgggcctcaccatgcgtgggatgaggagccaaaaccactgttgtgctcccaatatgagacactgtccgacagtgaatag

SEQ ID NO: 126929 - DNA, 6228 bp, synthetic construct
  misc_feature 1..6228: note = Description of Artificial Sequence: Synthetic coding sequence
  source 1..6228: mol_type = other DNA
atgtggtctgagcaggaaaaggagacttttcgggagaagttcatgcagcaccctaagaattttgggctgatcgcctcttttctggagaggaagactgttgcagagtgtgtgctctactactacttgacgaaaaagaacgagaattataagagtctagtgaggcggtcttacaggcgtcgaggcaaatcccagcagcagcaacagcagcaacagcagcaacaacagcagcagcagcagcagcccatgcctcgatcatcccaggaggagaaggacgagaaggaaaaggagaaagaggctgaaaaagaggaggagaagcctgaagtggaaaacgacaaagaggacctgttaaaggaaaaaacagacgataccagtggcgaggacaatgacgagaaggaggccgtggcatccaagggtcgaaaaacagctaacagtcagggacgcaggaaaggccggattacacgctctatggcaaatgaggcaaattctgaggaagccatcaccccccaacagtcagctgagctagcctctatggaactcaacgagagcagccgttggaccgaggaagagatggaaacggccaagaaaggcctcttggaacacggaagaaactggtccgccatcgcacggatggttgggagtaagactgtgtctcagtgtaaaaatttttacttcaattataagaagagacagaatttagatgaaatcttgcagcagcataagttaaagatggaaaaggaaagaaacgccaggagaaaaaagaagaaggctcccgctgcagcaagcgaagaagcggccttcccacctgttgtggaggacgaagagatggaagcttcaggtgtgagtggcaatgaggaggaaatggtggaggaggctgaagctactgtcaataattcctcagacaccgaaagcatcccctcccctcacaccgaagccgcaaaggacactgggcaaaatggtcccaagcccccggctacactcggtgcagatggaccaccccccgggcctccgactccacctcccgaagacataccagctcccaccgaacccactccagcttctgaggcgacgggcgcaccaacacccccgccagcccccccttctccatccgctccccctccagtagtccctaaggaggagaaggaagaggaaactgctgcagcccctccagtggaagaaggagaggagcagaaaccaccagccgccgaggagcttgctgtggacacaggcaaagcggaagagcccgtgaagtccgaatgcactgaggaagccgaggagggtcctgccaaaggcaaggatgcagaggcggcagaggccacagctgagggtgcgttaaaggccgagaagaaggaaggggggtctggcagggcaaccacagcgaagtcgtcaggagcccctcaggattctgacagttccgcgacgtgttcggctgacgaagtggacgaagccgagggcggagataagaaccgcctcctctctcctcgtccatctctgctcaccccgaccggcgacccccgggcgaatgcaagccctcagaaacccctcgatctgaaacaattgaaacaacgtgccgccgctattccaccaatccaggtcactaaggttcacgagcccccccgtgaggatgccgctcctaccaaaccggctcctcccgcgccccctcctccccaaaaccttcagccagagagtgacgctccccagcagccagggagtagcccccgtggcaaatcccgttcacctgcccctcccgcagacaaggaagcagagaagcctgttttcttccccgcctttgccgctgaagcacagaaattgcccggagatccaccttgttggaccagtggcctgccatttcctgtgccaccaagagaagtgatcaaggccagtccccatgcgccagatccgtcagcctttagttatgccccaccgggacaccccctgcccctcgggttacacgacacagccagacctgtgctccctcgtcccccaacaatcagcaaccctcccccactgataagcagcgctaagcatcctagcgtattggagaggcagataggcgctattagccagggcatgagcgtgcagctccacgtcccctactcagagcacgcaaaagccccagtcggaccagtcacaatgggactgccactcccgatggacccgaaaaaactggcgcccttttccggtgtcaagcaggagcagctaagcccacgcggccaggctgggcctcctgagagtctaggggtgccaactgcccaggaggcttctgtgcttcgcggtacggctttagggtcggtgcctggaggatccatcactaaggggattccctctacgagggttccttcggatagcgccatcacttatagaggttcaattacacacggcacccctgcggatgtgttgtacaaaggtactattaccagaatcatcggtgaagatagtccaagtcgcctggatagaggtcgtgaagactctctgccgaaagggcacgtgatctatgagggcaaaaaaggacacgtcctgagctacgaaggggggatgagcgtgacccagtgcagcaaggaggatggacgttcaagttctggacctccccacgagacagctgccccaaagaggacatacgacatgatggaaggcagggtgggccgcgccatcagcagtgctagtatagaaggcctaatgggcagagccatcccccccgaaaggcatagtcctcatcacctgaaggagcagcaccatattaggggctccattactcaggggattccccgtagctatgtggaagcgcaggaggattacttacgacgggaagccaagctactgaagcgagagggtactcccccaccaccccctccaagtcgggatcttactgaagcctacaaaacacaggctttaggtcctctgaagttaaaacctgctcacgagggtctggtggcaacggtgaaggaggcagggcggtcgatccacgagatcccgagggaggagttacggcatacacccgagttgcctctggccccaaggccacttaaggaagggtctatcacacagggaactccccttaagtacgacacaggggctagtactacagggagtaaaaaacacgacgtcagatccctcataggctctcccggcagaacatttccaccagtgcacccattggatgtgatggcagacgccagagctctggagcgcgcatgttatgaggagtcattgaaatccaggcctggtaccgcttcctcaagtggtggtagtatcgcacgtggtgcgcctgtgatcgtgccagagctgggtaagcccagacagtcccctcttacatatgaggatcatggcgctccctttgcaggacaccttccacgaggatcacccgtgacaacccgcgaaccgactccacgtctgcaggagggctcactgtcctcctccaaagcctcacaggaccggaaactgacatcaacccctcgggaaattgcgaagtcaccacattccaccgtgcctgagcaccatccccatccaatctctccatatgagcatctgctaagaggtgtttctggagtggatctgtaccgtagccatataccactcgcctttgaccccacaagtattccccggggtatccctctggacgccgcggctgcttactacttgcccagacacctggcgccgaaccctacctacccccacctatatcctccctatctgattcgcggctaccccgacacagccgccctagaaaatagacagactattatcaatgattacatcacaagtcagcaaatgcatcacaatgctgcgaccgccatggcccagcgggccgatatgctgcgcggactctccccacgagagtcaagccttgcactcaattatgcagctgggccgagagggattattgacttgtctcaagtcccgcatttgcccgtcctcgtgccaccaactcccgggacccctgctaccgctatggatcggctggcttatttgccgacggcccctcaaccattcagctctcgtcacagctctagtccactgtcccctggtggtccaacgcacctgaccaagcctaccacgacaagctcttccgaacgcgaaagggaccgcgacagagagagggatcgcgatagggaacgcgaaaaatccatactcacaagtaccacaacggttgaacacgccccaatctggcggcctggtaccgagcagtcttcgggttcttctggcgggggtggtggcagctcatctaggcccgcctcccattcccacgcccatcagcacagtcccatatccccaagaactcaagatgccctccaacagcgaccctcagttcttcacaataccgggatgaagggtattatcactgctgtcgaaccttcaactccaaccgtgctcagaagcacaagcaccagctcgcccgttcggcccgccgccacttttccacccgctacccactgcccactagggggtaccctagatggagtgtatcccactctcatggagcccgtcctgcttcctaaggaagcccccagggttgcgaggcctgagcgtccacgtgccgacacaggtcatgcatttttggctaagccacccgctagatctggcctggaaccagcctcatctccttcaaagggctccgagccacggccgctggtcccaccagtatccggccacgctacaattgcacggacaccggccaaaaatctcgcccctcaccacgcgagcccagacccacccgctccccccgcttccgcatcggacccccatagagaaaaaacccagagtaaaccatttagcattcaggagctagagctgcgcagtctgggctaccacggctcaagttactcccccgagggcgtggaaccagtttctccggtgtcgagtccttcgctcacccatgacaagggattacctaagcacctcgaggagcttgacaagtcacacctcgagggcgagcttcgcccaaagcagcccggcccggttaaactcggcggggaagccgcacatttacctcacctgaggcctctacccgaatcgcagccgagcagctctccactcctccagaccgcccccggggtgaaaggccaccagagagtcgttacgcttgctcaacacatttccgaagtgataacccaggattatactagacaccaccctcagcagctgagtgccccattacctgctcctctttatagctttcccggtgcctcatgtcctgtgctagatctgcgccgccctccctccgacctgtacttgcctccccctgaccacggggcgccagcacggggtagccctcactccgaagggggcaagaggagccctgaacctaataagacatcggtgctgggtgggggcgaggacgggatcgagcccgtgtcgccacccgagggtatgaccgaacccggacattcccggagtgccgtttacccactcttatacagagacggggaacagaccgagccaagccgcatggggtcaaaaagcccaggaaatacttctcagccacccgcatttttctctaaactgactgagtcgaactccgcaatggtgaagtccaagaagcaggagataaacaagaagctgaatacacacaatcgtaacgaaccagagtataatatctctcagcccggaaccgaaatttttaacatgccggccatcactggcaccggcctgatgacgtaccggagtcaggctgtccaggaacacgctagcactaatatgggtttggaggcaatcatccgcaaagctctcatgggaaagtacgatcagtgggaggagagtccccctctgtccgctaacgcattcaatccgctgaacgcatccgccagcctgcccgctgccatgcctattaccgcagccgatggccggtcagatcacaccctgacgtcacctggaggaggtggcaaggccaaagtcagcgggagaccatcatcccggaaggcaaaatcgccagcccccggtctggcctctggcgacagacctccttcagtttcctcagtgcatagcgaaggcgactgcaaccgccggacaccccttaccaaccgggtgtgggaagatcgcccaagttcagccggatccacccccttcccatataacccacttataatgagactacaggccggtgtgatggcctctccaccaccaccgggtctgcctgcggggagtgggcctctggctgggccccatcacgcttgggacgaggaacctaagccgctcttgtgctcacagtacgagacgctgtctgatagcgagtag

SEQ ID NO: 126930 - DNA, 7377 bp, synthetic construct
  misc_feature 1..7377: note = Description of Artificial Sequence: Synthetic coding sequence
  source 1..7377: mol_type = other DNA
atgtcggggagcactcaacccgtggcccagacctggcgggcaaccgagccccggtatccaccacacagcctgtcatatcccgtgcaaatcgctaggacacatactgatgtgggactgctggaatatcagcaccactcccgcgattatgcttcgcatctttccccgggcagtattattcagccacagcggcggcggccttcattgctcagcgaattccagcctggcaacgagcgctcacaagagctacatctgaggcccgaaagccatagttacctaccagagttgggcaagagcgaaatggaattcattgagagcaagaggccccgtctcgagctactgcctgatcccctgcttcgtccctctccactgctggcaacgggccagcctgccggtagtgaagatctaactaaggaccggtcactgacaggaaaattggagcctgtgtcacccccctccccaccacatactgacccagagctggaacttgtacctcctcggctgagtaaagaagagttaattcagaacatggaccgggtggatagagagataaccatggttgagcagcagatcagcaaactcaaaaaaaaacagcagcagttggaagaagaggctgcgaagcccccagagcccgagaagcctgtttcgccccccccgattgagtccaagcatcgctccctagttcaaatcatttatgatgaaaatagaaaaaaagccgaagctgcccatcggatactggagggtctgggtccgcaagttgagttaccactgtacaaccagccgagtgataccagacagtaccatgagaatattaagatcaaccaagctatgcggaagaaacttatcttatactttaaacggcggaaccacgctaggaaacagtgggagcagaagttctgtcaaaggtatgatcagctcatggaggcatgggaaaagaaggtggaacgaatagagaacaatcccaggagaagagcgaaggaatctaaggtaagggagtactacgaaaaacaatttccagaaatcagaaagcagcgggaactgcaagaacgaatgcaaagggttggtcagcggggtagcggtctgagcatgtccgctgccagatcggagcacgaagtatctgaaattatcgatggactcagcgaacaggagaacctagagaaacagatgcgccagctggcagtgattccacctatgttgtacgacgccgatcagcagagaatcaaatttattaacatgaacggtctcatggcagacccaatgaaggtctacaaggacagacaagtgatgaacatgtggagtgaacaggagaaggaaacctttagggaaaagtttatgcaacatcctaagaattttggacttatcgctagttttctagagagaaagaccgttgcggaatgcgtgctgtactactatctaacaaagaaaaacgaaaactacaagagcctggtgaggagaagctacaggcgccggggtaaatcccagcagcagcagcagcagcagcagcaacagcagcagcaacagcaacagcaacctatgccccggtcgagccaagaggaaaaagatgaaaaggagaaggaaaaagaagccgagaaggaggaagaaaaacctgaggtcgagaacgataaggaggatctgttgaaagagaaaacagacgataccagtggcgaggacaacgacgagaaagaagccgtggcttccaagggtcgtaaaacagccaatagccaaggccggcgcaaaggccgtatcactcgctccatggccaacgaagccaatagcgaagaagctataacaccgcagcaaagcgccgaactggccagtatggagttaaacgaatcctcaagatggacagaagaagaaatggagacagctaaaaaaggcttgcttgagcatggacgtaactggagcgccatcgcgcgaatggtcggctccaagaccgtttctcaatgcaagaacttctacttcaattataagaaaaggcagaatctggacgaaatcttacagcagcacaagctgaagatggaaaaagagcgaaacgcgagacgaaagaagaagaaggctcccgccgcagccagcgaggaagccgccttccccccagtcgtagaggatgaagaaatggaagccagcggggtgagtggaaatgaggaagaaatggtcgaggaggctgaggcaaccgtaaacaacagcagcgatacagagtctattccttccccacacactgaggccgcaaaagataccgggcaaaatgggcccaaaccaccggccaccctcggcgctgatggtcctcccccggggccgcccacacccccacctgaggacattcctgcaccgacagagccaacgccagcttctgaggccacgggggcccctacaccaccgccagctcccccaagtccttccgcaccgccccccgtggtgcccaaagaggagaaagaggaagaaaccgccgcagcccctccggtggaagaaggcgaggagcagaaaccaccggctgctgaggagctagccgtggacaccggcaaagcagaagagcctgttaaatccgagtgcaccgaagaagccgaggaaggtccagctaaggggaaagatgccgaagctgcggaggccacagcagagggagccctgaaggctgagaaaaaggaaggtggatccgggcgcgccacaaccgctaaatcatctggggccccccaagattccgatagttcagctacctgcagcgccgatgaagtggatgaagctgaaggcggcgataaaaatagattactgtctcctcgtccttctctcctcacacctacaggagacccccgggccaatgcaagcccccaaaagcctctcgacctgaaacagcttaagcagcgggccgccgccatcccaccaatccaggtcactaaggtgcatgagccacctagagaagacgccgcccctaccaaacccgcaccaccagcgcctccccctccccagaacctgcagccagagtccgatgcaccccagcagcctggcagctcacctcggggcaaatctaggtccccagccccgcctgcagataaggaggctgagaaacctgttttcttccccgcgttcgccgcagaagctcagaagctgcccggcgatccaccttgttggacctcgggcctgccgttccccgtgccccctcgggaagtaatcaaagcttcacctcatgcgcccgatccctcagctttcagctatgctcctcccggccaccccctgccactgggactccatgacactgcacgacccgtcctacctcggccccccacaatcagcaatcctccccccctgatttctagcgcaaaacatccatccgtgttggagagacaaattggcgccatatctcagggcatgtcagtgcagttacatgtgccatacagcgagcacgcgaaggccccagtgggtccagtcaccatggggctgcccctgcctatggacccgaagaaactggctcccttttctggtgtgaaacaagagcaactctcgccaaggggccaagcaggaccaccggagtctttgggtgtccctacagctcaggaagcatcagtcctgcggggaactgccctgggtagtgttccaggagggtcaataactaaggggattccaagtactagagtgccctcggactctgcgatcacatacagagggtctattacacatggaacgccagcagacgtgttgtacaaaggaacaattaccagaatcataggagaagattcccctagtcgcctggatcgcggacgcgaagattcactgccaaaaggacatgtgatttatgaaggcaagaagggtcacgttctgtcgtatgagggagggatgagcgtaacgcagtgctctaaagaagacggaaggagtagctctggacccccgcacgaaactgcagctccaaagaggacctacgacatgatggaaggtcgagtgggccgggctatttcatcggcgagtattgaagggttgatggggagggccatcccacccgagcgccactcaccgcaccacttgaaagagcaacaccatattaggggatcaattacccagggcattcctcgatcatacgtagaagcacaagaagactacctgcgaagagaggcaaaactcctaaaacgggagggcaccccacccccacccccaccttcccgggacttaaccgaagcgtataagactcaggctctagggcctcttaaacttaagcctgcccatgagggcctggtcgctacagtgaaagaggccgggcgcagtatccacgagattccaagggaggagctaaggcatactcccgagttaccacttgcaccccgtccactgaaggaaggctcaatcactcagggcactcccctgaaatatgatactggggcctctaccaccggaagtaagaaacatgatgtgagatccctcattggcagccctggccgaacctttcctcctgtgcacccgcttgatgtgatggccgacgccagggctctggagcgcgcctgctacgaggagtccctcaagtcacgccctggcaccgcctctagctccggagggagtatcgctaggggcgccccagtgatcgtcccagaactagggaaaccaagacagtcgcccctcacttacgaggaccacggggcacccttcgccggacatttaccccgtggatccccagttaccacaagagaaccgaccccgcgactccaggaaggatctctcagcagctcgaaagcatctcaggatcgaaagctcaccagcactccacgggaaatcgctaagtctcctcattccaccgtccctgaacaccacccacaccccattagtccttatgagcatctgttgaggggtgtcagtggagtggacctctaccggtcacatataccattagcgttcgatcccaccagtatcccccgcggcatcccactagacgccgccgcagcctactaccttccacggcaccttgcccctaaccccacttacccccatctttaccctccttatctgattcgcggctaccccgataccgctgcactcgagaatcggcagaccatcattaacgactacattacaagtcagcagatgcatcataatgcagctacagctatggcccagagggccgatatgttgcgcgggcttagtcctcgagaatctagcctggccctgaattatgctgcaggccctagggggattatcgacctttcgcaggtgccccatctgcctgtgctggtccctcccactccgggcactcccgccaccgcaatggacagactggcctatctgcctactgcccctcaaccgttttcctctagacactcgtctagccccttgtcacctggaggacccacccacttgactaagcccactacgacctcatcttccgaaagagaacgcgaccgggaccgggaacgcgacagggatagggaaagagaaaagtccatcctgacctcaaccaccacagttgagcatgctccaatctggagaccggggacagagcagtcaagcggttccagcggagggggtgggggctcgtcatcgcggccagccagccacagccatgctcatcagcacagccccatctcaccaaggactcaggatgccttgcaacagagacccagtgtgctacataacacaggaatgaagggcataatcacagccgtagaaccctctacacctactgtcctgcgctccacatccacctcctctccagtgcggcctgcagcaacctttcctcccgccacacactgcccactgggtgggaccctggacggcgtataccccacactgatggaaccagtccttctgcccaaagaggccccccgcgtggcccggcccgaaagacctagagcggacactggccacgcctttttggctaaaccaccggcgcggagtggtctggagccagcctcgagccccagcaaaggaagtgagcctcgccctctggtgccccctgtgtctggacatgcaacgatcgcaaggacacctgccaagaatttggctccacaccatgcgtcgcccgatcctccagccccgccagctagcgcgtccgacccccacagagaaaaaacgcagtctaaaccattttccatccaggagctcgagttgcggtctctgggctatcacggtagctcttatagccccgaaggtgtcgagccagtttctcccgtgtcatctcccagtctgacccacgataaaggactccctaaacatttggaagagctcgataagagccatctggagggcgagctgcggccgaagcagcctgggcccgtgaaactgggaggagaggcggctcacctgccccacttgcgcccgctaccggaaagccagccctccagctcgcccctgctgcagactgccccaggggttaaggggcatcagcgggtcgtaaccctagcccagcacatttcagaggtgataacgcaggattacaccagacatcacccccaacagctttctgcaccactgcccgctcctctgtattctttccctggcgcctcctgcccggttcttgacctgagacgacctcctagcgatctctacctaccaccacccgatcatggagccccagctcgagggtccccgcactctgaaggcggcaagagatcacctgaaccgaacaaaaccagcgtgttaggaggaggagaagatggcatcgaaccagtatctccccccgagggaatgacagagccaggccattcgcggtccgctgtatacccactcctttatagggacggcgagcagactgagcctagtcggatgggtagcaagtctccaggtaacacaagccagccccccgcgttttttagcaagctaacagaaagtaatagcgccatggttaaaagtaagaagcaggagattaataagaaactgaacacacataataggaacgaaccggagtataacatctctcagcccggtaccgaaatctttaacatgcctgctattacaggaacaggactgatgacctatcgcagtcaagccgtccaagagcacgcatccaccaatatgggactcgaagcaataatacgcaaggcattgatggggggcggaggcaaggctaaggtgtcaggacgtccctctagccgcaaggctaagtcccccgctccaggcttggccagcggggaccgccctccctctgtgagttctgtccactctgaaggggactgtaatcgcagaactccacttactaaccgcgtgtgggaggaccggcctagttccgctggcagcacacccttcccgtataaccctctgattatgcggttgcaagcgggcgtgatggcatctcctccgcctcccggtctccctgccggaagcgggcctctggcgggccctcaccacgcttgggatgaggagccgaagcctcttctctgttctcagtacgagacactgtcagattccgagtag

SEQ ID NO: 126931 - DNA, 7545 bp, synthetic construct
  misc_feature 1..7545: note = Description of Artificial Sequence: Synthetic coding sequence
  source 1..7545: mol_type = other DNA
atgtcgggtagcacacagcccgtggctcagacttggcgggcaacggaaccccggtaccctccacattctctgtcctatcccgtgcagattgcccgtacgcacactgacgtgggcctgcttgagtaccagcaccattcccgcgactacgcgtctcatctgtcaccaggatctataattcagccgcaaaggcgacggccttcactgctgagcgaattccaaccaggtaacgagagatcacaagagctgcacctgcggccagagtcgcactcctacctgcccgaattaggtaagagcgagatggaatttatagagtcgaaacgcccccgcttggagctgcttcccgacccactccttcggccctctcccctcttggccacgggacagccagctggctccgaggatctgacaaaggatcgttcactgacaggtaaactagagccagttagccctccatccccgccccacactgatccagagctagagttagtgcccccccggctgtccaaagaggagttgattcaaaacatggacagagtcgatcgcgaaattactatggtggagcaacaaatcagcaagttgaagaaaaagcaacagcagctcgaggaagaggccgcgaaaccaccagaaccagagaaaccggtcagcccccctcccattgaatcaaagcacagatcactggtgcagatcatctatgatgagaatcgcaagaaagccgaagccgctcacaggattctggaagggttgggcccacaggttgagctgcccctgtataaccagcccagtgacaccaggcaatatcatgaaaacattaagatcaaccaggccatgcgtaagaaacttatcctgtattttaagcgacgcaatcacgcccgcaagcagtgggagcagaaattttgccagaggtatgatcaactgatggaggcctgggagaagaaggtcgaacgaattgaaaataatcccaggcgcagagccaaggagtctaaggtgagagaatattacgagaagcaattcccagaaataaggaagcagcgcgagttgcaggaacgtatgcagtcacgagtgggtcagagaggttctggtctgtctatgtccgccgcaagatccgaacatgaagtcagtgagattattgacgggctgagcgagcaggaaaacttggaaaaacagatgaggcaactggcagtcattccaccgatgctgtatgatgccgaccagcagcgtatcaagtttattaatatgaacgggctgatggctgacccaatgaaggtctacaaggataggcaagttatgaatatgtggtcagagcaggaaaaggaaaccttcagggagaagttcatgcagcaccccaagaactttggcctgattgctagctttctggaacggaagacggttgccgaatgcgtattatactattatctgacgaaaaagaacgagaactacaagtcactcgtccgtcgctcataccgacgccgcggcaagtctcaacagcagcaacaacagcagcagcagcaacagcaacagcagcagcaacagcccatgccgcggagttcccaggaggaaaaggatgagaaggagaaagagaaagaggctgagaaagaagaggaaaaacccgaagtagagaatgacaaagaggatttactgaaagagaaaacagacgatactagcggggaggataatgatgagaaggaagcggtggcgtccaagggtcgcaaaaccgccaactcccagggcagaagaaaagggcggatcacccggtctatggcaaatgaggccaacagtgaagaggcaattactccccagcagagtgcagagctcgccagcatggagttgaatgaatcatctaggtggacagaagaagaaatggagacggctaagaaaggactactggagcacggtcgaaactggtcagccatcgcacggatggttggctcgaagacagttagccagtgcaagaacttttattttaactacaaaaaacggcagaatctggatgaaatcctgcagcagcacaagctgaaaatggagaaggagcggaatgctcgacgaaagaagaagaaggctcctgccgctgccagcgaggaggctgcgttcccccctgttgtcgaagacgaagagatggaggcctcaggagtaagtggaaacgaagaggagatggtggaggaggcagaagcactgcacgccagcggcaacgaggtccccagaggcgagtgctcaggccccgcaacagtcaacaatagcagcgacacagagagcatacccagcccccacaccgaggcggccaaagataccggtcaaaacggaccgaagcctccagccactctgggcgccgacggccctcctcccggtccacccactcccccgcctgaagacatacctgcccccactgaaccaaccccagcatccgaagccacgggagcccccacacctccgccagctccaccgagcccgagcgcacctcccccagtcgttccgaaagaagagaaggaagaggaaactgcagcagctcctcctgtcgaagagggcgaagagcagaagcctcccgctgctgaagagctggccgtggacacaggaaaggctgaagagcctgtcaaaagcgagtgcacagaggaagcagaggagggccctgcgaaaggtaaagacgccgaggctgccgaagccactgccgagggagccctgaaagcagagaaaaaagaaggaggctctgggagagctactaccgcaaagtcgtcaggggccccccaagactcagacagctcagcgacttgctctgccgacgaggtggacgaggccgagggaggggacaaaaataggcttctgtccccacgcccatcccttttaaccccaactggcgacccaagggcaaacgcaagcccccaaaaacctttggaccttaagcaactgaaacagcgcgcagccgctattccccccattcaggtgacaaaggtgcatgaacctccgcgcgaggatgctgcaccaactaaaccagccccacccgcgccacctcccccccagaacctccaaccagagagcgatgcaccacagcagcccggctcttctcctcgggggaagtcaagaagtccagcgcctccagccgacaaggaagcgtttgccgctgaggcgcagaaactgccaggggaccctccttgttggacctcaggtttgccctttcctgttcctccacgggaggtgatcaaagcgtccccgcacgcacccgacccctccgcgttttcctacgcacccccaggacatcctctgcccctgggccttcacgacacagccaggcccgtgctcccccgccccccaaccattagcaacccgcctcccctgatctcatctgctaaacatccttcagtccttgaacggcagattggggccatctcccaagggatgtctgtccagttgcatgtgccatacagtgagcacgccaaggctccggtgggccctgtgacaatgggcctgccactgcccatggatccaaaaaagttagcgccctttagtggagttaaacaggagcaactgtcaccccgcggccaggcaggaccaccggagtctttgggagtccccactgctcaggaggcaagcgtcctccggggaactgctcttgggagcgtaccgggtgggagcattacaaagggcatccctagcaccagggttccaagcgacagcgccattacctatcgggggagcatcacacatgggacacctgcggatgtgctgtacaaaggaaccattacacggattatcggcgaagacagtccttcaagattggaccgtgggcgagaagatagcctccctaaaggccatgtgatctatgaaggcaagaagggccatgtgctctcatacgaaggaggaatgtccgtgacgcagtgctccaaggaagatggcagaagctcgtctggccctccccatgaaaccgctgctcctaagaggacttatgacatgatggagggtcgggtgggaagagcgatcagttctgctagtattgaggggttaatgggtcgcgcaattccccctgaaagacattctcctcaccatctgaaggaacagcaccatatcagaggatcaattacacagggcatccccaggagctacgtggaagcacaggaggactatctgcggagggaagccaagctgctgaagagagaagggaccccaccccctccccctcctagtagggatctgactgaggcatataaaactcaggcactgggccccttgaagctgaagcccgcccacgagggactggtggccacagtgaaggaggcagggcgctccattcacgagatcccccgcgaggaattacgccacactcctgagctgcctctggcccccagacccttaaaggaggggtctataacacaggggacccctctgaaatacgatactggggcctctaccaccggatccaagaagcacgatgttcggtctctcattggtagtcctggcaggaccttccccccagttcaccctctggatgtcatggctgacgctcgcgctctcgagcgggcctgttatgaggagtcactcaaatcccggcccggcaccgctagctcatctggtggaagcattgcccgaggcgcacctgttattgtgccagagctcggaaaaccaagacagtcgcctctgacgtacgaagaccacggcgctccttttgccggtcatctgcccagaggtagccccgtgacgactcgggaacccacaccgcggcttcaagagggctccctcagctccagcaaggcaagccaggacagaaagctcacgtccactcctagggaaatcgcaaagtctccccacagcacagtccccgagcatcacccacaccctatctccccatacgaacacctcctgaggggagttagcggggtggatctgtatagaagtcacatacccctggctttcgatccaaccagcatacctcgcggaattcctctggatgcggctgcagcgtattacttacccaggcatttagcacctaatcccacctacccgcacctgtacccgccctacctcatccgggggtatccagacactgccgccctggagaaccgtcagactatcatcaatgactacatcacaagccagcagatgcaccataatgccgctacagcgatggcacaaagggccgacatgctccgtgggcttagcccccgcgagtccagtctagccctgaattacgcagctggtccacggggaatcatcgacctgtcacaggtccctcacctccctgtcttggttcccccgacccctgggacaccagcgacggccatggatcgtcttgcttatctgcctacagcaccgcagccctttagttcacggcactcttcctctcccctatctcccggggggcctacacatctgacaaagcccacaaccacaagtagttcggaacgcgagcgcgaccgggatcgggagcgcgatagagacagggaacgcgaaaagagcattctcacctccactacaaccgtggaacatgcccccatatggaggccagggactgaacagagttctgggagctccggaggcggcgggggctcatccagcaggcccgcctcccactcgcatgcccatcagcactcccctatttccccacgcacccaagatgctctccaacagcggccttccgtactccataacacagggatgaaaggcatcataaccgcggtggagccttcaacacccactgtcttacggagcacatcgacatcttcccctgtccgccccgctgcgaccttcccaccagcgacacattgtcctcttggggggacactggacggcgtgtaccctaccctcatggagcccgtgctcttgcctaaagaagcaccccgcgtcgctaggcccgagcggcctcgggcagatactggccatgcctttctagccaagccccctgccagatccgggctggaaccggcaagtagcccttcaaaaggatcagagcccagaccgctggtgccacctgtatcagggcacgcaacaatcgcacggaccccggccaaaaatcttgcaccgcatcatgctagtcctgaccctcctgcgcccccagccagcgcaagtgaccctcacagagagaaaacgcaatctaaacccttcagcattcaggagctagagcttaggtcactcgggtaccacggcagctcttattctcccgaaggcgtcgagcccgtgagccctgtgagctctcctagcctcacacacgacaaaggcttacccaaacacctcgaggaattagacaaaagtcacctggagggagagctgagacctaaacagccgggccccgtgaaactgggcggtgaggcagcccacctaccccacctacgccccttacctgagagtcagccgtcctctagtccactgttacaaactgctcccggggtcaagggtcatcagcgagtggtgactttggcccaacatatttccgaggttatcacccaagactacaccaggcatcacccccagcagttatctgcccctctacctgcaccactttacagttttccaggagcttcttgtcccgttcttgacctgcggagaccaccctctgacttgtacttaccgcctccagaccacggagcccctgcaagagggagcccacatagtgagggtgggaaaaggtcccctgagcctaataagacgtctgttctgggcggtggggaagatgggattgagcccgtctcgcctcctgaaggcatgacagagcccggccattctcgatcagctgtatatcccctactgtatcgggacggagagcagacagaaccatccaggatgggatctaaatcaccgggcaatacaagccagcctccagcctttttcagcaaactgactgagtccaactcagctatggtgaaatccaaaaagcaggaaattaacaagaagttaaacactcataaccggaacgagcccgaatataatatcagccagccaggcactgaaattttcaatatgccagccataactggcaccggcctaatgacctaccgaagtcaggccgtacaggagcatgccagcacaaacatggggcttgaagccattatacgaaaagccctgatgggcaagtacgatcaatgggaggagagtccaccactaagcgcaaacgccttcaacccccttaatgcatccgcgtcattacccgctgccatgcctatcactgctgccgacggccgttcagaccacaccttaacaagcccaggcgggggcggcaaagcaaaagtttccggccgcccctcctcacgtaaggctaaaagtccggcccccggcttggccagcggagatagaccgccgagtgtgtctagcgtgcattcagagggagactgtaataggcgaacccctcttaccaatagggtatgggaagatcggccgtcatctgccgggtctacaccctttccatacaatccattgatcatgaggttgcaggctggcgtgatggcatccccgcccccacctggccttcctgcggggtccggtcccctggccggtccccaccatgcttgggatgaagagcctaagccccttctgtgctcccagtatgagaccctttctgactcagagtag

SEQ ID NO: 126932 - DNA, 7515 bp, synthetic construct
  misc_feature 1..7515: note = Description of Artificial Sequence: Synthetic coding sequence
  source 1..7515: mol_type = other DNA
atgtccggcagcactcagcccgttgcacagacatggcgcgccaccgagcctagatatcctccacattcactatcataccccgtgcagattgctcggacccacactgacgtgggcctgttagaatatcaacatcacagccgggattacgccagtcatttaagccctggctcaatcatccaacctcagagaaggagacccagtcttctatccgagttccagccaggcaacgagcgttcacaggaactgcatttgcgccctgaatcccacagttacctcccggaactgggcaagtccgagatggagttcatagagagcaagcggccccggctggaactgttgccagacccccttttacggccttctcccctgttggccactggtcagcccgccggcagcgaggatctcacgaaggaccggtccctgaccggcaagctagaacctgttagtccacctagcccaccccatacagaccctgaactggagttggttccgccccgcttatcgaaggaggagctcatacagaacatggacagagtcgacagggaaatcacgatggtggagcagcagatcagcaagctgaaaaaaaagcagcagcaacttgaggaggaagctgcaaagcctcctgagccagagaaaccagtgtcaccccctccgattgagagtaaacatcggtctttggtgcaaataatttacgatgagaaccggaagaaggctgaagcagcccatcgtattttagagggactgggccctcaagttgagctgccgctgtataatcagccatccgatactcgtcagtatcacgagaacatcaagataaatcaagctatgcggaaaaagctcatactgtactttaagagaaggaaccacgcaagaaagcagtgggagcagaagttctgtcagcgatatgatcagctcatggaagcctgggaaaagaaggtcgagcgaatcgaaaacaatcctcgtagaagggccaaagagtccaaagtccgcgaatactatgaaaagcaattccccgaaattcgaaagcagcgcgagctccaggagaggatgcagcgcgtggggcagcgcggctcaggcctttctatgtctgctgcccgcagcgaacacgaagtgtccgaaataatcgacggtctttctgagcaggaaaacttggaaaagcagatgcgccagcttgctgttatcccaccaatgctgtatgatgcagaccagcagaggatcaagtttatcaacatgaacgggcttatggcagatccgatgaaagtttacaaagatcggcaggtgatgaatatgtggagcgagcaagagaaggagacattccgagaaaagttcatgcagcaccctaagaacttcggtctgatcgcctcttttttggagagaaagacagttgccgagtgtgtgctgtactactatttgaccaagaagaacgagaactacaagtcccttgtgaggcggagctatcgcagacgtgggaagtcccagcagcagcagcagcagcagcagcagcagcagcagcagcagcaacaacagccaatgcctaggtcctcccaggaggaaaaagatgagaaagaaaaagaaaaagaagcggaaaaagaggaggagaagcctgaggtcgagaatgataaggaagacctcttgaaggaaaagaccgatgataccagtggtgaggacaacgatgaaaaagaagctgttgcttccaaaggccgaaagactgctaattcacagggacgccgaaagggaagaatcactcgatcgatggctaacgaagctaactcagaggaagcaattacacctcagcagagcgcagagcttgcatcaatggaattgaatgagagtagcagatggacggaagaggaaatggagactgccaagaagggactcctggaacacgggaggaattggagcgcaatagctagaatggtaggcagcaagacggtttcacagtgtaagaacttctattttaattataagaagcgtcagaacttggacgagatcctccagcagcataaacttaagatggagaaagagaggaacgctcgtcgtaaaaagaaaaaagcccctgctgctgcttcagaggaggcagcattcccgccagtcgtcgaggacgaggagatggaggctagcggcgtatctggcaacgaagaggagatggtagaggaagcagaagccaccgtcaacaattcttcagataccgaaagtatcccttcaccacatactgaggctgcaaaggatactggccagaacggacccaagcctccagcaacactgggggctgacggacccccccctggcccaccgactccaccacctgaagacatccccgcccccacagaacccaccccggcctcagaagcgaccggggcaccaacacctcctccagctcctccgagcccttccgctccaccacctgtagtgcccaaagaggagaaggaggaggaaactgctgctgcccctccggtagaggagggcgaggaacaaaaaccacccgccgctgaggagctggctgtagataccggtaaagctgaggagccagtgaagtctgagtgtaccgaggaagcagaggagggtccagcaaaagggaaagacgccgaggcggcggaagccactgcagaaggagcattaaaggcagaaaagaaggaggggggaagcgggagagcaacaaccgccaaaagttctggcgctccccaagattccgactcatccgccacatgctcagctgatgaagtggacgaagctgaaggcggagacaagaataggctccttagtccaaggccaagcctcctaacccctactggggacccgcgagcaaatgcctctccgcaaaaacctctggacctgaaacagttaaagcaaagggctgctgcaattccacccattcaggtgaccaaggttcacgagcccccccgtgaggatgcagcaccaaccaagccagccccccctgctccaccacctccacaaaatctgcagcctgagtcagacgcccctcaacagcctgggtcatccccaagaggaaaatctaggagtcccgccccacctgccgataaggaggctgagaaaccggtattcttccctgcttttgccgccgaagcccagaagttacctggcgatcccccttgttggacgagcggtctgccgtttccagttcctcctcgggaggtcattaaagcttcaccccatgcaccagaccccagcgcgttttcctatgcacctcctggacaccccctgcccctgggactccatgatactgcacgacctgttcttcctaggcctcccaccatctctaacccacctcctctaatcagttctgctaagcaccctagtgtgctggaaagacagatcggcgccatctcccaaggcatgtctgtacaactccacgtcccttacagtgaacacgcaaaggccccagttgggccagtaaccatgggcctgccgctgccaatggatcccaaaaagttggcacccttttccggggtaaagcaagagcagctgagcccgaggggccaggctgggcctccggaatcgttgggcgtgccaaccgctcaggaggcctctgtcctcagaggaactgccctcgggtctgtccctggagggagtattaccaaagggataccatcgacacgcgtaccgagcgactctgcaatcacctaccgaggttccattacacacgggacacctgccgatgtcctgtataaaggcacaatcacgaggattattggcgaagactctccgagcagactcgaccggggcagggaagattctctgcctaagggccacgtgatctacgaaggcaaaaaaggccacgtcttaagttacgagggcggcatgtccgtgacccagtgttcgaaggaggatggacgaagttcttcaggccctcctcacgagacggctgctccgaagcgcacctacgatatgatggagggccgggtgggacgtgccatctcaagtgcgtctattgaaggcctgatgggccgggcgatcccccctgagcgacattcacctcaccatctaaaggaacagcatcacatccggggatccattacccaggggatcccgcgatcatacgtggaggcccaggaggattatttgcggcgggaggctaagctgcttaagagggagggcaccccacctcccccaccaccctctagagacttgactgaggcttacaagacacaggcactgggccctttgaagttgaagcccgcccacgagggactggttgctaccgtcaaggaggcaggccggagcatacatgagattcctcgagaagagctgagacacacacctgagcttccccttgccccgcggccattgaaggaaggatccataacgcaaggaactcctctgaaatatgataccggcgcaagcaccactgggtccaaaaagcacgacgtgaggagcctaatagggtcccccgggcggacttttcctcctgtgcaccctctcgatgtaatggccgacgctcgcgccctggagcgagcctgctatgaggagtccttgaagtctagaccaggcactgcatccagctctgggggctcgatcgccagaggcgccccagtgatcgttcctgagttaggcaagcccagacagagcccactaacttacgaagaccatggggcgccttttgcaggccacttacctcgaggatctcccgttaccacaagagagccaacgcctcgcctgcaagagggaagtctgtctagctccaaagctagccaggaccgcaagcttacatctaccccacgcgagatcgcaaaaagcccccattccaccgttccagagcaccacccgcatcctatatccccttatgagcacctcctgagaggtgtgtcaggagttgatctgtacagatcacacattccattagccttcgatccaacctctatccctagagggattccgcttgacgcagccgcagcatactatctgcctaggcacctggccccaaacccaacctaccctcatctgtacccaccgtatctgatccggggttatccagacacagcagcccttgagaaccgccaaaccatcattaacgattacattactagccagcagatgcaccacaatgccgcgactgctatggctcagcgggccgatatgttaagaggcctctcccccagggagtcctctctggcgttgaattacgcggcaggccctagaggcattattgatctgtcccaagtgcctcatctcccagtactggttcctcccacacctggtactccagcgacagcgatggaccgcctcgcttatctgcccaccgctccgcagcctttctcctccaggcactctagttcccccttgagccctggcgggccaacacatttgacaaagccaacgaccacctcttcgagcgagcgcgaaagagatcgtgacagagagcgagatcgagacagagaaagagagaaaagtatattgacctctacgactacggtcgagcatgctcctatctggcgccccggcaccgaacagtcatccggctcaagcggcggaggcggaggatcctcttctagacctgcctcccattcccatgctcatcagcatagtccgatctccccacgcacccaggatgctctgcaacaaaggccatccgtacttcataacactggtatgaagggtataatcaccgctgtggagccaagcacacccactgtcctaaggtccacctcgacatcatcccctgtgcgtcctgcagctacatttccgcctgcgacccactgtcctttagggggcaccctcgacggagtctacccaactctaatggagccagtattactgcccaaagaagcccctagggtggctcgccccgagaggcccagggccgacactggacacgcctttttggcgaagccaccggcccggtccggcctggaacctgcttccagcccaagtaagggatcagaacccaggcctctggttcccccagtgagcggccacgccacaatcgcccgcacaccagccaaaaacctcgcacctcatcacgcctccccagacccgcccgcaccccctgcatctgccagcgatccacacagagagaaaacccagagcaaaccgtttagtattcaggagctggagcttcgatcactgggctatcatgggagctcttactcaccggaaggagtggaacctgtctcccctgtctcttcacccagcctgactcacgataagggcctccctaaacatctggaggagttggataagtcacaccttgagggcgagctgaggcccaagcagcccggacctgtgaagctgggtggagaggcagcccatcttccacacctcagacccctgcctgagtctcaacctagcagtagccccctattacagaccgcccctggggtaaaggggcatcagcgcgtagtgacactggcgcagcatatatccgaggtaatcactcaggactataccagacaccatcctcagcagctgagtgcacccctgccggcacccctttactcattcccaggagcttcttgtccagtgctggacttgagaaggcccccttcggacctataccttcccccccccgatcatggagccccggcaagggggtcaccacacagcgagggcggcaaacgctctccagagccgaataagacgagtgtactgggaggcggcgaggacggcattgaaccggtatcaccacctgagggcatgaccgagcctggccattcaaggagtgccgtttaccctctcctttacagagatggcgagcagaccgagccctctagaatgggtagtaaaagtccaggcaataccagccagccccccgcattcttttccaaactaacggagtctaattctgctatggtgaaatctaaaaaacaggagatcaacaagaaactgaatactcacaacagaaatgagcccgagtataatatctcccagccaggcactgagatttttaatatgcccgccattactgggaccggcctcatgacttatcgcagccaagcagttcaagagcacgcatctacaaacatgggcctggaagctatcataaggaaggcccttatgggcaaatacgaccagtgggaggagagccctcccttgagcgctaatgccttcaacccacttaacgcaagcgcctctttgccagcagccatgcctatcaccgcagcagatggacggagcgatcataccctgacttctcccgggggtggggggaaggccaaggtgagtggccgaccatcctcaaggaaggcaaaatcccctgcccctgggcttgctagcggcgataggccgccaagtgtgtcttcagtgcactccgagggggattgcaacagacgcacaccactgactaatcgcgtctgggaagatcgtcccagttccgcgggttcaactccttttccttataacccacttatcatgagacttcaggcaggtgttatggcgagccctccaccccccggcctgcctgccggttccgggcctctggccggcccccatcacgcctgggacgaagagcctaagccactgctctgctctcaatacgagacactgtcagacagtgagtag

SEQ ID NO: 126933 - DNA, 7542 bp, synthetic construct
  misc_feature 1..7542: note = Description of Artificial Sequence: Synthetic coding sequence
  source 1..7542: mol_type = other DNA
atgagcggctctacccagcctgtggcccagacttggagggccactgagccccggtaccctccccacagcctcagttaccccgtccagatcgcacgtactcacactgacgtgggccttcttgagtaccagcaccactcaagagactacgccagtcatctgagcccggggagtattatacagccgcaacgcaggcgaccatctttgttaagtgaatttcagccaggaaatgagcgtagccaggagttacatctcagaccggaatcacattcgtatctccctgagctaggcaaatccgaaatggagttcatagaatctaagaggcccaggctggagctattgcctgacccacttttgaggccgagcccattactagccaccgggcagccagctgggagtgaggatcttacaaaagacaggtccctcaccggcaaattggagcccgtctcaccacccagcccaccccatactgacccagagctagagcttgtgccgcccagattgagcaaggaagagctcatccagaatatggatagggtggatagagagattacaatggtggaacaacagatctcaaaactgaaaaagaaacaacagcagcttgaggaagaggcagccaaacctcccgaaccggagaaacctgtgagccctcctcctatcgaaagcaaacaccgatctctggtacagattatctacgacgaaaatcgcaagaaggcagaggctgcacatcgaatattagaggggctggggccccaggtagagttgcctctgtacaatcagccctctgacaccagacagtaccatgagaacattaaaatcaatcaagccatgcgaaagaaactgattctctactttaaacgacgaaatcacgcccggaagcagtgggaacagaaattctgccagagatacgatcaactcatggaggcctgggagaagaaggtggagagaatcgaaaacaacccgaggcggcgggcaaaggaatctaaagttcgcgagtattacgagaagcagtttcccgagattaggaaacagcgcgagctccaggagagaatgcagagccgagtgggccagagaggcagcggcctcagtatgtctgctgcaaggtccgagcatgaggtaagcgagatcatcgatgggctgtctgagcaggagaatctggaaaagcagatgaggcagctggctgtaatccctccaatgctctacgatgctgaccaacaacgcatcaaattcattaacatgaatggcctgatggcagacccaatgaaggtgtacaaggacagacaggtgatgaatatgtggtcagaacaggaaaaagagactttcagggagaaattcatgcagcatccgaaaaattttgggttgatcgcaagctttctcgaacggaagacagtagccgaatgcgtgctctattattacctcaccaaaaaaaacgagaattacaaatctctggttcggagaagctataggcgtcgaggaaaatcacagcagcaacaacaacagcagcagcagcagcagcagcagcaacagcagcaacccatgccacgaagctcccaagaagagaaagatgagaaggaaaaggaaaaggaagccgagaaggaggaggaaaagcctgaagtcgaaaatgacaaagaggatttattgaaggaaaaaacagacgacacctctggcgaagacaacgatgagaaagaggccgtcgcttctaaaggccgcaagacggccaattcacagggacgtaggaagggacgcatcaccaggtcaatggccaatgaggctaactccgaggaagccatcacccctcagcagtccgcggaactggcatctatggaactcaacgaatcgtcaaggtggaccgaggaggagatggagaccgccaaaaaaggcctgttggaacacgggaggaactggagtgctattgcaaggatggtgggatcgaaaactgtgagtcaatgtaagaatttttacttcaactacaaaaagcggcagaatctagacgagatattgcagcagcacaagcttaaaatggagaaagagcgaaatgcgagaagaaagaagaaaaaagctccggctgcagctagtgaagaagctgcgttccctccggtggtcgaagacgaggaaatggaggccagcggagtgtcagggaacgaggaagaaatggtggaagaagccgaggctctgcacgccagtggtaacgaagtccctagaggggagtgctctggccctgccacggttaacaattcctccgatacagaatctattccctccccccataccgaagcagccaaagatacaggccagaatgggcccaaaccacccgcaaccttgggagccgacggccctcctcccgggccacccacccccccaaggaggacctctcggccaaccgagccgacccccgcttcagaggctaccggcgcccctactccacctccagcccctccctcccccagtgctcccccacccgtcgtccccaaagaagaaaaggaagaggaaaccgcggccgccccacccgtcgaggaaggagaggagcagaagccaccggcagcggaagagctggctgtcgacacgggtaaggcagaagagcctgtgaagtcagaatgtactgaagaagcagaagagggccctgccaaaggaaaagacgccgaagcagcagaggccaccgcagagggggccctcaaggccgagaaaaaggaaggaggttcgggcagagcaactacggctaaaagttcaggcgctcctcaggattcggattcctcggcaacatgtagcgctgacgaggttgacgaggccgaaggcggagacaaaaacagactcctctctccccgccccagtctgctcacaccaactggggaccctcgcgccaacgctagccctcagaagcccctggacctgaagcaactgaaacagagagctgctgcaattcctcctatccaggttactaaggtccacgaacccccacgagaagatgcagcccccaccaagccagccccgcccgcgccacctccccctcaaaatctgcagccagaatcggacgccccgcagcagcccggctccagtccccgagggaaaagccgctcaccagctccacctgccgacaaggaggcatttgcagccgaggcccaaaagctgccaggtgacccgccatgctggaccagcggcctaccgtttccagttccgcctcgagaagtcattaaagctagtcctcatgccccagatcccagcgctttctcctatgccccacccggacaccctctccccttggggctccatgataccgcccggcccgtgctacctcgcccccccaccattagtaatcccccacccctcatctcttccgcgaagcatccttctgtcttggagcgtcaaataggcgccatctcacaggggatgagcgtgcagctgcatgttccttactcggaacacgctaaggcgcctgtgggcccggtgacaatgggactgcccttgcctatggatcctaaaaaactagctcctttttccggcgtaaaacaggagcaactttctccgcgcggacaggccgggcctcccgaaagcttgggggtccccacagcccaggaggcgagcgtcctgcgcgggactgccctgggcagcgtgccgggcggctcaatcaccaaggggatcccttccactcgtgtgccctctgacagcgccatcacttaccgcggctcgattacacacgggactcccgccgacgtgctttataagggcaccattacaagaattatcggtgaagacagtccctctaggttggaccgcggacgggaggatagcctgccaaaaggccacgtcatctatgaaggcaaaaaaggccatgtgttgagctatgaaggaggcatgagcgtgactcaatgctccaaagaggatggccgctcatcctcaggcccaccccacgaaaccgctgctccaaagaggacatacgacatgatggaaggtcgggtgggccgcgccatcagctctgcctctatagagggattgatgggcagggccataccaccggagcgtcatagtcctcatcatctgaaagaacagcaccatatccgcggctcaattacccagggcataccgcggtcatatgtcgaggcacaagaagactacctgaggcgagaggccaagctgctgaaaagggagggtaccccgcccccgcccccacccagtcgggatctgactgaggcctataagacgcaggccctgggcccactgaaactaaaacctgcccacgagggcttggtggccactgtgaaagaggccggaagatctatccatgagattcctcgggaagagctccgtcacacccccgagttgccactcgcccccaggcctctgaaggaggggtccatcacccagggcacccctctcaagtacgacacaggagcgtccactaccgggtctaaaaagcacgacgtacgtagccttatcgggtcccctggacggacctttccaccggtgcatcctctggacgtcatggcagacgcgcgcgcattagagagagcctgctatgaggaaagcctgaagagtagaccaggaactgctagctcttccggcggctctattgcccgcggagcccccgtgatagtccccgagcttggcaaaccccgccaatccccactgacatatgaagatcacggggcgccctttgccgggcatctccccagaggctccccggtgaccactcgcgagccaactcccagactgcaagaagggtcactcagcagctccaaggcgtctcaagatcgcaaactcacctctactccccgcgaaatcgctaaatcaccgcactccaccgtcccggagcaccacccacatccgatctccccctacgaacacctactgcgtggggtttccggagtcgatctgtatcgctcgcatattccacttgccttcgacccaactagtatcccacggggcataccactggacgcggctgcagcatactaccttccccgacacttagctcccaaccccacttatccccacttgtaccctccatacctcatacgtggttatccggacaccgccgctctcgaaaacaggcagactataatcaacgactatattactagtcagcagatgcatcacaacgcagcaacagctatggcgcaacgtgctgatatgctgagaggactatccccacgcgagtctagtctagccctcaattacgcagccgggccaagggggataattgatttatcccaggtgccacatctgcctgtcctggtgccacctactcccggtacccctgctactgccatggatagacttgcttatctaccgactgccccccagcctttctctagcagacatagttcgagtcctctgagtcctggtggtcccacccacctgacaaaacccactaccacctcttccagtgagagggaacgcgaccgggatcgggaaagagacagggatcgggaacgggaaaagtccatattaactagcacaactacggtagagcacgcgcccatctggcgacccggaacagagcagtcaagtgggtcctccggcggaggcgggggttccagcagccgtccagcaagccactctcatgcacatcaacactcaccaatttccccaagaactcaggacgcgttgcagcagcgaccaagcgtattgcacaataccggcatgaaaggcattatcaccgctgtcgagccttccacccccactgttctacgctccacctcaacatcatcacctgttcgccccgccgctaccttccccccagctacccactgtcccctgggaggtaccttagatggcgtctatcctactctcatggaacccgtcctcctccctaaggaggctcctcgggtcgctaggcctgagagacctagagccgacacaggccatgcctttctcgccaagcctcccgcgagatcaggcctcgagccagcttcatcaccatcaaaggggagcgaacctagacctcttgtgccgcctgtctctggccatgccaccattgcaagaacccctgccaaaaatttggcgccacaccatgcctccccggacccaccggccccgccagcttccgctagcgacccacaccgggaaaagacccaaagtaagcccttcagcatccaggagctggaacttcgcagcctcggttaccacggcagctcttacagccctgagggtgtagaacccgtcagcccagtttccagtccttccctaacacacgacaaaggcctgccaaaacatctggaagaactcgacaagtcccatctggaaggggagttacggcctaaacagcctgggccggttaaactcggcggtgaggccgctcacttacctcaccttagaccactccctgaatcacagcctagtagtagccccctcctccagacagcccccggagtgaagggccaccagcgcgtggtgactctggctcaacacatttctgaagtgattactcaggattacacacggcatcatcctcagcagctgtccgctcccctccccgcccctctttatagctttcctggagcttcctgccctgtcctggatctccggcgacccccatctgatctgtatctgccccccccggaccacggtgctccagccaggggctcaccacattcagagggcggaaagagaagccccgagcccaacaaaacatcggttttggggggaggcgaggatggaatcgaacctgttagtccccctgaaggtatgaccgaaccaggccacagccgatctgccgtctatccgctcctatacagagacggagagcagactgaaccctcacgtatgggctccaaatcccccggtaacacctctcagccaccagctttcttctctaagctcacggaatccaatagcgctatggtcaaaagtaaaaaacaagagataaacaagaagctgaatacacataaccgcaatgaacccgagtacaatatctcccagccgggcactgaaatcttcaacatgccagctattaccggtacggggctgatgacatacaggagccaagcagtccaagagcacgcctcgacaaacatgggcctggaggccattatccgcaaggctctgatgggcaaatatgatcagtgggaggaaagcccccccttaagtgccaacgctttcaaccctcttaatgcttctgcatctcttccggccgccatgcctataacagctgccgacgggcggagtgaccacaccctcacatctcctggaggcggaggaaaagcaaaagtgtctgggagaccctcgagcagaaaagccaaaagtcccgcacccggccttgcctccggggatcggccaccttctgtgtcatctgtgcactcggagggcgattgtaaccgtagaacccctctgaccaatagggtctgggaagacaggccatccagcgcggggtcaacacctttcccttataatccactgatcatgcgtctccaagcgggggttatggcgagtcccccaccacctggccttcctgcaggctctggaccactggcaggaccccatcacgcctgggacgaggagcctaagccgctgctctgttctcagtatgaaaccctctcagactcggagtag

SEQ ID NO: 126934 - DNA, 1821 bp, synthetic construct
  misc_feature 1..1821: note = Description of Artificial Sequence: Synthetic coding sequence
  source 1..1821: mol_type = other DNA
cttcagagcggggctacacactgccctctgggagggacccttgacggggtgtatcctactctcatggagccagtgctccttccaaaagaggccccacgtgttgcgcgaccggagcggcctcgggccgacacaggtcatgcttttctggcaaaaccccctgctaggagcggcctcgagccagcctcttccccatccaagggctctgagcccagacctttggtgccgccagtgtctggccatgctaccattgctcgcactcccgcaaaaaatttagcccctcaccatgcttcccctgacccgcccgcaccccccgcttcggcatctgatccccatagggagaagacgcaatcaaagcccttttcaatacaagagctggaacttaggtccctgggttatcatggaagttcatattccccggaaggagtagagccagtgtccccggtgagctcccctagtttaacgcacgacaagggactacctaaacatctagaggaattggataaaagccacttggaaggcgagctgcgtccgaagcagcccgggcctgtgaagcttggcggggaggctgcacatctgccacatctgaggccattgcctgagtctcagcccagcagctctccgctgcttcaaacagcacctggggtaaaaggtcatcagcgcgtggtcacattggctcaacatatctccgaggtgataacccaggactatactcgccatcacccacagcaactgagtgcacccctccctgcgccgctgtacagctttcctggagcaagctgccctgtgctcgacctccggcgccctcctagcgacctgtatttaccccctcctgatcatggggcacccgctcgggggtccccacattcggaagggggcaagcgatctcctgaacccaacaaaacttctgttcttggaggcggcgaggacggcattgaacccgtatccccgcccgagggtatgactgaacccgggcatagccggtctgctgtataccccctgctgtaccgcgatggcgagcagacagagccctccagaatgggcagcaagagcccaggtaacacttcccaacccccggctttcttctcgaaactaaccgagtccaacagcgctatggtgaaatctaaaaagcaggagattaacaagaagttgaatacacacaatcgaaatgagcctgagtacaatatttctcagcccggtacagaaatttttaatatgcctgcaatcaccgggaccggactgatgacgtatcgcagtcaagctgttcaggagcatgcctccactaacatgggtctggaagccatcataagaaaggctttgatgggcaaatacgaccagtgggaagagtctcctccgctctctgctaacgcctttaaccctctgaacgcctccgcttcattgccggccgccatgcccattactgctgccgacggccgcagcgatcacactctcacctcacccggcggaggcggtaaagccaaagttagtggccggccctctagccggaaggccaaaagccccgccccagggttggcgagcggtgaccgccccccttctgtcagttctgtgcactccgaaggcgattgtaaccggcgaacccctctgacaaatcgggtgtgggaagatcggccgtcaagcgccggctccacgccatttccttacaatccactaatcatgagactgcaggccggagtgatggcctcccccccacctccgggcttacccgcaggcagcggcccccttgcaggtccccaccacgcctgggacgaagagcccaaaccgctgctgtgttcacagtatgaaacactcagcgattctgaatag

SEQ ID NO: 126935 - DNA, 726 bp, synthetic construct
  misc_feature 1..726: note = Description of Artificial Sequence: Synthetic coding sequence
  source 1..726: mol_type = other DNA
atgttctactcaggattactgaccgagggaggccggaaagagacagacatgcgtgaggccgcctcgctgagacagcagcgcaggatgaagcaggcggtccaattcatacataaggacagcgcagacctcctgcctctggatggtcttaagaagctggggagttccaaagacatgcagccccataacattctccaacgaagattaatggagactaatctctctaaactccggagcggtcctcgagtaccatgggcttcaaagaccaacaaactgaaccaggctaaatcagaaggcctcaaaaagtcagaagaagacgacatgattctagtgtcatgccagtgcgccggcaaagacgtaaaggcccttgtcgacaccggctgtctgtataacctgatcagcctcgcttgtgttgacaggttgggcctgaaggagcacgttaagagtcataagcatgagggggagaagttgtcgctccccagacacctgaaggtggttggacagatagaacatctggtgatcacactgggatccctaaggctggattgtccggcagctgtagtcgatgacaacgaaaagaatctaagtctgggcctccagacgctgaggtcccttaagtgcataatcaacttggataaacatagactcatcatgggtaaaaccgacaaggaggaaatcccatttgtggagaccgtgagccttaatgaagacaacacttcagaggcctag

SEQ ID NO: 126936 - DNA, 774 bp, synthetic construct
  misc_feature 1..774: note = Description of Artificial Sequence: Synthetic coding sequence
  source 1..774: mol_type = other DNA
atgtctacctcacagcctggagcttgcccctgccaaggtgccgcctctcgcccggccatcttgtatgccctgctatcttcaagtcttaaagccgttccacgcccgcggtctagatgtctgtgtcgacagcatagacctgtccagctgtgtgccccacaccggacctgtcgagaagccctagatgttttggccaaaactgtcgcattcctccgaaacctgccttccttctggcagctccccccccaggaccagcggcggcttctgcagggatgctggggccctctgtttttgctgggtctggcccaggacgcggtgacattcgaagtggcagaagcccctgtaccttcgatcctgaaaaaaatcttactcgaagagccgtcttcgtctggggggtcaggtcagctgccggaccggccccagccatctctggctgctgtgcagtggctgcagtgttgtctagaatccttttggtctctcgagttgagtcccaaagagtacgcctgccttaaagggaccattctctttaatccagatgttcccggattacaggcggcctcacacattggccacctgcagcaagaagctcactgggtgctgtgcgaagtgcttgagccctggtgcccggcagcgcagggcaggctgactagggtgctcttaaccgcaagcacgctgaaatcaatcccaaccagtttgctgggcgatctgtttttcaggccaatcataggagatgtcgacatagctggcctcctgggggacatgctgttgcttagatag

SEQ ID NO: 126937 - DNA, 1845 bp, synthetic construct
  misc_feature 1..1845: note = Description of Artificial Sequence: Synthetic coding sequence
  source 1..1845: mol_type = other DNA
atgaccactctagactcaaataataataccggaggggtgatcacatacatcggtagctccgggtcatctccgtcacgtacatcacccgagagcctgtattcagataactccaatggttcctttcagtccctgacccaggggtgtcccacttattttcctccttcacccaccggcagcctcacgcaggacccggccaggtcgttcggctcaattccgcctagcttgtcagatgatgggagccccagcagcagttccagtagctccagctcatcttctagcttttataatggttcacctccaggctcccttcaggtggctatggaagactcttcaagagtgtctccgtccaagtccacatctaatatcactaaattgaacgggatggttctgctctgtaaggtatgcggcgacgttgcgtcaggatttcactacggcgtgcacgcttgcgagggatgtaaagggttcttcaggcgatctatccagcagaacatccagtacaagcgctgtcttaaaaacgagaactgttccatagtgcggatcaacagaaatagatgccagcagtgcaggttcaagaaatgcctgagtgtagggatgtcacgggatgccgtgcgtttcggccggatacctaagcgggagaagcagcggatgctggccgaaatgcaatcagcaatgaatctggcaaataaccagctgtcatctcagtgcccactggaaacaagtcctacacagcaccccactccaggacctatgggtccatcgcctcccccagcccccgtaccttcccctctggtcggattttctcaatttccacagcagttaactccgcctaggtcacctagcccggaaccaactgtggaggatgtgattagtcaagtagctagggctcaccgcgagatctttacctacgctcacgataaattgggctcatcacctggtaatttcaacgcaaaccatgcctcaggttccccccctgccaccacaccccacaggtgggagaatcaaggttgccctcctgcgcctaatgataacaatacactggccgcccagagacacaatgaagcactaaacggtctgagacaagccccttcttcatatccccccacgtggccacctggccctgcacatcatagctgccaccagtcaaactccaacggccatagattatgccctacccacgtttacgccgcccccgagggcaaagcccctgccaattctcccagacaaggcaattccaagaacgtgctgctggcttgtccaatgaatatgtacccgcacggtcggagtggtagaaccgttcaagaaatatgggaggacttctctatgagcttcacgcctgccgttagagaagtcgtggaatttgcgaaacatattcccggtttcagagatctcagccagcacgatcaagtgaccctccttaaggccggcacgttcgaggtgctcatggtcagattcgcctctctgttcaatgtaaaggaccagaccgtgatgttcctgagcaggacaacttatagtctgcaggaactgggagccatgggaatgggcgatctgctttctgctatgtttgacttctctgagaagctgaattccctggccctcaccgaagaggagctaggtctgtttacagcagtagtcctagtgagcgcggatagatctggaatggagaactccgcatcagtggaacagctgcaagaaacccttctgcgcgcactgagggccctggttctcaagaatcgccccttggagacaagtagattcacaaaattattgctgaagcttcctgatctgcggacattgaacaacatgcatagcgagaaactcctctccttccgcgttgacgcccagtag

SEQ ID NO: 126938 - DNA, 1383 bp, synthetic construct
  misc_feature 1..1383: note = Description of Artificial Sequence: Synthetic coding sequence
  source 1..1383: mol_type = other DNA
atgagctcccccactacttccagtctcgataccccactgccaggaaatgggcctccacagcctggagcaccctctagtagccccaccgtcaaggaagaaggcccagagccctggccgggcggccctgatccagacgtccctggtacagacgaagctagcagtgcgtgctctacagattgggtgatccccgatcccgaagaagaacccgagagaaaaaggaagaaaggtcctgccccaaagatgctcggtcacgagctttgccgggtctgcggtgataaagcatctggcttccactataacgtgttgtcctgcgagggctgcaagggcttctttcggaggagcgtagtgaggggcggcgcacgtcgctatgcttgtaggggtggtggcacctgccagatggatgcatttatgagaaggaaatgccagcagtgcagactccggaagtgcaaggaggcaggcatgcgtgaacagtgtgtgctgtctgaagagcagatacggaagaagaagatcagaaagcagcaacaggaatcacagagtcagtcccagagccccgtggggccccagggtagtagttccagcgccagtggcccaggtgcgtcccccggaggcagcgaagccgggagccaaggatctggagagggggagggagtgcagctgaccgcagcacaggagctgatgatccagcaactggtcgcagcccaactgcagtgtaataaaaggagctttagcgatcaacccaaggtgactccttggccactcggagccgacccacagtcaagagatgccaggcaacagcggttcgcgcattttactgaacttgctatcatttctgtccaggaaatcgtcgacttcgctaagcaagtgccgggatttctccagctaggcagagaagaccagattgccctgctgaaggcttccaccatcgaaataatgcttttggaaacggcaagacggtacaaccacgagacagaatgcataacctttctcaaggattttacatactctaaggatgactttcaccgggctgggctgcaggtagagttcatcaaccctattttcgagtttagcagggctatgagacgcttgggtctggacgacgccgagtacgctctgctgattgccattaatatcttctcggccgataggcccaatgtgcaagagcctggaagggttgaagccctccaacagccttacgtggaggctctcctatcatatacccggatcaagagaccacaggatcagctgagattccctaggatgttgatgaaactggttagcttgaggactttgagcagtgtgcatagtgagcaggtcttcgcccttcggttacaggacaagaagctgcccccactgctcagcgaaatttgggacgtgcacgagtag

SEQ ID NO: 126939 - DNA, 1377 bp, synthetic construct
  misc_feature 1..1377: note = Description of Artificial Sequence: Synthetic coding sequence
  source 1..1377: mol_type = other DNA
atgagctcgccgacaacctctagtctggacacgccgcttcctggaaatggaccaccccagccgggcgccccctctagtagtcctaccgttaaagaagaagggccagagccctggcctggcgggcccgatccagacgtcccgggtaccgacgaggcgtccagcgcctgtagcactgactgggtcatcccggaccccgaagaggaacctgagcggaagcgaaagaagggacctgctccaaagatgctgggacatgagctttgccgagtctgtggggacaaggcttccggattccattacaacgtgctatcttgcgaaggttgcaaagggttcttccgcaggagcgtggtgagagggggcgctcgacgctatgcatgccggggcggaggcacatgccagatggatgccttcatgagaagaaaatgccaacaatgccgtctgcggaaatgcaaggaggccggaatgcgggaacagtgtgtcctctccgaggaacagatccggaagaaaaagatacggaagcaacagcaagagtctcagagtcagagccagtcccccgtcggacctcaggggagttctagtagcgccagtggccccggagcctcacccggcggttctgaggcaggcagccagggatccggggaaggagaaggagtacagctgacagccgcccaggagctcatgatacagcagctggttgccgcccaactccagtgtaacaagaggagcttttcagatcagccaaaagtgaccccttggccactgggagctgaccctcagagccgggatgcccgtcagcagagattcgcccatttcaccgaactcgctatcatttccgtgcaagaaatagtggacttcgccaagcaagtccccggctttctgcagttgggcagagaggaccagattgccctcctgaaggcgagcaccatcgaaatcatgcttctggagaccgcccgtcggtataatcatgagacggagtgcataacctttttgaaggattttacatactcgaaagacgattttcatagagctggcctccaggtcgagtttatcaaccctatttttgaattttctagagctatgagacgcctcggcctcgacgatgccgagtatgcactcttaatcgccattaacattttcagcgcagacagacctaacggcgctggcccccgcgggggtgtggcggctgcactgcgaggcggcgctgctgtgctgcacgcccaccaagaagctgcggatcagcttaggttcccgcgtatgttgatgaaattggtcagccttcgaaccttaagctctgtacactccgaacaggtatttgcgctgcgattacaggacaagaagttaccaccactgttgagcgaaatatgggacgtccatgagtag

SEQ ID NO: 126940 - DNA, 1092 bp, synthetic construct
  misc_feature 1..1092: note = Description of Artificial Sequence: Synthetic coding sequence
  source 1..1092: mol_type = other DNA
atgtccagtcctaccacctcctccttggacacaccactacctgggaacggtccaccccagccaggcgctccgagtagtagccctaccgtgaaggaggaagggcctgagccatggccaggcgggcccgatcctgacgtacctggtaccgatgaagctagcagtgcatgttcaaccgattggggtgttctatccgaagagcaaatccgaaaaaaaaagattaggaaacaacagcaggagagccagtctcagtcacaaagtcccgtaggcccgcaagggtcctcttcttctgcttccgggcctggggcaagcccgggcggctcggaagccggatcacagggctccggcgaaggagagggagtccaattaacagccgcccaagaactgatgatccagcaattggtggctgcacagctgcagtgcaacaagagaagcttctccgaccagccaaaggtgacaccctggcccctaggtgctgacccgcaaagtcgggacgcacgccagcaacggtttgcacactttactgaattagccataatctctgtgcaggaaatcgtggattttgcaaagcaggtgccgggatttttgcagctcggtcgggaggaccagattgcccttttaaaagcatcgacgatcgaaatcatgctcctggaaacggcaagacgatacaatcatgagacagagtgcattacctttctgaaggacttcacctacagtaaagacgattttcaccgggctggtctgcaagtggaatttataaacccaattttcgaattttctcgggccatgaggaggctcggcctggatgacgccgaatatgctctcctcatagccatcaacatttttagcgcagaccggccgaatgtccaggagcccggtagagttgaggcgctgcagcagccctacgtggaggccctcctgtcatacacccggatcaaacgaccacaggaccagctcaggtttcccagaatgttaatgaagctggtgtccctccggacactttcatctgtgcactctgagcaagtctttgcgctcaggttgcaggacaagaaactcccgcccctgctgagtgagatatgggatgtacacgagtag

SEQ ID NO: 126941 - DNA, 576 bp, synthetic construct
  misc_feature 1..576: note = Description of Artificial Sequence: Synthetic coding sequence
  source 1..576: mol_type = other DNA
atgatacaacagctcgtggcagcccagctgcagtgcaacaagcgaagcttttcagatcaacctaaagtcaccttgggcagggaagatcagatcgcactgcttaaggccagcaccatcgagatcatgctgctggaaaccgccagaagatacaaccacgagactgaatgtattaccttccttaaggattttacctatagcaaagacgatttccacagagccggccttcaggtcgagtttattaaccccatctttgaatttagtagggccatgcgtagactgggtctcgacgacgctgagtatgcgttgctcatcgccatcaacatcttctcggccgatcggcctaacgtccaggagccagggcgggtggaagctctccagcagccctacgtggaggcactgctcagctacaccaggatcaagcgcccccaggatcagttgaggttcccccgaatgctgatgaagcttgtgtctttaagaactctgtcaagtgttcactccgagcaagtgtttgcactgcgcctgcaagacaaaaagctgcccccacttctgagcgaaatctgggacgtgcacgagtag

SEQ ID NO: 126942 - DNA, 1422 bp, synthetic construct
  misc_feature 1..1422: note = Description of Artificial Sequence: Synthetic coding sequence
  source 1..1422: mol_type = other DNA
atgaccgtgacacggacgcaccactttaaggagggcagccttagagcaccagccatccccctccactcagccgctgcggaactcgcttcgaaccaccctagagggcctgaagcgaatttggaggtcaggccaaaggaaagctggaaccacgcagacttcgtgcactgcgaggataccgaatctgtgcccggtaaacctagcgtgaacgccgatgaggaagttggagggccgcaaatatgtagggtgtgtggcgataaagctacagggtatcatttcaatgtaatgacctgcgaaggatgtaagggctttttccggagagctatgaagcggaacgctcgcttgagatgccccttcagaaaaggcgcttgcgagattactcgcaagacaaggcgtcagtgtcaggcctgtcggctcagaaagtgcctggagagtggaatgaaaaaagagatgataatgtccgatgaggccgtggaagaacgcagggcacttattaaacgcaaaaagtcagaaagaaccggaacgcaacccctgggtgtgcagggtctgactgaggaacagaggatgatgatccgagagttaatggacgcccagatgaagacctttgatactacctttagtcactttaaaaattttcggctgcccggagttctgtcatccggctgcgaactccccgaatcacttcaggccccatctcgcgaagaagcagctaaatggagtcaggtgcggaaagacttgtgttctcttaaagtgtccctgcagctgcgaggagaggatggaagcgtttggaactacaaaccacccgccgattccggcgggaaggagattttttctctcctgccacacatggccgacatgagtacttatatgttcaagggcataatcagtttcgccaaggtgatcagctactttcgcgatctccctattgaagaccaaatatccctactcaagggggccgcctttgaactgtgccagctgaggttcaatactgttttcaatgcagaaaccgggacatgggagtgcggccggctgtcttactgtctcgaagatacagctggcggattccagcaactcctcctggagccaatgctgaaattccattacatgctgaagaaactgcagcttcacgaggaggagtatgtcctcatgcaagccataagtctatttagccctgatagaccaggcgtccttcagcaccgagttgttgatcagttgcaggagcaatttgccattactctgaagagctatattgaatgtaaccggccgcagcccgcccacaggtttttgttcttaaaaataatggcaatgctcaccgagcttagatcaataaatgctcagcatacccagagactactcaggatacaggacatccacccctttgctaccccgctgatgcaagaactgtttgggattaccgggtcttag

SEQ ID NO: 126943 - DNA, 1305 bp, synthetic construct
  misc_feature 1..1305: note = Description of Artificial Sequence: Synthetic coding sequence
  source 1..1305: mol_type = other DNA
ctggaggtgcgtcccaaagaatcctggaaccatgctgacttcgttcattgcgaggacacagagtctgttcctggcaaaccttcagtgaacgctgacgaagaggtgggtggccctcagatctgcagagtgtgcggcgacaaggctacaggatatcatttcaacgttatgacctgcgaagggtgcaagggtttttttcggcgagccatgaagcgcaacgcaagactccggtgtcccttccgcaaaggtgcctgtgaaatcacccgaaagacccggcgccagtgccaggcttgccggcttcggaagtgtctcgagtccgggatgaagaaagagatgattatgtcggacgaggctgtcgaggaacggagggcacttattaaaaggaagaaatctgagcggacaggaacccaaccactcggcgtgcagggcctaaccgaggaacagaggatgatgatcagagagctgatggacgcccagatgaagactttcgatacaaccttctcacattttaaaaacttcaggcttccgggtgtactgtcaagcggctgcgagctgcctgaatccttgcaggccccctctcgggaggaagctgcaaaatggagccaggtgcgtaaagacctatgctcattgaaggtgtcgctgcaactacggggtgaggacggatctgtttggaactacaaaccgcccgcggactcgggcggcaaggagatttttagtctgctacctcacatggccgacatgagcacttacatgttcaaaggaattattagctttgcaaaagttatcagttacttccgcgatttgcccattgaggatcagatctcactgttaaaaggggccgcttttgagctatgtcagcttcgtttcaatacagtcttcaatgctgagaccggcacatgggaatgtggtcgcctgagctattgcctagaagacacggccgggggttttcaacagctgttgctcgagccaatgctcaaatttcactacatgctgaagaaattacagctgcacgaagaagagtacgtcttgatgcaggccatatcactgttctcccctgaccggccaggggtgctccagcatcgagttgtggaccagctgcaggagcagttcgctattacattgaagtcttatatcgagtgtaaccggccgcaaccagcccaccggttcctgttcctgaagattatggccatgctgacagagctccggagcatcaatgcgcaacacacccagagactgctgaggatccaagatatccaccccttcgccactcccctgatgcaggaactgttcgggattaccggctcctag

SEQ ID NO: 126944 - DNA, 1194 bp, synthetic construct
  misc_feature 1..1194: note = Description of Artificial Sequence: Synthetic coding sequence
  source 1..1194: mol_type = other DNA
ttggaggtgcgtcccaaagaaagctggaaccacgccgacttcgtacactgcgaagacacggaaagcgtgcctggaaaaccttcagtgaacgcggacgaggaagtgggtggcccacagatctgccgggtgtgcggtgacaaggccactgggtaccacttcaatgttatgacttgcgagggatgcaaaggatttttccggagggctatgaaaaggaacgctcggttgcggtgtccattcaggaagggagcatgcgaaatcacacggaaaactagaagacagtgtcaggcctgcaggctgcgtaagtgtttggagagtgggatgaagaaagaaatgataatgagtgacgaagccgtcgaggagcggcgcgccctcattaaacgaaagaagtcagagcggaccggcacccagccactaggagtccagggcctcactgaggagcagagaatgatgatccgcgagttgatggacgcccagatgaagacttttgacactacatttagtcactttaaaaatttcagggtgtctctacagctccgaggagaagacggttcagtttggaactataaaccacctgcagacagcggaggaaaggaaatcttctcccttctaccccacatggctgacatgtcaacatatatgttcaaggggataatctcattcgctaaggtaatttcatactttagagatctccctattgaggatcaaataagtctcctgaagggggctgcatttgagctgtgccaattgagattcaataccgtgtttaacgctgagactggaacatgggagtgcggtcgtctgagttattgtctggaggatacagcaggagggtttcagcaactgctgctcgaaccaatgctgaagtttcattatatgctcaagaagttgcaattgcacgaggaagaatacgtgctgatgcaggctatttcactctttagccccgatagacccggggtactacagcatcgggtggtggaccagctgcaagagcagttcgcgatcacacttaagtcctatattgagtgcaatcgaccccaacccgcccatcgatttctttttctgaagattatggccatgctcacagaactccgtagtattaacgcccaacatacgcagcgcctgttgcgcattcaagacatccatccttttgctacccctctgatgcaggagctgttcggaatcactggcagctag

SEQ ID NO: 126945 - DNA, 1848 bp, synthetic construct
  misc_feature 1..1848: note = Description of Artificial Sequence: Synthetic coding sequence
  source 1..1848: mol_type = other DNA
atgacctctccgtcaccaaggatccagatcatcagtactgacagcgctgtcgcctcaccccaacgcatccaagggtctgaacccgccagtgggcccttaagcgtgttcacgagtttaaacaaggagaaaatcgtcactgaccagcaaacgggtcagaaaatccaaattgtaacggcggtggatgcaagcgggagtcccaaacaacagttcattcttactagtccagatggagctggcacaggaaaagtaatcctggcaagccctgaaacgagttcggctaagcagctgatttttaccactagtgataacttagttcctggacgaattcagattgttacagacagtgcctctgtggagcgcctgctcggtaaaacggacgttcagcggccccaggtagttgagtactgtgtggtttgtggcgacaaggcgtctggtaggcattacggggcggtgtcttgtgaaggttgcaaggggtttttcaaacgaagcgttaggaagaacctgacgtattcctgccgcagcaatcaggattgcatcattaacaagcatcacaggaaccgatgtcagttttgccggcttaagaaatgcttggaaatggggatgaagatggagtccgtgcagagcgaacggaagccattcgacgtccagagggagaaaccaagtaactgtgcagcttccaccgaaaagatatatattcgaaaggacttgaggagccctctgatcgctacgcctaccttcgtggcggataaagatggcgctcgacaaacgggcctcctggatccagggatgctggttaacatacagcaaccgcttatccgcgaggacggaaccgtgctgttagcgaccgattctaaggctgaaacaagtcaaggggctttaggaacactggcaaacgtggtgacttccctggctaacttgtccgaatctctgaacaacggcgacacctctgagatccagccggaggaccagtcagcctctgagatcactcgggccttcgacactttggcaaaggctctgaatacaactgactcatcatccagtccctcactggccgacggaattgacacgtcagggggcggcagtattcatgttatcagccgggaccagagcacacccataatcgaggtcgaagggcctctgttgtccgacacgcacgtgacttttaagctgacgatgccatcacccatgcccgagtatttaaacgttcattatatttgcgagtctgcgtcgagactactctttctgtccatgcattgggccagatccatccccgctttccaggctctgggtcaggactgcaacacttcccttgtgcgagcctgctggaacgagcttttcaccttaggtcttgcacagtgcgcacaagttatgtccctgtcgacaatccttgccgccatcgtgaaccaccttcagaacagcatccaagaggataaattgtctggtgaccgtattaagcaggtgatggaacacatctggaagctgcaggagttctgcaattctatggctaagctcgatattgatggctatgagtatgcctacctcaaggccattgtgctcttcagtccggaccatcccggcctgactagcaccagccagatcgagaaattccaggaaaaagctcagatggagttacaagattacgttcagaagacgtactcagaggacacatacagattagcgcgcatccttgtgaggctccctgccttgcgattaatgtcctcaaatattaccgaggagctgttcttcacgggattgattggaaacgtgtctattgacagtattatcccctatatactcaagatggaaacggctgaatataacggtcagattaccggggcttcactctag

SEQ ID NO: 126946 - DNA, 1791 bp, synthetic construct
  misc_feature 1..1791: note = Description of Artificial Sequence: Synthetic coding sequence
  source 1..1791: mol_type = other DNA
atgacgagcccttcccccaggatacagatcatatctaccgatagtgctgtagcttcgccccaacggatccagattgtcacggatcagcagactggccagaaaattcagattgtgactgcagtggacgctagcgggagccctaaacaacaatttatcctcaccagcccagatggcgctggtaccggcaaggtgatcctggcaagccccgagacctcgtccgctaagcaactgatattcactacttcagacaatctggtgcccggccggatccaaatcgtgaccgattctgcctcagtagaacggctgctgggaaaaactgacgtgcagcggccccaggttgttgaatactgtgttgtgtgcggggacaaggcttccggcaggcattatggagccgtgagttgcgagggctgtaagggctttttcaagcgctccgtgcggaagaacctaacgtactcctgtcgatctaaccaggactgcataattaataagcatcacaggaaccggtgtcagttctgcaggcttaaaaagtgcctggagatgggaatgaagatggaatctgtgcagtccgagcgcaagcccttcgacgtgcagcgcgaaaagcccagtaactgtgctgcttctaccgaaaagatatatatcaggaaggatctcaggagtcccctgatcgccactcccaccttcgtagctgacaaagatggagccaggcaaaccgggcttcttgatccaggcatgctggtgaatattcaacagcctctgattagagaggatggaaccgtcttactggcaaccgactccaaggcagagacgagtcaaggagccttgggaacactcgctaatgtggttacctcgctggctaatctttcagagagtctaaacaacggggatactagtgagatccagcccgaggaccaaagtgcctcagagattacccgtgcctttgacactttggccaaagccctaaacactacggacagcagttcttccccctctttggccgatgggatagatacttcaggaggtggcagcattcatgttatttcccgcgatcagtcaacaccgatcatcgaggtggagggtcccctgctgtccgacacacatgttacctttaaattgacgatgcctagccccatgcctgagtatttaaacgtgcactacatctgcgagtctgctagtcggctgctgttcctcagcatgcattgggctcggtctattcccgctttccaggcccttggccaggactgcaacacaagtctggtccgcgcttgctggaacgagctattcacattaggcttggctcagtgcgctcaggttatgagtctgagcacaatcttagccgctatcgtgaaccacttacaaaactcaattcaggaggacaagctgagtggggatcggattaagcaggtgatggaacatatctggaaattacaggaattctgcaactccatggctaagctggatatcgacggatacgagtatgcttacctaaaggctatcgtgctcttttcacccgatcacccagggctgacgtcaaccagccagatcgagaaattccaggagaaggcgcagatggaacttcaagactacgtacagaagacttattctgaggacacctacagattggctcgcatactggttcgtttgcctgccctacggttgatgagcagcaacatcacagaagaattattctttacggggctgattgggaacgtgagcatcgattccatcataccatatattctaaagatggaaacagctgagtataacgggcagatcacaggcgcctcgctctag

SEQ ID NO: 126947 - DNA, 1791 bp, synthetic construct
  misc_feature 1..1791: note = Description of Artificial Sequence: Synthetic coding sequence
  source 1..1791: mol_type = other DNA
atgacgagtccctctcctcgaattcagattatctctaccgacagcgccgtcgcctctcctcagaggatccagattgtgacagatcagcagaccggtcagaaaattcagattgtgacagccgttgatgcgtcaggctcgcctaagcaacagttcattctgacaagcccagatggggctgggacgggaaaagtcatcctggctagcccagagacttcctcagcaaagcagcttatttttaccacttctgataacctggtgcccgggcgaatacaaattgtgaccgatagcgcttccgtagagcgcttgttagggaaaaccgacgtacagagacctcaagtcgttgagtactgtgtggtctgcggggacaaggccagtggccgccactacggagccgtgagctgtgaggggtgtaaggggttctttaagcgttcagtgcgcaagaatctgacatactcctgccggtcgaatcaagattgtattattaataagcatcaccggaaccgttgccagttctgccgacttaaaaagtgcttggaaatgggcatgaaaatggaatctgtgcagtccgaaagaaaaccattcgacgtgcaacgcgaaaaaccgagtaattgcgcggcaagcacagagaagatatatatacggaaagacctgcgtagcccactgatcgccactcctacattcgtcgctgataaagacggtgccagacagaccggcttgctcgatccggggatgcttgtcaatatccagcagcccctgatccgcgaagatggaactgtgctgctggctaccgacagcaaggccgagacgagccaaggggcccttggcaccttagccaatgtagtcaccagcctggctaacctgtctgaaagccttaataacggggatacctccgagattcagcctgaggatcaatctgcatccgagatcactagagccttcgatactctcgcgaaagcgctcaacaccacagattcaagctcatctccttccctcgctgacggcattgacacctctggtggcggtagtattcatgtgataagtcgggaccagagcaccccaatcattgaggtagagggacccctactgtccgatacacatgttacctttaaactgacaatgcctagccccatgcccgagtatctgaacgtgcattatatctgcgaatctgcctctagactgctgttcctctctatgcattgggctcgatctataccagcatttcaggctctcggccaggattgcaatacttccctagtgcgggcctgctggaatgaactcttcacccttggactggctcagtgcgctcaggtgatgtccctctccacaatcttggccgccattgtgaaccatctccaaaacagtatacaggaggataaactgtctggagatcgcataaagcaggtgatggaacatatctggaagctgcaggagttttgtaacagcatggcaaagctggatattgatggttacgaatacgcctatcttaaagccatcgtgctgttctcccccgaccatcctggcttaaccagcacctcccagattgaaaagtttcaagagaaagctcaaatggagcttcaggactacgtgcagaagacgtattccgaggatacctacagacttgccagaatcctcgttcgactcccggcacttcgattgatgagttcgaacataacagaagaactgttctttactggtctgattggaaatgtttcaattgatagcataatcccgtacattctcaaaatggagacagcagagtacaatggacagataactggggcatctctttag

SEQ ID NO: 126948 - DNA, 1791 bp, synthetic construct
  misc_feature 1..1791: note = Description of Artificial Sequence: Synthetic coding sequence
  source 1..1791: mol_type = other DNA
atgacctctccctcccctagaatccagataatcagcacggacagtgcggtagcatcacctcaaagaattcaaatcgtgaccgaccagcagaccgggcaaaagatccaaatcgtgaccgctgtggacgccagtgggagtccgaaacagcaatttattctgaccagtcccgatggggccggaactggtaaggtgattcttgcttccccagagaccagctccgccaagcagttaatatttacaacgtccgacaacctggtgccaggcagaatccagattgtgactgactcagcctctgtcgagaggctcctcggcaagactgatgtgcaacgcccccaggttgtcgagtattgtgtggtctgtggcgataaagcgtccggtaggcactatggcgccgtgagttgtgaaggctgcaagggctttttcaaacggtccgtccgcaagaatttaacatacagctgtcgctctaatcaagactgcattatcaataagcaccacaggaaccgctgccagttttgccgcttaaaaaagtgtctggagatgggcatgaaaatggaaagcgtacagtcggagcgcaaaccgttcgatgtgcagagagaaaagcctagcaattgtgctgcctcaacggaaaaaatatatatcagaaaggaccttaggagtccccttatcgcaactccaaccttcgtggccgacaaggacggggcccgtcagaccggcctgttggaccctggaatgctggttaatattcagcaacccctgatccgggaagatggtactgtgctcctcgccacggatagcaaggccgaaactagccagggcgcacttgggactctggcgaatgtggttacctcgttggcaaacctgagcgagagcctgaataacggagacacgagcgagattcagcctgaggaccagtccgcctctgagatcacacgagcttttgacaccctcgccaaggctctcaatactactgactcaagctctagcccctccctcgccgatggcattgacacttctggcggggggagtatccacgtgatttctagagaccaaagtacaccaatcattgaagtcgagggcccactcctgtccgacacccacgtgacgtttaagctgaccatgccctctccaatgccagaatacctgaatgttcactatatttgcgagtctgcctctaggctcctattcctctctatgcactgggcaagatctattcctgcgtttcaagctttggggcaggactgcaacacttctctggtccgggcttgttggaatgaactttttaccctgggccttgcccagtgtgcccaggtgatgagcctgtcaactatcttggctgccatcgtgaaccacctacagaacagcatccaggaggacaaactgtctggcgacaggatcaagcaagttatggagcacatttggaaacttcaggagttctgcaacagtatggcaaagttggatatcgacggatatgagtacgcttacctgaaggccattgtgctatttagtccagatcatcccggattgacatctacatcgcaaatcgaaaagtttcaagaaaaggcccagatggagctacaggactatgttcaaaaaacatactccgaggacacctacagactggcacggatattggtgcggttacccgccctgagactgatgtcgtccaacatcactgaagaacttttcttcacgggactaataggcaatgtcagcattgacagtattatcccctatatcctcaaaatggaaaccgcggagtacaatggacagattaccggagcgtcactgtag

SEQ ID NO: 126949 - DNA, 111 bp, synthetic construct
  misc_feature 1..111: note = Description of Artificial Sequence: Synthetic coding sequence
  source 1..111: mol_type = other DNA
atgacatctccctcacctaggattcagatcatcagcaccgatagcgctgtagcctccccgcagaggattcagggctctgagcccgcttcgggcccactgagtgtattctag

SEQ ID NO: 126950 - DNA, 618 bp, synthetic construct
  misc_feature 1..618: note = Description of Artificial Sequence: Synthetic coding sequence
  source 1..618: mol_type = other DNA
atgactagcccctcaccacgtatccagattatcagcacagactctgctgtagcttctccacagagaatccaggggtcagagcctgctagcgggccactgtccgtctttacctccctgaacaaggaaaagatcgtgaccgatcagcaaacggggcagaaaatccagatagttactgccgtggacgcctccggatcccccaaacagcagtttatccttaccagcccagatggtgcagggacgggcaaagtgattctggcaagccccgaaacatccagcgcgaaacagctgatctttaccacctccgacaaccttgttccaggtagaatccagatcgtcactgactcggcctctgtggaacggcttctgggaaagacggacgtgcaaaggccacaggttgtggagtactgcgtcgtatgcggcgacaaggcgtccggccggcactacggtgccgtttcttgcgaaggatgcaagggattcttcaagaggagcgtccggaagaacctcacatatagctgcaggtctaaccaggactgtatcatcaataaacatcatcggaatcgctgtcagttctgcagattaaagaaatgcctggagatggggatgaaaatggagtgttag

SEQ ID NO: 126951 - DNA, 1269 bp, synthetic construct
  misc_feature 1..1269: note = Description of Artificial Sequence: Synthetic coding sequence
  source 1..1269: mol_type = other DNA
atgtttcgggcaggggccgagggcgctgagaaggaaccctcccctcggccggagtgtcgcgccgatcctggtcccggactgggtttcccccttgggtctggtttgccttggccatcgctgctagaaagcccgggcggaagaattctggatattccgtgcaaggtgtgtggggacaggtcgtccggaaagcattatggcgtgtatgcatgtgatggctgttccggattcttcaaacgctctattagaagaaacagaacatacgtatgcaagtccggcaaccagggcggatgtcctgtggacaaaacccatcgcaatcaatgccgcgcatgcaggctcaagaagtgcctggaagtgaatatgaacaaggacgccgtgcagcacgaaagagggccaagaacaagcaccattcggaaacaggtggcactgtacttccggggccacaaggaagaaaatggtgctgctgcccactttccttccgccgccctccctgcacccgcattcttcactgccgtcacgcagttagagccccatgggctggaactggccgctgtctctacaacaccagagaggcaaaccttggtttctttggcccagccgacccccaagtatcctcacgaggtgaacggaacccctatgtacctctacgaagtcgccacggagagtgtgtgcgagtctgctgccaggctgttattcatgtccattaaatgggccaagagcgtgccagctttttctaccctgtctctgcaagaccagctaatgctcctggaagacgcttggcgcgagcttttcgtgctggggattgcacagtgggcaatcccggtggatgctaacaccctgttggcagtgagcggcatgaatggtgataacacggactctcagaagcttaataaaataatctccgaaatacaggccttacaggaagttgttgccaggttccgtcagctgaggcttgacgccacagaattcgcatgcctcaaatgtatagtgaccttcaaggcagtccccactcacagtggcagtgaactgcgcagcttccgaaatgcggctgcaatcgcagcactgcaggacgaggctcaacttaccctaaattcatacatccacaccaggtaccctacacagccttgccgcttcgggaaattactgctcttgctgcctgccttgcggagcatttccccatctacaattgaggaggtgttttttaaaaagacaatcggcaacgtgcccatcacgagactgttgtccgatatgtacaagtcgagcgacatctag

SEQ ID NO: 126952 - DNA, 1158 bp, synthetic construct
  misc_feature 1..1158: note = Description of Artificial Sequence: Synthetic coding sequence
  source 1..1158: mol_type = other DNA
atgtctaagcctgcaggctctacctcgaggattctggacatcccatgtaaggtctgcggggaccgctcatccgggaagcactatggagtgtatgcctgcgatggctgcagtgggttcttcaagcgctcaatcaggagaaaccgcacctacgtgtgtaaatccggtaaccaaggagggtgcccggtggataaaacacatcgcaaccagtgtagggcatgcagacttaaaaaatgccttgaggtgaacatgaacaaagatgcagtgcaacatgagcggggcccacgaacctctaccatccgtaagcaagtcgctctttacttccggggccacaaagaggaaaacggcgccgctgcacatttcccttccgccgccctgcctgcccccgcgttctttacagcggtaacacaattggaacctcatggactggaacttgcagctgtgagcactaccccagagcgccagaccctggtgtctctggcccaacccacccctaagtacccacacgaggtgaatgggacccctatgtacctgtacgaggtggccaccgagagcgtctgcgagtcggcggctagactcctttttatgtccataaagtgggctaagtcagttccagcattctccactctgagcttgcaggaccagttgatgttgttggaagacgcctggcgagaactgtttgttctaggcattgcccaatgggctattccagtggacgccaacactctcctggcagtcagcgggatgaacggagataacacagattcacagaaactgaataagatcatcagcgaaatccaggccttgcaggaagttgtggcgagatttagacagttgagactggatgcaactgagttcgcctgtttaaaatgcattgtgacgtttaaggcagtgcctacgcacagtgggtcagagctgaggtcctttcgaaatgctgcagccatcgccgccctgcaggatgaggcccagctgacactgaattcttacatccacaccaggtatcccactcaaccctgccgattcggtaagttattgctactcctaccagccctaaggagtattagccctagcaccatcgaggaagtcttttttaagaagaccattggcaatgttcctattacacgcttgctgtctgacatgtacaaaagttctgatatatag

SEQ ID NO: 126953 - DNA, 141 bp, synthetic construct
  misc_feature 1..141: note = Description of Artificial Sequence: Synthetic coding sequence
  source 1..141: mol_type = other DNA
atgaataaagatgctgttcagcacgagcgaggccctaggacaagtactattcgtaaacaagttgcgctgtactttagaggacacaaggaggagaatggcgccgctgctcactttccaagtgctgctctgcccgccccatag

SEQ ID NO: 126954 - DNA, 1272 bp, synthetic construct
  misc_feature 1..1272: note = Description of Artificial Sequence: Synthetic coding sequence
  source 1..1272: mol_type = other DNA
atggccatggtggtgagttcttggcgggacccccaagatgacgttgcaggtggtaaccctggcgggccaaatcctgctgcacaggcagctagagggggcggcggcggcgccggcgaacagcaacaacaggcaggcagtggggccccacacacacctcagacacccggacagcctggggcccccgctacgcctggtactgctggagacaaggggcagggcccgcctggtagtggccagagccaacagcacatcgaatgcgtagtgtgcggagacaaaagctctggaaaacattacggtcagttcacttgtgaggggtgcaagagctttttcaaacgctcagttcgacgaaacctcacgtatacttgccgcgctaacagaaattgcccaatcgatcagcaccacagaaaccagtgtcaatactgtaggctgaagaagtgcctgaaggtaggtatgcgcagggaagcagtgcagcgcggtcgtatgcctcctacacaaccaaacccgggtcagtacgcgctgacaaatggcgatccattgaatggccattgttacctgagcggatatatcagcctcctgctgagggcggaaccttatcccaccagccggtacggatcacagtgcatgcagccgaataacattatgggtatcgagaatatctgtgagctcgccgcacgtctcctcttctcagcagttgaatgggccagaaacattccttttttcccagatctccaaattacagatcaagtatcactactccgactaacttggtcggagctgtttgtgcttaacgccgctcaatgcagcatgccccttcatgttgctcccctattggccgctgccggccttcatgccagccccatgagtgccgaccgcgttgtggcattcatggatcacattagaattttccaggagcaggtggaaaagctcaaagctctgcacgtcgacagcgccgagtattcttgtttgaaggccattgtgctgttcacctctgatgcctgtggtctctctgatgccgcgcacattgaatctttgcaggagaagtcccagtgtgcacttgaggaatacgtccggtcacagtacccgaaccagccaagtcgcttcgggaagctgctgctcaggctgccatcactgcggactgtgagctctagtgtcatcgagcagttattttttgtgaggttagttggcaaaacgccaattgaaaccctgatcagggacatgctactgagtggaagctcatttaattggccctacatgtcaatccagtgttcttag

SEQ ID NO: 126955 - DNA, 1245 bp, synthetic construct
  misc_feature 1..1245: note = Description of Artificial Sequence: Synthetic coding sequence
  source 1..1245: mol_type = other DNA
atggcaatggtggtgtctacctggcgggacccccaggatgaggtcccagggtcgcaggggagtcaagccagccaggcccccccagtcccgggtccgccacctggagcacctcacaccccgcagacccccggccaaggaggcccagcctctacgcctgcgcagaccgcagccggcggtcaagggggacccgggggccctggcagcgacaaacagcagcagcagcaacacatagaatgtgtggtttgcggggacaaaagtagcggtaagcattacggacagtttacatgcgaaggttgtaaatcctttttcaagcgtagtgtccggaggaatctgtcgtacacgtgtagagcaaacagaaattgccccatcgaccaacaccaccgcaaccagtgccaatactgcagactcaagaagtgtcttaaagttggtatgcgaagagaagcagtgcagagaggccgcatgccaccgacccaaccaacccatggccagttcgcactgaccaatggcgatcccctgaattgtcattcatacctgagtggatatatctccctgctgctgcgcgctgagccctaccctacttcacgctttggctcccagtgcatgcagcctaacaacatcatggggattgagaatatatgcgaactggccgctcgcatgctgttcagtgcagtggaatgggcccggaacatccccttctttcctgatctgcaaattactgaccaggtagcactgttgcgactgacatggagtgaactgtttgtgctgaatgcagcacagtgctcaatgccgctgcacgttgctcctctactggcagctgcaggactgcacgcatcgccaatgtcagccgatagggtggtggcttttatggaccatattagaattttccaggaacaagtggaaaagctcaaagcgctccacgtggactcagctgagtactcttgcctcaaggccattgttctttttacctctgacgcgtgtgggctgagcgacgtggcgcatgtggagtcccttcaggaaaagtctcagtgtgccctcgaggagtacgtgcgaagtcagtacccaaaccagccaactcggtttgggaagctgctgctgagactgccctctctgcgcacggtctcgtcatccgtcattgaacagctctttttcgtcagactagtgggcaagacaccaatagaaactttaattagggatatgttgttatcgggatcttctttcaactggccatacatggctatccagtag

SEQ ID NO: 126956 - DNA, 786 bp, synthetic construct
  misc_feature 1..786: note = Description of Artificial Sequence: Synthetic coding sequence
  source 1..786: mol_type = other DNA
atgccaccaacacagccaacacatggacaattcgcccttaccaatggcgatcctctcaactgccacagttacttgtcaggttatatttcactcctcctcagagccgagccgtatccaacaagccggttcggtagccagtgtatgcaacccaacaacatcatgggcatcgaaaacatctgcgagctggccgcgcgcatgctgttctcagctgttgagtgggcaagaaatattccattcttccctgacctgcagatcaccgatcaggtcgcactccttaggctcacctggtctgagctgttcgttctgaatgctgcccaatgctccatgccattacatgtagcgcctttactggccgccgcaggactgcatgcgtcacctatgtctgctgaccgggtcgtggcattcatggatcacattcgaatattccaggagcaggtggagaagcttaaggctcttcacgttgattctgctgagtacagctgcctgaaggctatcgtcttgtttactagcgacgcctgcggcctgagtgatgttgcgcacgttgagtcattacaagagaaatcacagtgtgcgctcgaagaatacgtacgctcgcagtatcccaaccagcctactagatttggaaagctcctgttacggctgcccagcctcagaaccgtgagtagctcggtgattgagcagttattttttgttaggttggtaggcaagacaccaatagagacactcatacgcgacatgcttctgtccggctcatcatttaattggccctatatggctattcagtag

SEQ ID NO: 126957 - DNA, 846 bp, synthetic construct
  misc_feature 1..846: note = Description of Artificial Sequence: Synthetic coding sequence
  source 1..846: mol_type = other DNA
atgcaagctgtctgggacctggagcagggcaaatatggcttcgccgtacagagggggaggatgccacccacacagccaacacacgggcagtttgctctgaccaacggtgacccactgaactgccattcctacctaagcgggtatatctccctcctgctaagggccgagccatatcctacctcccgcttcggaagtcaatgcatgcagccaaataacatcatgggaattgagaacatttgcgagctggctgcacgcatgttgtttagtgccgtggagtgggcccgtaacatacccttttttcccgacttgcagatcacagatcaggtggcactactccgtctgacctggagcgaattgttcgtcctgaacgcggcccagtgttccatgcccctccatgtggccccactgcttgcagccgctggccttcatgcctccccaatgtcagcagaccgggtggtagcgtttatggaccacattaggatattccaagaacaggttgaaaaattaaaggctctgcacgtggactcggctgaatacagctgtttaaaggccatcgtgttgtttacctccgatgcttgtggcctctcagatgtggcccatgtcgaatcactacaagagaaatcccagtgcgctcttgaggaatacgtgcggagccagtaccctaaccagcccacacgcttcggcaagctgctcctgaggctgccctccctccgcaccgtatcgagctccgtgatcgagcagttgttcttcgtacggctagttgggaagactcctattgaaaccctcatccgggatatgcttctatctggcagcagctttaactggccctatatggccatacaatag

SEQ ID NO: 126958 - DNA, 786 bp, synthetic construct
  misc_feature 1..786: note = Description of Artificial Sequence: Synthetic coding sequence
  source 1..786: mol_type = other DNA
atgcctccaacgcagccaacgcacggccagttcgccctgaccaacggtgatcccctgaattgtcactcctacctatctgggtatatcagcctgctgctgcgggcagagccctacccaacgtcgcggtttggatcccagtgcatgcagccgaacaacataatgggtatcgaaaacatctgtgaactagcagccagaatgctctttagcgccgtggagtgggcccgaaatatcccttttttccccgatctgcagattacagatcaggttgcgctgcttaggttgacctggtccgagctgttcgttctgaacgcagcccagtgttcgatgcccctccacgtcgcccccttgttggccgcggcaggactgcatgcgtcacctatgtccgcagacagggtcgtggcctttatggaccacattcgcatcttccaggagcaagtggagaaactaaaggcactacatgtggacagcgcggaatattcttgtctcaaggcaatcgtcctgttcacctcagacgcatgcgggctgtctgacgtcgcgcacgtggagagcctgcaagagaagagtcagtgtgctctggaggaatatgtcaggtcgcagtaccccaaccagcctaccaggttcgggaagctgctgttgaggctgcccagcctgagaactgtaagctcctcggtgattgagcaactatttttcgtgaggctggtaggaaagaccccaatcgagaccctgatccgggatatgctgctgagcgggagcagcttcaattggccttatatggcgatccagtag

SEQ ID NO: 126959 - DNA, 1215 bp, synthetic construct
  misc_feature 1..1215: note = Description of Artificial Sequence: Synthetic coding sequence
  source 1..1215: mol_type = other DNA
atggcaatggtcaccgggggctggggaggccctggaggggataccaacggggtagacaaagccggcggataccccagagcggcggaggatgactctgccagtccacccggcgccgcttctgatgctgagcccggcgacgaggagcgaccgggtctccaagtggactgcgtggtctgcggcgataagagctctggtaagcattatggtgtcttcacctgcgagggatgcaagagcttttttaagaggagcatacgacgcaatttgagctatacctgtagaagcaaccgagattgccagatcgatcaacaccaccggaatcagtgtcagtactgccgccttaaaaagtgttttagagtgggcatgaggaaggaagccgtccagcgcggccgcatcccacatagccttcctggtgcggtggccgcttctagcgggagcccgcccgggagcgctttagccgccgtggcctctggcggtgatttatttcctggacagccggtgagtgaactgatcgcccagctgctgcgtgccgagccctatcctgccgccgcaggacgtttcggggcaggtgggggagccgctggagctgtccttgggattgacaacgtgtgtgaactcgctgccagactcctgttttcaactgtggagtgggctcggcacgcccctttcttccccgagctccctgtggccgaccaagtggccctgcttcgtctctcctggtctgagcttttcgtgctaaatgccgcccaggcagccttacctcttcatacggctcctctgcttgccgcagccgggctgcacgccgctcctatggcggctgagcgagccgtggcctttatggatcaggtcagagcctttcaggaacaggtggataagcttggaaggctgcaggtcgattcagcagagtacgggtgccttaaagctatcgcactgttcaccccagatgcctgtgggttgtcagacccagcccatgtggaatcccttcaggaaaaagcccaggtcgctctgactgagtatgtccgtgcccagtatccgtcccagcctcagcgattcggacgcctgctacttagacttcccgctctgagggcagtgcctgcctccctgataagccagttgtttttcatgcgcctagtgggaaaaacccctattgagaccctgatacgcgatatgttgctgagcggtagcaccttcaactggccttatggcagcggacagtag

SEQ ID NO: 126960 - DNA, 1134 bp, synthetic construct
  misc_feature 1..1134: note = Description of Artificial Sequence: Synthetic coding sequence
  source 1..1134: mol_type = other DNA
atggctatggtcacggggggctggggcggtcccgggggagacgctgagccaggcgatgaagaaagacccggccttcaagtcgactgcgttgtctgcggggacaaatctagtggtaagcactacggagtatttacatgcgaaggttgcaagagtttctttaagcggagtatccgcaggaatcttagctatacctgtcggagcaatcgcgactgccagatcgaccagcatcaccggaaccaatgccagtattgcagactgaagaagtgcttccgggttgggatgcgtaaggaagccgttcagcgtggaagaattccccatagtctccccggggctgtcgctgcctcaagcggctccccccctggatctgcactggccgccgtggccagcgggggggacctcttcccaggacaacctgtgtcagagctcattgcccagctgctgcgcgccgagccctaccccgccgccgctggccgctttggggccggcggaggagcagcgggagccgttctggggatcgacaatgtctgcgagcttgcagctaggctgctgttctcgacagtggagtgggcaagacacgctccattcttcccagaactgcctgtggcagaccaagtagcacttttgcgtttgtcctggagcgagttgtttgtccttaatgcagctcaggccgcgctgcccctccacacagcccctttattggccgcggctgggttgcacgccgcgcctatggcagccgagcgcgccgtagccttcatggatcaagttagagcttttcaggagcaggtcgataagctggggcggctgcaggtggatagtgctgagtacgggtgtttgaaagcgatcgcattattcactccagatgcttgtgggctctcagatccggctcacgtggagagcctgcaggaaaaggcacaggttgcgcttactgagtatgtaagggctcagtacccctcccagccgcagcggtttggccggctcctgctcaggctgcctgccctcagagccgtgcctgcttcacttatttctcagctctttttcatgcggctagtgggaaagacccccatcgagaccctcattagggacatgctgctatccggctcaacattcaactggccctacggttccggacaatag

SEQ ID NO: 126961 - DNA, 2121 bp, synthetic construct
  misc_feature 1..2121: note = Description of Artificial Sequence: Synthetic coding sequence
  source 1..2121: mol_type = other DNA
atggagactaagggctatcactcccttccggaaggtctagatatggaaagaagatggggacaggtgagccaagccgtggagagaagctcactcggtccaactgagaggaccgacgaaaacaactacatggagatagtaaacgtaagttgcgtgtctggcgcgatccccaataacagcacccagggctcaagcaaggagaagcaggagcttctgccctgcctgcagcaggacaacaataggcccggcattttgacatctgacatcaaaacagaattggagtctaaggagctgtccgccaccgtcgcagagtccatgggactgtatatggatagtgtgagggacgccgactacagctacgaacaacagaaccagcaggggagtatgtcacccgctaagatctatcagaacgttgaacagcttgtcaagttttacaaaggaaatggccaccgaccttctaccttatcctgtgtgaacacaccgctgaggtcgttcatgtccgactctggatccagtgtcaacggcggcgtgatgcgcgccgtggtgaaatcgccaattatgtgtcacgagaagtcccctagcgtttgctcacccttgaacatgacgtcttccgtatgctcgccagcaggcatcaacagtgtttcctctactaccgcaagctttggaagcttccctgtccattctccaatcacacagggtacgcctctgacctgcagccccaacgtggaaaatagggggtctagatctcattccccagcacatgccagcaatgtgggaagccccttatcatctcctctgtcctccatgaagtcgtccatttccagccctccttctcactgctctgtgaagtccccggtgtcaagccccaacaatgtaacactccgaagtagcgtgtcttcccccgcaaatatcaataattcacgctgcagtgtgtccagcccaagtaataccaacaaccgaagcaccctcagctccccggcagcatcgaccgtcgggagcatatgctccccagttaataatgctttctcttacaccgctagcgggactagtgcaggttccagtaccttgagggacgtggtcccttcaccagatacacaggaaaagggagctcaggaggtgccttttcccaaaaccgaagaagtggagagcgccataagtaacggcgtgaccgggcagcttaacatcgttcaatacattaaaccggagcccgatggcgccttttcatccagttgcttgggcggcaatagtaagatcaatagcgattcatccttttctgtccccatcaaacaggaatccactaaacactcatgctccgggacgtccttcaaaggtaacccaactgtgaacccgttcccgtttatggacggatcttatttctcgttcatggacgacaaggactactattctcttagcggtatcctgggacctcctgtcccaggcttcgacggcaattgcgaggggtccggtttcccagtcggtatcaaacaggagcctgatgacggttcatattacccagaggcttcgattccatcttctgctattgtgggggtgaattccgggggccagtcgttccactacaggatcggcgctcagggcaccatctccctctctcggtcagctagggatcagtcgttccagcacctttcatccttcccacccgtcaacacgttagtggagtcatggaaatcccacggtgacttgtcttccagaagaagtgacggttatccggtgctagaatacatcccagaaaatgtgtcatcatcaacattaagatcagtgtctacaggctcttcacgaccttcaaaaatttgcctcgtctgcggcgatgaagcttccggatgccactacggcgtggtgacctgcggatcctgcaaagtgtttttcaaacgggccgtggagggacaacataactatctctgtgcgggaagaaacgactgcatcattgataagatccgtcggaagaactgccccgcatgcaggctgcaaaagtgcctgcaggccggcatgaatctcggggaaaggcggtgtatcagcctcccctgtatgaattacgctcgggggtgtactaagtctgctttttcgtcatttgactgttcctctcccctgaagaacactccatcgtag

SEQ ID NO: 126962 - DNA, 2955 bp, synthetic construct
  misc_feature 1..2955: note = Description of Artificial Sequence: Synthetic coding sequence
  source 1..2955: mol_type = other DNA
atggagacaaagggctaccactcgctgcccgaaggcttggacatggagagaaggtggggccaggtgtcacaagccgtcgaaagaagtagcttaggtcctaccgaacggaccgacgaaaacaattatatggagatcgttaacgtgtcctgtgtctctggcgcaatccccaataactccactcagggaagttcaaaggaaaagcaggagctgctcccttgtctgcagcaggataataataggccaggcattctcacttcggatatcaagactgaactggagtcaaaggaactgtcggcgacagtggctgaaagcatggggctttacatggactccgtcagggacgcggattattcttatgagcaacagaaccagcaaggaagcatgagccccgcaaagatatatcagaatgtggaacagctggtgaagttttacaaggggaacgggcatcggccctctacattgtcttgtgtaaacaccccactcagaagctttatgtccgactctgggtccagcgttaatggcggagtcatgcgggcagtagtcaagagtcctattatgtgccatgaaaaaagtccctcagtatgttcccctctaaatatgactagctccgtttgttccccggccggcatcaacagcgtgagttcaacaacggcttcatttggttcgtttccagtgcattctccaatcacccaaggcactccactgacatgcagcccgaatgtggaaaatagggggtctaggtcacattccccggctcacgcctcgaatgtgggatccccgctgtcaagtccactgtcctcgatgaagtccagtatcagctcgcctcccagccattgcagcgtgaaaagtcctgtgtcttccccaaataacgtaaccctcaggtcctctgtctcgagccctgctaatatcaacaatagcagatgcagcgtgagcagtccttcaaatacaaataatcgcagcaccctgtccagccccgctgcttccacggttgggtccatctgttctccagtgaataacgcttttagttatacagcttcaggcacatctgccggcagctccaccctgcgagacgtcgttccatctccagatacccaagagaagggggcacaggaggtaccgttccctaaaactgaagaagtagagtcggccatttctaacggcgtgacgggacagctgaacatcgtgcagtacatcaagcctgagcctgacggtgcattcagctccagctgcttggggggcaatagcaagattaacagcgattcttctttttccgtccccattaagcaggagtctaccaagcacagctgttcaggaacttcattcaaaggaaaccccactgtaaacccattccccttcatggacggttcttactttagtttcatggacgacaaagactactactcattgtctgggatcttgggaccacccgttccagggtttgacggcaattgtgagggctctggattcccagtgggaattaaacaggaaccagatgatggaagttactatcctgaagcctctattccgagtagcgcgattgtgggcgtgaactctggcggccagagcttccattaccgaataggtgctcagggaaccatctccttgtcccgttctgctagagaccaatcatttcagcacctgagctcctttccccccgtcaatacattagtggagagttggaagagccacggggacctcagctctcgacggtccgatggttacccagtgctggaatacatccccgagaacgtgagctcctcaacactcagatccgtgtccaccgggtcctcccgaccaagtaagatttgcctggtttgtggggacgaagcgtcagggtgtcactacggcgtggtaacctgcggcagctgcaaggttttcttcaagcgcgccgtcgagggccagcacaactatctgtgcgcagggcggaatgactgtataattgataaaataaggaggaaaaactgtcctgcatgcaggctacaaaagtgcctgcaagccggtatgaatctgggtgctaggaagtctaaaaagcttggaaaactgaaaggcattcatgaggagcagcctcagcaacagcagccaccaccaccccccccacctcctcagtccccagaggaggggaccacgtacattgctccagccaaagagccatcagtcaacaccgcgctagtgccccagttgtccaccatcagcagagccttaaccccaagccccgtgatggtactggaaaatatcgaacccgagattgtttacgctggatacgactcatccaaacccgatacggcggaaaatttattgagcaccctgaacaggctcgcagggaaacagatgatacaagtggtcaagtgggccaaagtgctgccagggttcaagaacctgcctctggaggatcaaataaccttgattcagtacagctggatgtgtttgagcagcttcgcactttcatggaggtcttataagcacactaatagtcagttcctttattttgccccggatctcgttttcaatgaggagaaaatgcatcagtcggctatgtatgaactctgtcagggtatgcaccagattagcttacagtttgtgagactgcagctaacattcgaagaatacaccatcatgaaggtgctgcttcttctttccaccattccaaaagacggactgaaatcccaggcagcatttgaggaaatgaggaccaactacataaaagaacttcggaagatggtgacaaaatgtccaaataactccggacaatcttggcagcggttctaccagcttactaagcttctagacagcatgcatgacctggtgtccgacctccttgagttctgtttttatacatttcgcgagtcgcacgccttgaaggtggagttccccgccatgcttgtggagattatttcagatcagctgcccaaagtggaatcaggcaacgccaaaccattgtatttccaccgaaagtag

SEQ ID NO: 126963 - DNA, 2967 bp, synthetic construct
  misc_feature 1..2967: note = Description of Artificial Sequence: Synthetic coding sequence
  source 1..2967: mol_type = other DNA
atggaaactaaagggtatcactcccttcccgaaggacttgatatggagagacgctgggggcaggtgtcccaggctgtggagcgctcaagcctgggcccaaccgagagaacagacgagaacaattacatggagatagtgaacgtctcgtgcgtcagcggcgcgatacccaacaacagtactcagggatcatcaaaagaaaagcaagagctccttccatgtctccagcaagacaataatcggcctggcattctgacatccgatataaagacagagctagagtcgaaggagctctccgcaacagttgccgaaagtatgggcttatacatggactctgttcgggacgctgattactcttatgaacagcaaaaccagcagggatctatgtctcccgccaaaatctatcagaacgtagagcaacttgtgaagttctacaagggaaatgggcaccgtccatctactttaagctgtgttaacaccccactccgcagcttcatgtccgattcgggatctagtgtaaatggcggcgttatgcgggcagtggtcaagtctccaataatgtgccatgagaaatcccccagcgtctgctctccattgaacatgaccagctctgtgtgctctcccgccggcatcaactcggtcagctctaccactgcctcgtttggaagctttcctgtccattctccaattacccagggaactcccttaacctgcagtccaaatgtcgagaatcgcggatcaaggagtcactcccccgctcatgccagtaacgtcggtagtcctcttagtagccccctgtcctctatgaaaagtagcatcagcagcccaccgagccactgttctgtaaaatcacctgtaagttcccccaataatgtgaccttgcgatctagtgtgtcctctcccgctaatatcaacaactctcggtgcagtgtctcctctccatcaaataccaataacagatcaacactatcttcacctgcggcctcaaccgtgggctcaatctgctctcctgttaacaatgcattctcttatacagctagcgggacatcagccggctccagtacgctccgggacgtggttcctagccctgatacacaggagaagggggctcaggaagtgcctttccccaagacggaggaagtggagtccgcaatcagcaatggtgtgacagggcagctgaatatagtgcaatacatcaaaccagaaccagatggcgcgttctccagctcttgtctcggggggaacagtaaaattaatagtgacagcagcttctcggtgcccatcaaacaggagtctactaagcatagttgctcgggtacatctttcaaggggaatcctacggtcaatcctttccctttcatggatgggtcatacttcagtttcatggatgacaaagactattattctctttccggcatcctgggacctcccgtgcctgggttcgacgggaactgcgagggaagcggttttcccgtgggaatcaaacaggagccagacgatggctcatattatcccgaagccagcattccaagtagtgccatcgtaggcgtgaactccggtggccaatcctttcattataggataggggcccagggcacaatttccttgtccaggagtgcccgggaccagtcattccagcacctctcttccttcccaccagtgaacactctcgttgagtcatggaagtcccatggagacctgagtagtagacggtcagatgggtaccctgttctggagtacattccagagaatgtgtcttccagtacactgagatctgtgagcacaggctccagtcgacccagcaaaatatgcctcgtatgtggagacgaggcatccgggtgccactatggcgtggttacctgtggaagctgcaaggtgtttttcaagagggctgtggagggtaaatgttcatggcagcacaactatctgtgcgccggaagaaatgattgcattatcgataaaatacggagaaaaaactgtccggcttgtcggttgcaaaaatgtctgcaggcagggatgaacttaggagccagaaagtcgaagaagctggggaaactgaaagggattcacgaggagcagcctcagcagcagcagcctccacccccgcctcctccacctcagtccccggaggaagggactacttatattgcccccgcaaaagagccctccgtcaacaccgcgctggtaccacagctatctaccattagtcgcgctctgacaccctcacctgtgatggtgctcgagaacatcgagccggagatcgtctatgcggggtacgattcaagtaaacccgacactgctgagaatctgctatctacgctgaacaggttggccggtaaacagatgattcaggtggttaagtgggcaaaggtcctccctgggtttaagaatctgccactcgaggaccagatcacgcttatacaatactcctggatgtgcctttctagcttcgccctgtcttggcgctcttataaacacactaattcccagtttctttatttcgcaccagatctggtcttcaatgaagagaagatgcaccagtccgcaatgtatgagctgtgtcagggaatgcatcaaatctccctgcagtttgttcggcttcagctcacgttcgaagagtacactataatgaaggtgcttcttcttctgtcaacaattccaaaagacgggcttaaaagtcaggctgccttcgaggagatgcggactaactacataaaggagctgcggaagatggtcacaaagtgtccgaataactctgggcagtcgtggcagaggttctatcaactaaccaagctcttggactcaatgcatgacctcgtcagtgatcttctagagttttgcttctatactttccgcgagagccatgctttaaaagtggagtttccagcaatgctggtggaaattatttcagaccaactccccaaagttgaaagcggaaacgccaaaccactctatttccatcgaaagtag

SEQ ID NO: 126964 - DNA, 2955 bp, synthetic construct
  misc_feature 1..2955: note = Description of Artificial Sequence: Synthetic coding sequence
  source 1..2955: mol_type = other DNA
atggagaccaagggataccacagtttaccagaaggtttggacatggaacgccgatgggggcaagtctcacaggcggtggaaaggagctcattggggcccaccgagcgcaccgacgagaataactatatggaaattgtcaatgtaagctgtgtgagtggagcaatcccgaacaacagcacacaagggtcttccaaggaaaaacaggaattgctgccttgtctccagcaggacaacaatcggccaggcatcctgacatccgatataaagacagaactggagtctaaggagctctctgcgactgtggctgaatcgatgggactatacatggattctgtcagggacgcagactactcctatgagcagcagaaccagcagggatccatgtcccctgcgaaaatctatcaaaacgtggaacagctcgttaagttttacaaaggaaacggacaccggccatccacattgtcctgcgtgaacacaccacttagatcatttatgtcagactctggttcctccgtaaacggcggagttatgcgggcagtagtgaagagccccatcatgtgccacgagaagtccccatcagtgtgcagcccacttaacatgacctcctccgtttgcagtcctgccggaattaattctgtgtctagcaccaccgcctccttcggctctttcccggtccactccccaattacccaggggacaccgctgacgtgctcacctaatgtggaaaacagaggaagccgctcacactcaccagcgcatgcttcaaatgtgggctcgccgctgtcctccccactgtcttcaatgaagtcttccattagtagtcccccctcccactgtagcgtgaaatcccctgtgagtagtccaaacaacgtcactctgaggtcctccgtgagcagccctgccaatatcaataattctcggtgttcagttagctctccatcaaatacaaataatcgctccacactgtcatcaccagccgccagcaccgttggttccatttgttccccggtaaacaacgcctttagctacactgccagcgggacctccgctggttcgagtacgctgagagatgttgtcccatcccctgacacccaggaaaagggggcccaggaggtgcccttcccaaagacagaggaggtggagagcgcaatctctaatggcgtcaccggccagctcaacatcgtccagtatataaagccggaaccagatggcgcattctcttcttcttgcctggggggaaattccaagatcaattcggactccagtttttctgtgccaatcaaacaagaatccacgaaacactcctgttctgggacatcattcaaagggaacccaaccgttaaccctttccccttcatggatggctcctatttttcctttatggatgacaaggactattacagcttgtcggggatccttggccctcctgtgccaggatttgatggaaactgcgaggggtccgggttccctgtgggcattaaacaggagcccgacgatggtagctactatcctgaagcttcaatcccatcttctgcaattgtcggagtcaatagcggggggcagagtttccactatcggatcggcgcacagggtacaataagcctctcaagaagcgctagggatcagtcgtttcagcatctgagctccttccctcctgtgaataccctagttgagagctggaagtcgcacggggatctaagcagccgcaggagcgatggttaccccgttctggagtatattcctgaaaacgtgagcagttccaccctgcgatctgtttccacaggttcatcccgtccctctaagatctgtttagtatgcggggacgaggcctcaggctgccattatggggtggttacttgcggtagctgcaaagttttttttaagcgtgctgtggaaggccagcataactatctgtgtgccggcaggaacgactgtataattgataaaattaggaggaagaattgtcctgcatgccgattacagaagtgtctgcaagcggggatgaatctcggggcaaggaaatctaaaaagctcggaaaattgaagggcattcacgaggaacagccgcagcagcaacagcctcctccaccacctccgccaccacagtcccccgaggagggcacaacttatattgccccggctaaggagccatcagtcaacacagcgctggtcccacagctgtccacaattagcagagccctgactccatcacccgtaatggtactggaaaatatagagccggaaatcgtgtatgctggctatgacagcagcaagcccgacacagctgagaatctgctgtctacattaaaccgtcttgcaggtaaacagatgatccaggtagtgaaatgggctaaagtgctgccaggcttcaagaatctccctctggaagaccagatcaccctgattcagtacagttggatgtgtctgtctagctttgctctcagctggcgctcttacaagcacacaaactctcagtttctttattttgcccctgacctggtctttaacgaagagaagatgcaccagtcggccatgtatgaattatgtcagggcatgcatcagatttccctgcagttcgtgaggctgcagttgacatttgaagaatacaccatcatgaaagttctgctcttgctgagcaccatccccaaagacggacttaaaagccaagccgcattcgaggaaatgaggaccaattatataaaggagttgcgaaagatggtgacaaaatgcccaaacaattccgggcagagctggcagcgattctatcagctgaccaagttgctcgactcaatgcatgatctcgtttctgatctcctggaattttgtttctataccttcagggaaagccatgctctcaaagtagagttccctgctatgctggtggagattatctccgatcaattgcccaaggtggagtctggtaacgcaaaacctttgtatttccatcgcaaatag

SEQ ID NO: 126965 - DNA, 2967 bp, synthetic construct
  misc_feature 1..2967: note = Description of Artificial Sequence: Synthetic coding sequence
  source 1..2967: mol_type = other DNA
atggagaccaaaggctaccactcacttcccgaaggactggatatggaaagacgctgggggcaggtgagccaggccgtcgaaaggagttcgctgggccccaccgagcggacagatgaaaataattacatggaaattgtaaacgtctcatgtgttagcggtgccattcctaataatagcacccagggctcaagcaaagagaagcaggagctcttgccgtgtctccagcaggacaacaacagacctggcattctgactagcgatatcaaaaccgaattggagagtaaggaactgtccgccactgtggccgaaagtatgggcttatatatggacagtgttcgggacgctgactacagttacgaacagcagaatcagcaaggtagcatgtcccctgctaaaatttatcagaacgtcgaacagctagtgaagttctacaaaggaaatgggcacaggccgtcaacactttcctgcgtcaacacaccactgcggtccttcatgtctgattccggctccagtgttaacggaggcgtaatgcgcgctgtggtgaagagccctatcatgtgtcatgaaaaatcaccgagcgtgtgcagccctctgaacatgaccagcagcgtgtgtagtcctgccgggatcaactctgtgtcatctacgaccgcttcttttggctccttcccagtgcactctccgatcacccagggtacgcctcttacatgttcgcccaacgtggagaacagggggtctcggagccacagcccagctcacgcatcaaatgtgggttccccactgtcatcaccactgtccagtatgaagtcttcaatcagctcgcctccctctcattgtagtgttaagtcccccgtctccagccctaataatgttacactgcgatcctccgtgtccagcccagccaatatcaacaattcacgatgctccgtgtctagcccatccaacactaacaatcgatctaccctgtcgtcgcccgcggccagtaccgttgggtcaatctgcagcccagtgaacaatgctttttcctatacggcaagcgggacgagcgcaggaagcagcaccctccgagacgtggtccccagcccagacactcaagagaagggggctcaggaagtgcctttccccaagaccgaggaggtcgaaagtgctatatccaatggggtgaccggccagctgaatattgtgcagtacatcaaaccagagccagacggcgcattctctagtagttgcctcggcggcaactcaaaaatcaatagtgatagttccttctcagtgcctatcaaacaagaatctaccaaacactcatgctccgggacttcttttaagggaaatcctacagtcaaccccttcccattcatggacgggagctatttcagcttcatggatgacaaagactactacagtctgtccggcatcctcggaccgcccgttcccggcttcgatggaaactgcgaggggtcaggcttccctgtgggcataaaacaagaaccggacgatggttcttactatcccgaagcgtccatcccctcttccgccatagtgggcgtcaacagcgggggccagagtttccactacagaattggagcccaggggactatctctctgtctcggagcgctagggaccagagcttccaacacctctcaagctttccccctgtaaatacgctggtggaatcctggaagagccatggagatctatcctccaggcgatccgacggctacccagttctagagtatatcccagagaatgtgtcttcttccactttgcgctccgtgtctacaggcagctcccggcccagcaagatatgcctcgtctgtggcgatgaggcttcgggctgccactacggagtggttacatgcggctcgtgcaaagtgtttttcaagagggctgtggagggcaagtgctcgtggcagcataactacctgtgtgctggacgcaacgattgtataattgataagatccggcggaagaattgccctgcttgcaggttacagaagtgcctgcaggctggcatgaacctaggtgccaggaagagtaagaagctcggtaaactgaaaggtattcatgaggagcagccgcagcagcaacagccccctccccccccccctcctcctcagtcaccagaggagggaaccacatacatagctccggcaaaagaaccttcagtgaataccgctctggttccccagctgagcaccatctctcgcgccctaacgccttcgccagttatggtgctcgaaaatatcgagcccgaaatagtgtatgctggatacgattcctccaaacccgacactgccgagaacctcctttccacactgaaccggcttgcaggaaaacagatgattcaggtggtcaagtgggctaaggtcctccccggctttaagaaccttccactggaggaccagatcacactcatccagtattcatggatgtgcttatcatcttttgccttgtcttggagaagctacaagcatacaaattcgcaattcctttactttgctccagacttggtgttcaatgaagaaaagatgcaccagtccgccatgtacgagctttgccaaggtatgcaccagatttcattacaattcgtgcgtttacagttgacctttgaggaatatacgatcatgaaggtgctgctgctactatcaacaatccccaaagacggactgaagagtcaggccgcgtttgaagagatgaggaccaactacattaaggaactaaggaaaatggttaccaaatgccccaataacagtggccaatcttggcagaggttttatcaactgaccaagctgctagattcgatgcacgacctggtgagcgatctccttgagttctgtttttacacatttagagagagccacgctctcaaggtggagttccccgccatgctggttgagatcatctccgatcagctccctaaggttgaaagtggcaacgcgaaacccctttactttcaccgcaagtag

SEQ ID NO: 126966 - DNA, 2604 bp, synthetic construct
  misc_feature 1..2604: note = Description of Artificial Sequence: Synthetic coding sequence
  source 1..2604: mol_type = other DNA
atggagaccaaggggtaccattccctgcccgaaggcttggacatggaacggcgatggggccaggtctcccaggcagtggagcgttcatccctcggccctacggaaagaacagatgagaataattatatggagatagtcaatgtctcttgcgtcagtggcgctattcctaataatagcactcagggatcgagcaaggagaagcaggaactgctaccctgtctgcagcaagacaataaccgaccaggaatcctcacaagtgatatcaagacagagctggaatctaaagagttgagcgcaacagtggctgagtctatggggctgtatatggattccgttagggacgcagattattcctacgagcagcagaaccaacaaggctctatgagccccgcaaagatctatcagaatgtggagcaactggtcaagttttataaaggtaatggtcatcgccccagtactttatcatgtgtgaatactcctctacgctcctttatgagcgacagcggatcgagcgtgaatggcggagtgatgcgtgctgtcgtgaagtcacccatcatgtgtcacgaaaagtctccctctgtgtgtagccctctgaacatgacctcgagtgtgtgctccccagcaggcatcaacagcgtgtctagcacaaccgcttccttcggctcgttccccgtacatagccccattacccaggggacccctctgacctgttcacctaatgtggaaaatcggggcagccggtcccacagtcccgcgcacgccagcaacgttgggagtccgctatcaagccctctgtcctcaatgaaatcatccatttcatcccccccctctcactgcagcgttaaatccccagtctcctcacctaataacgtgacgctgaggagtagcgtctcctccccagccaacattaacaatagtcggtgctcagtgtcctcaccaagcaatacaaataaccggtccacactatccagtccagctgcctcaactgtaggatccatttgttctccagttaacaatgctttcagctacacagcatctggcacatcggctgggagctccactttaagggatgtggtgcctagccccgacacacaagaaaaaggcgctcaggaggtgcccttccctaaaaccgaagaagtggagagtgcaatctccaacggtgtgactggccagctgaacattgtgcagtatatcaaacccgagccggatggggctttctcctcaagttgtctaggcggcaactccaagatcaattccgactcctctttttctgtgcctattaaacaggaaagtacgaaacactcatgctctgggacatcatttaaggggaaccctacagtcaacccattccccttcatggatggttcttatttctcttttatggacgataaggactattacagtctgtccgggatccttgggcctcctgtccctggtttcgacggaaattgcgaagggtcgggatttcccgtggggatcaagcaggaaccggatgacggtagctactaccctgaggcttccatccccagttcagccatagtgggcgtcaactccggcggacagtcttttcattatcggataggtgcccagggcacaatcagcctgagtcgtagtgcccgagaccagtcttttcagcacttaagttcttttccccccgttaacaccttggttgagtcctggaaaagtcacggggatctgagttctcggcgttctgatggctatcccgtgctggagtatatccccgagaacgtgagcagttctactctaagatcggttagtaccgggagtagtagacccagcaagatatgtctggtctgtggcgatgaagcttccggttgccactacggggtggttacctgtggttcttgtaaagtgttcttcaaaagagcagttgaaggccagcacaactatttatgtgctgggcggaacgattgtatcattgacaagattcggcgcaaaaattgtcctgcatgccggctgcaaaagtgcctccaggcaggaatgaatttaggcggattcaagaaccttccactcgaagatcaaattacattgattcaatactcgtggatgtgtttaagttctttcgccctctcctggcgcagctacaagcacacaaactctcaatttctgtactttgcccctgacctcgtgtttaacgaggagaaaatgcaccagtccgccatgtatgagctatgtcagggaatgcaccaaattagtctgcagtttgtgcggctgcagctcacattcgaagaatacaccataatgaaggttcttctgcttctctctaccatccccaaggatgggctgaaatcacaggccgcatttgaagagatgaggacaaattacatcaaagagcttagaaaaatggtcaccaagtgtccgaataatagtggccagagttggcagaggttctatcaactgaccaagctgttggactctatgcacgatctcgtgtcagatctactggaattctgtttttacacgtttagagagtcccacgccctcaaggtggaattcccggcgatgctggtggagatcatcagtgaccagctccccaaggttgagtccggcaatgcgaaaccgctctatttccaccgcaaatag

SEQ ID NO: 126967 - DNA, 1920 bp, synthetic construct
  misc_feature 1..1920: note = Description of Artificial Sequence: Synthetic coding sequence
  source 1..1920: mol_type = other DNA
atggagaccaaggggtaccatagtctgcccgagggtctggacatggagagaagatgggggcaggtgagtcaggccgtggagcggagctcactggggcccaccgagcgaacagatgagaataactacatggaaattgtgaatgtgtcctgtgtgtcaggagccatccccaataacagtacacagggaagcagtaaggagaaacaggaactcttgccttgcctgcagcaggataataatcgccctggtattctcaccagcgatatcaaaaccgaacttgagtctaaagaacttagcgcaaccgtggccgagtctatgggcctctacatggatagtgtacgcgatgcagactacagctacgaacagcaaaatcagcagggatccatgtcgccggcgaagatttaccaaaacgtggaacagctcgtgaaattctacaaaggcaatggacaccggccctcaactctctcttgcgtgaatactcctctgagatccttcatgagtgattctggtagcagtgtcaatggaggagtcatgagggctgtggttaagagtcccatcatgtgccacgagaagtctccatcagtgtgttcgccactgaatatgacaagttcagtgtgctcgcctgcaggcatcaactccgtgagcagcaccactgcatccttcggtagttttcccgtgcactcacctatcacacagggaacaccactgacgtgtagccctaacgtggaaaatcgcggatcccgctcacatagtccagcccacgccagcaatgtggggagcccactttcaagtcccctctcgagtatgaaatccagcatttcctcccccccatctcattgttccgtgaagtcacccgtctcctcaccaaacaacgtgacactgcggagctcggtgtctagccctgcaaacatcaacaactcaagatgctcagtgtcttcgccctctaatacaaacaatcgaagtactctaagcagcccagccgctagcacagtggggtccatttgctcccctgtgaataatgcattctcatacaccgcctccggcacctccgcagggtccagtactcttagggacgtcgtgccatctccagatacgcaggagaagggggctcaggaggtgccttttccaaaaaccgaggaagtcgagtcagctattagtaacggtgtgacgggtcaattgaacatcgtgcagtatatcaaacccgagccggacggggcgttttccagttcgtgtctgggaggcaattctaaaataaactctgattcctcatttagcgtgccaatcaagcaggagtctaccaagcatagttgcagcggaacgtctttcaaggggaatccaacggtgaatcccttcccattcatggatgggtcttacttcagctttatggacgacaaggactattactcactcagtggaatcctcggacctcccgtgccggggtttgacggaaactgcgagggctctggatttcctgtgggcatcaaacaggagcccgatgacggtagctactatccggaggcctctatccctagcagtgccattgtgggcgttaatagcggggggcagtcatttcattacagaatcggggcccagggcacaatcagtctgtctcgctcagctcgggaccagtcttttcagcatctcagtagtttccctcctgtcaatactctggtggagagctggaagtcacacggcgacctgtcatcgcgacggtcagacggataccccgttttagagtatatccctgagaacgtgtcctcaagtactctcagaagcgttagcacagggagtagtaggccctcgaaaaagaacatttatagatttctgctgtgcaacaaccgaactcgtggagtaggacagcagctgcccctgagcccaagatctagtaccgtcttctgtataaccggaattcacacccgctag

SEQ ID NO: 126968 - DNA, 1797 bp, synthetic construct
  misc_feature 1..1797: note = Description of Artificial Sequence: Synthetic coding sequence
  source 1..1797: mol_type = other DNA
atgccttgtatccaggctcagtatggaacgcctgctccaagtccaggccctagggaccacctcgcctccgacccgttgacacctgagttcattaaaccgactatggacctggccagtccggaggcagctccggccgcccccacagcactgccctcctttagtacgtttatggacggctacaccggcgagttcgatacgttcctgtaccaactgcctggtacagtacagccgtgcagttccgcaagttcgtccgcaagttctacgagcagtagctccgccacatctccagccagtgccagttttaagttcgaagattttcaggtatacggttgttacccaggacccttatctggacctgtggacgaggccctaagctcgtcagggtctgactattatgggagcccctgcagtgcaccaagcccttccacacctagttttcaaccgcctcagctttccccctgggatggcagctttgggcactttagcccgtcccagacttacgaggggctgcgagcatggactgaacagttaccgaaagcttcaggccctcctcagcctcctgccttcttcagcttctcacctccaacaggccccagtccaagtctcgcgcagtcccccctgaagctcttcccttcacaagctactcatcagcttggcgaaggggagtcctactctatgccgacagcatttcctgggctcgcaccgacaagtccccacttagaagggagcggtattctggatacccccgtcacatcaacaaaagctcgttctggcgcccccgggggttccgagggcagatgcgcggtatgcggagataacgcctcctgccaacactacggggtgcgcacctgtgagggatgtaaaggcttcttcaaaagaaccgtgcaaaagaacgctaagtatatctgcctcgccaataaggactgcccggtggacaagaggcgccgcaaccgctgccagttctgtagatttcaaaagtgccttgcagtgggaatggtgaaggaagtagtgcgaacagactccctgaaggggagacgcgggcgcctgccatcaaagccaaagcaaccacctgacgcttcccccgctaacctcctcacgtcgctcgtgcgagcacacttggactccgggccctctaccgcaaaactggactattccaagttccaggagctggtcctccctcattttggaaaggaagacgccggcgatgtccaacagttttatgatctgctttcgggctctctggaagtcataaggaagtgggccgaaaagatccccggattcgccgaattgagtcctgccgatcaggacttactcctcgaatctgcttttttggagctgttcatcctcaggctggcatataggtccaagcccggcgaagggaaattgatcttttgctccggattggtactgcaccgacttcagtgcgcacgggggtttggagactggatcgactctattcttgcttttagccggtcactgcacagtctcctcgtggacgtccccgccttcgcttgtcttagcgctttagtgttgattacggaccggcatggtctccaagagcctcgccgcgtcgaggaactgcagaaccggattgcctcatgtttgaaggagcacgtggccgctgtggcaggagaaccgcagcccgcatcttgtttgagcagactgctgggaaaattacccgaactccgcactctttgtacccaaggactgcaaaggatattttatcttaagctcgaagatttggtgccccccccacccataatagacaaaatctttatggacacgctcccattttag

SEQ ID NO: 126969 - DNA, 1836 bp, synthetic construct
  misc_feature 1..1836: note = Description of Artificial Sequence: Synthetic coding sequence
  source 1..1836: mol_type = other DNA
atgtggctggcaaaggcatgttggtcaatccaaagcgaaatgccctgtatccaggcacagtacggtacgccagctcctagccccggccctagagaccatctggcgagtgaccctctaacgccggaatttataaagcccactatggacttggccagccccgaggctgccccggccgcccccaccgctctaccatctttttctaccttcatggatggttacaccggcgaatttgatacgttcctgtatcagctccccggaactgtgcagccatgctcgtccgccagttcaagcgcaagctccacgtcttcctctagcgctaccagccctgcgagcgctagctttaaatttgaagactttcaggtctatggctgctatcctgggcctctgagtggacctgtggacgaagcattaagttctagcggttccgactactatggctctccttgtagtgctcctagtccatccacaccatcattccagccccctcaactgtctccctgggacgggtccttcggacatttctccccatcccagacctatgaggggctccgagcgtggactgaacagctgcccaaggctagtggacctcctcagcctcctgcctttttttccttctctccccctaccggcccaagtcccagcctggctcagtctcctctgaagctgttcccttcccaggcaactcatcagctgggggagggtgagtcctatagcatgcctaccgcttttcccggcctcgccccgacctcacctcatctcgagggatcaggaattttggatacccccgtaaccagcaccaaggcccgctccggggctccgggcggatcagagggcagatgtgccgtctgcggtgataatgcttcatgccagcactacggagtacggacctgtgaaggatgcaagggcttctttaaacggacagtgcagaaaaatgccaagtacatatgcctggccaacaaggactgccccgtggataagaggaggaggaatcggtgccagttctgtagattccaaaaatgtctggctgttggaatggtcaaagaggtcgtcaggacggactctctcaaaggtaggagaggccgattaccctctaaacccaagcagcctcctgatgcctcaccggccaacctgctcacatctctcgtccgcgcccacctcgatagtggtccatcaacagctaagctggactattcaaagttccaagagctcgtcctacctcatttcgggaaggaggacgccggggacgtccaacaattttatgatctgcttagtgggtcactcgaggtgattaggaaatgggctgagaagatccccggatttgccgagctcagccccgctgatcaagacctgctgctggagtcagcgttcttggagctgtttatactgcgtctggcctaccgctcgaaaccaggcgagggcaaactgattttttgcagcgggctggtacttcacaggctccagtgtgccagaggtttcggtgattggatcgactccatactcgccttcagcaggtcattacacagcctgctggttgatgtccccgccttcgcatgtcttagtgccctggtgttgatcaccgaccgacacggactgcaagagcccagacgcgtggaggagctgcagaaccgcatcgccagttgcctcaaggagcacgtcgcagccgtggctggcgaaccgcaacctgcctcatgtctgagccggctgttgggtaagttgccagaactgcgcacgttatgtacacagggtctacagcgtatattttacttaaagctggaagatcttgtgccaccaccacctatcattgacaagatcttcatggacacccttccgttctag

SEQ ID NO: 126970 - DNA, 1797 bp, synthetic construct
  misc_feature 1..1797: note = Description of Artificial Sequence: Synthetic coding sequence
  source 1..1797: mol_type = other DNA
atgccctgcattcaagcgcaatatggcacccccgcgcctagtcctggcccccgtgatcatctggcctcggatccactgactcccgaatttattaagccgaccatggatctggccagcccagaagccgcacccgcagcacccacagctttaccatctttttctacctttatggatggctataccggggagtttgacacattcctttaccagctcccaggcacagtgcagccttgttcatctgcctctagttctgcaagctcaacttcaagctcttcagcgactagccccgccagcgcaagcttcaaatttgaagacttccaggtgtatggatgctatcctgggcctctgtccggtccagtggacgaagccctgtcctcctctggtagcgattactatggctccccatgcagtgccccgagtccgtcaaccccatcattccaacctccacagctctctccgtgggatgggtcttttggacattttagccctagtcagacgtatgaagggctgagagcttggacagaacagctacctaaggcttcaggcccacctcaacctccagcattttttagctttagcccacccacaggccccagcccttctctcgctcaatctcctcttaagctgtttccttcacaggcaacacaccaattaggcgaaggcgagagctattcaatgcccacagctttccctggactggccccaacatccccacacctcgaaggttcaggcatactcgacactcccgttacatcgacaaaggctagatctggcgctcctggaggatcagagggtagatgcgcagtatgtggcgacaacgcgtcgtgccaacattacggggtacgtacttgtgaagggtgtaagggattctttaaaaggaccgtgcagaaaaacgcaaagtacatttgtctggctaacaaggattgtcctgtcgataaaaggcgtcgcaatcgatgccaattctgtaggttccaaaagtgcttagctgtcggcatggtgaaagaggttgtgcgcaccgactccctgaagggtaggcgaggccgtctcccttccaaacctaagcaacctcccgatgcctctcctgcaaacttattaactagcctcgtcagggcgcatcttgactccggaccttccacggccaaactcgattactcaaagttccaagagctggtgctgcctcattttgggaaagaggatgcgggagatgtccagcagttctacgacctgctctccggctcactggaggtgattcgaaagtgggctgagaagatccctggattcgctgagctgtcccctgccgatcaggacctcctgctggaaagcgccttcctggaactctttattctccgtcttgcgtacaggtccaagccaggcgaggggaaactaatcttttgctcaggccttgtgctacatagactgcagtgcgccaggggttttggagactggattgactccatcctggctttctcacgctccctgcatagcttgctggtggacgtccctgcgttcgcatgcttgtccgccctcgtgctgatcactgaccggcacggccttcaggagccccgcagagtagaggagctgcagaatcggatagctagctgtctcaaggaacacgttgccgccgttgcgggtgaacctcagccagcatcatgcctctcacggctgctcggtaagctgcctgagttgcggaccttgtgtacccaagggcttcagcggattttctacctgaaattagaagacttggttcctcctccaccaataattgataaaatttttatggatacattgcctttctag

SEQ ID NO: 126971 - DNA, 1797 bp, synthetic construct
  misc_feature 1..1797: note = Description of Artificial Sequence: Synthetic coding sequence
  source 1..1797: mol_type = other DNA
atgccttgcatccaggcgcaatacggcactccagcaccctcccctggcccccgcgatcacttggcatctgatcctttaacccctgaattcataaagccaactatggacctcgcctcgcctgaggccgcacccgccgcacctaccgcgctcccgtccttttcaacattcatggacggttacacgggagaattcgatacctttctgtaccagctgcctggcactgtgcaaccgtgttccagtgcctctagctcagccagtagtacatctagcagcagcgcgacatcccctgcttccgcctcttttaagtttgaggacttccaagtgtacggctgctaccccggtccactgtcagggcccgtagatgaagccttgtcatcttcaggctcggactattatggtagcccatgctccgccccttcccccagcactcccagcttccagcctcctcagctgtctccatgggacggatctttcggccacttcagcccttcgcagacgtacgagggtctccgcgcttggacagaacagttgccaaaagcaagcgggccaccacagccaccggccttttttagcttttcgccaccaactggcccttctccatccctggcccagtcgcccctcaagctgtttcctagccaggctactcaccagctgggagagggggagagttattccatgccaaccgcctttcccggcttggcacccaccagccctcacctcgagggctctggaattctggacacaccagttacaagcacgaaggctaggtcgggggcgccaggcggctctgagggaaggtgtgcagtctgtggcgacaatgcttcctgccagcactatggagtgagaacttgcgagggctgtaaggggttcttcaaacgaaccgtgcagaagaatgccaagtacatctgtctggcaaacaaggactgccccgtggacaaacgtcgtcgtaacagatgccagttctgtcgcttccagaaatgtctggccgtaggcatggttaaagaggttgtgcgaactgacagcctcaagggccggagaggtagactgccctccaaaccaaaacagccacctgatgcatctcccgctaatttacttacctccctggtgagggctcacttggactcgggcccctctacagctaagttagactacagcaaatttcaagagttggtcctgcctcattttggcaaggaggatgcaggggacgtgcagcagttttacgatttacttagcggtagtctggaagtaatccgcaaatgggctgagaagatacccggattcgctgagctgtctcctgcggaccaggatctgcttttggagagcgcctttctggaactcttcatattgcggctcgcatacaggtccaagcctggtgagggaaagctcattttctgcagcggacttgtgctccaccgactgcagtgtgccagggggtttggggattggatcgatagcatcctggctttttcgaggtccctgcacagcctgctggtggacgtccctgctttcgcgtgcctctccgccctcgtactcatcactgacagacatggcctgcaagaaccgcgtagggttgaagagctccagaataggatcgcctcttgtctcaaagagcacgtggcagccgtggccggagagccacagccagcctcctgcctgtcccggctgctcggtaaactgcccgaactgaggactctttgcacccagggtctccagcggatcttttaccttaagctcgaggacctggtcccaccacctcccatcatcgataaaatctttatggacacactccctttctag

SEQ ID NO: 126972 - DNA, 1959 bp, synthetic construct
  misc_feature 1..1959: note = Description of Artificial Sequence: Synthetic coding sequence
  source 1..1959: mol_type = other DNA
atgacgtccgcacagtacaagatcaagatcctaatagaaggtcttcaccatggacaacgacccgggcccgccccaccccgacagcccggctctttttgctgggctttgaaagccgatggcattatgtggctcgcaaaggcttgttggagtattcagtcagaaatgccttgcatccaggcgcagtatgggactcccgcgcctagcccgggtcctcgcgaccacttagcctctgacccactaacgcctgaattcatcaaaccgaccatggatctcgcgtcccctgaggcggcgccagcagcccccactgctcttccatctttttcaaccttcatggatggctacacgggggagtttgacacattcctctaccaattaccaggcaccgtgcagccatgtagcagcgcctccagctctgctagcagtacaagttcaagttccgcaaccagtcctgcctcagcatccttcaagttcgaggatttccaggtctacggctgttatccgggtcccctcagtgggcccgttgacgaggctctctcctcctctggttcagattattatggttccccatgcagcgccccctctccgagtaccccatcctttcagcctccccaattatctccctgggatggctcgttcggacacttttcccccagccagacatatgaaggtctgcgtgcatggaccgaacaactgccaaaagcatccggtcctccccagcctccggcgttcttctcctttagtccacctaccggccccagtccaagtttggcgcagtcgcccttgaagctgttccctagccaggccacccatcagttaggcgaaggagaaagctattcaatgcccactgcattccctggacttgctccaaccagcccccaccttgagggatccgggatcctggacacgccagtgaccagcaccaaggcccggtctggtgcgccgggaggctccgaaggaaggtgtgcagtgtgcggtgataatgcttcctgccagcactatggcgttcgtacctgcgagggatgtaagggcttttttaaacgcaccgtacaaaagaatgccaagtacatttgcctggcgaataaagactgcccagtggacaagagaagaaggaaccgatgccagttctgcaggtttcaaaagtgcctggccgtaggaatggtcaaggaggtagtgagaaccgactcgcttaagggccgacgcgggcgtttgccgtccaagcctaagcagcctcccgatgccagcccagctaacctcctgaccagtctggtaagggcacacctggactcaggaccaagcaccgccaagctggactactcgaagttccaggagctggtactccctcatttcggcaaggaggacgcgggggatgtgcaacagttttatgacctcctctccggcagtcttgaagtgataagaaagtgggccgaaaagatccctggatttgccgaactttcaccggccgaccaggacctgctcctggaaagcgctttcctagagttgtttattctgagactcgcctaccgctctaagccaggtgagggcaagctgatcttctgttccggtctagtactgcatcgcctccagtgtgcccgaggctttggggattggattgactccattctggcgttttctagaagccttcatagcctgctggtggacgttcccgcctttgcgtgtcttagcgctctcgtgctcataaccgacaggcatggcctgcaggagcctagacgggtggaggagctccaaaacagaatcgcttcctgcttaaaggagcacgtggccgccgtggcgggtgagccgcaacccgcatcatgtctgtccaggttgctggggaaactacccgaactccgcaccttgtgcacccagggtctgcagcgtatcttctatctcaagcttgaagacttggtacccccaccacctatcatagataaaattttcatggatactctcccattttag

SEQ ID NO: 126973 - DNA, 978 bp, synthetic construct
  misc_feature 1..978: note = Description of Artificial Sequence: Synthetic coding sequence
  source 1..978: mol_type = other DNA
atgccttgcattcaggctcagtatgggaccccagcgccatctcctggacctagagaccatcttgcctcagatccactgacaccagagtttatcaagccgacgatggatcttgcttcgcctgaagccgcacccgccgcacccactgcgctcccctctttctccactttcatggatggatacaccggcgaatttgatacctttctctaccaactgcctgggacagtgcagccttgttctagtgcaagttcgagtgcttcctcaacctcaagcagcagcgccacatcgcctgcatccgcatctttcaagttcgaagacttccaggtgtacggctgctatccaggtccactcagcggccctgttgatgaggctctgtcatcctccggatcggattattatggttcgccgtgttctgctccatcacctagcacaccctcgttccaacccccacaactgtcaccctgggatggtagcttcggccactttagcccttcacagacctatgagggtcttagagcttggacagagcagctgcctaaggcctcaggtccccctcagccaccggcttttttttctttctcgccccccactggcccatccccctcattagctcagagcccactcaagctcttcccctcccaggctacccatcagctcggggaaggagagagctactccatgcccactgcgttccccggtctggccccaacctctccacacttagagggctctggcatccttgacacgcccgtcactagtaccaaagctcgctctggagctccaggtggaagcgaggggcgctgcgcagtttgcggcgacaatgcctcctgccaacactatggggtcagaacttgtgaaggttgtaaagggtttttcaaggttccgcgtagcccccggtggggcctattactggaaatggagcgcggctggccgcatcctatcgggacttgtggccttccactggggtcccctccttcctag

SEQ ID NO: 126974 - DNA, 1836 bp, synthetic construct
  misc_feature 1..1836: note = Description of Artificial Sequence: Synthetic coding sequence
  source 1..1836: mol_type = other DNA
atgtggctcgccaaagcttgctggtctatccagtccgagatgccgtgtatccaggcacagtatggaaccccggcaccatctcccgggccacgtgatcatcttgcttctgatcctttgacgccggaattcatcaaacctaccatggatctcgccagtcccgaagcagctcctgccgctcccacggctctgccctctttttcaacttttatggatggctacaccggcgagtttgacactttcctgtatcagttgcctggcactgtgcagccttgttcaagcgcaagtagcagcgcaagcagcacatccagctcttctgccacaagccccgccagtgcttcctttaagtttgaagatttccaggtttacgggtgttaccccggacccctttctggccccgtggacgaagctctgtcctcctccggttccgattattacgggtccccatgttccgcccccagcccctcaaccccctcgttccaacctccacagttgagtccgtgggacggaagttttggacacttttccccttcacagacatacgaaggtcttcgcgcatggaccgagcagctccctaaagcatctgggccccctcagcctcccgccttcttcagcttctcccctccgaccggccccagcccgagtctggctcagagccccctcaaactcttcccgagtcaggccacacatcagctcggcgagggggaaagctactcaatgccaactgcattcccgggtttagctcccacctcaccacatctggagggatccggaatcttggacaccccagtaacaagcactaaagctcgatcaggggctcccggtggatcagaaggcagatgtgccgtgtgcggcgataacgcttcttgtcagcactacggtgtgcgcacatgcgaaggctgcaaagggtttttcaaaagaacagttcagaagaacgctaaatacatttgtctggccaataaagactgtccagtggacaagagaaggcgcaatcgctgccagttctgtagatttcaaaaatgtctcgcggttggtatggtgaaggaggtggtgcgtaccgactccctaaaaggccgcagggggaggcttccttccaagcctaaacagccacccgacgcctcccctgcgaacctgctgacttccctggtacgcgcccacctggatagcggtccttccactgctaaactggattactctaagttccaggagctggtccttccacattttggcaaagaagatgccggtgatgttcaacagttctacgacctcctgtcaggatcacttgaggtcatccgcaagtgggccgagaagattccgggcttcgccgaactctcacccgctgaccaagatctgctcctagagtccgcattcctcgaactgttcattttgaggctggcttataggtctaagccgggcgaaggaaagctcatcttctgctctggactcgtgctccaccgcctgcagtgtgcccgggggtttggggattggatagacagcatattggctttctcccgctcactgcatagcttactcgtcgatgtccccgcctttgcctgtctgtcagctctcgtcctcatcacagatcggcatggcctccaggagcctaggcgtgtagaagagctgcagaaccgaattgcttcatgcctgaaggaacatgtcgccgccgtcgccggcgaacctcagcccgcctcatgtctgagccgtcttctgggcaaattgcccgagcttcggacattgtgcacacagggcctgcagcgaattttctatctaaaactcgaggacttggttccacccccacccatcatcgacaaaattttcatggataccttgcctttttag

SEQ ID NO: 126975 - DNA, 1797 bp, synthetic construct
  misc_feature 1..1797: note = Description of Artificial Sequence: Synthetic coding sequence
  source 1..1797: mol_type = other DNA
atgccttgcgtccaggcgcaatatggatccagtcctcaaggggcctctcccgcatcccagagctactcctaccactcgagcggggagtactctagcgatttcttgacccctgagttcgtgaaattctcgatggacctgaccaacacagagatcacggcaactacttccttgccctcctttagcactttcatggacaactactcgacaggctacgatgttaaacccccatgcttataccagatgccgctgtccggtcagcagagtagcataaaagttgaggacatccaaatgcacaattaccaacagcacagccacctcccgccacagagtgaggaaatgatgccccacagcgggtctgtatattacaagccaagcagcccaccaacacccacaactcccggatttcaggtccagcactcccctatgtgggacgatccaggttcactgcacaactttcaccagaattatgtcgcaaccacccacatgattgagcagagaaaaacccctgtgtccagactgtctctcttcagctttaagcagtcacctcctggcacaccagtgagtagctgtcagatgaggttcgacggccccctgcacgtaccaatgaatcccgagcccgctggtagccaccacgtagtggacggccaaacattcgctgtgccaaaccccataagaaaacccgcatctatgggctttcctgggttgcaaatcggccatgcgagccagctactggacacacaagtcccctctcccccttccagaggatcgccgtccaacgaaggcctgtgcgcagtctgtggagacaatgccgcatgtcaacactacggagtgcgaacttgcgagggctgtaaaggcttctttaaacggaccgttcagaagaatgccaagtacgtctgtttagctaataagaactgtccagtggataaaaggaggaggaataggtgccagtactgtcggtttcaaaagtgtctcgcagtgggaatggtgaaagaggtggtcaggaccgatagcctgaaagggaggcgcggccgtctcccaagcaagccgaaaagtccccaggagccatcgccaccttccccccccgtcagcttgatttctgccctggtgagagcccatgtagactctaaccccgcaatgacatcgttagattattccaggttccaagctaacccagactatcagatgtcaggagacgatactcagcacatccagcagttctatgacctgctaaccgggtctatggagatcatacgggggtgggccgaaaaaatccctggctttgccgacctgcctaaagcagaccaggacctgttgttcgaatcggccttcctggagctcttcgtgctgaggcttgcgtataggtccaaccctgtggaggggaagttaattttctgcaatggcgttgtgctccaccgtctccagtgtgtgcgaggattcggggaatggatagattccatagtggaattttccagcaatttgcagaacatgaatattgatataagtgcgttctcttgcattgcggccctcgccatggtgacggagcggcacggattaaaggaacccaaacgggttgaggaactccagaacaaaatcgtgaattgtctgaaggatcacgtgacgttcaataacggaggcctgaacaggcctaattatctctcgaagcttctgggcaagctccctgagctgcggaccctttgtactcagggacttcagcgcattttttatcttaaattagaggacctcgttccgccacctgccataattgataaactgttcctggataccctgcctttctag

SEQ ID NO: 126976 - DNA, 1797 bp, synthetic construct
  misc_feature 1..1797: note = Description of Artificial Sequence: Synthetic coding sequence
  source 1..1797: mol_type = other DNA
atgccatgtgtgcaggcacagtacggaagcagccctcagggagctagcccggcctcccagtcatactcgtatcattcgtccggcgagtactcttcggatttcttgacccccgagttcgtaaagtttagtatggatctgactaacactgaaatcaccgcaaccacgtccctgccttcgttttcaaccttcatggataattacagcacaggctatgacgtgaaacctccctgcctttatcagatgcccctaagcgggcaacagtcttctatcaaggtcgaggacatccaaatgcacaactatcaacaacactcacacctcccgccacagagtgaagagatgatgcctcactctggctccgtttactataagcctagtagtccgcccaccccgacgacaccaggattccaggtccagcactccccgatgtgggacgacccaggcagcctacacaacttccaccagaactatgtggccaccacgcatatgatcgagcagcgcaaaacgcctgtgtctagactgtccctcttctccttcaagcagtcacctcctggaacacctgtgtcttcttgccagatgcggttcgatggtccactgcatgtgccaatgaacccagaacctgcaggcagccaccatgttgtggacggtcaaacatttgcggttcccaaccctatccgcaagcctgcaagcatgggattccccgggctgcagatagggcacgcatctcagcttctggacactcaggttccttcccccccgagccgagggtccccaagcaatgaaggcctgtgtgccgtgtgtggagacaacgccgcttgccagcactacggcgtgaggacctgtgagggatgtaaggggttcttcaagcggacagtacagaagaatgcaaaatacgtttgcctcgctaacaaaaactgccctgtcgataaaaggagacgcaatcgatgccaatattgccgcttccagaaatgtctggccgtggggatggtcaaagaggtcgtccgaaccgattccttgaagggacggagaggccggcttccatccaagcccaaatctccccaggaaccaagtccgccctcgccacccgttagcctgatcagcgccctcgttcgggcccatgtggactcaaatcctgcgatgacttccctggattatagcaggtttcaggcaaatcctgattaccaaatgtccggtgacgatacacaacatatccagcagttttacgacttgttaacgggctcaatggaaattatacggggatgggctgagaagatccctggatttgctgatctgcctaaggcagaccaggatttgctattcgagtccgcattcctcgaactcttcgtgttgaggctcgcctaccggtcaaatccagtggaagggaagttaatcttttgcaacggagttgtactgcaccgactacagtgtgtacgcgggttcggcgaatggatcgattcaatagtagaattctcttccaacctccagaacatgaatattgatatctctgccttttcatgcattgccgcactcgccatggtcaccgagaggcacggattaaaggagcctaagagggtggaggagctgcagaacaaaatcgtgaattgtctgaaagatcatgttacttttaataacggaggcctcaacagacccaattatctgtctaagctcctgggaaagctgccagagctgcggacactatgtacccaagggctgcagcgcattttctatttaaaacttgaggatcttgtgcccccccccgcaataattgataaactgtttctggacaccctgcccttttag

SEQ ID NO: 126977 - DNA, 1179 bp, synthetic construct
  misc_feature 1..1179: note = Description of Artificial Sequence: Synthetic coding sequence
  source 1..1179: mol_type = other DNA
atggataattacagcactggttacgatgtaaagccaccatgcctctaccaaatgccattgtctggccaacagtcatcaattaaggtggaagacatccagatgcataactatcaacaacactcacacctgccaccccagtcagaagaaatgatgccacactctggctcagtatactacaaacctagtagcccacctacacccaccacaccaggttttcaggtacagcattcaccgatgtgggatgacccaggctccctgcataacttccaccagaattatgttgctaccactcacatgatagagcagcgtaagactcccgtctctcgcttatcattattctccttcaagcaatcaccccccggtacccctgtatcctcatgtcagatgcggttcgatggtccactacacgtgccaatgaaccccgagcccgcgggctcacatcacgtcgtggacggtcagacgttcgccgtgcctaaccctattcgaaagccagccagtatggggttccccggccttcagattggacacgcttcccagctcttggatactcaagttcccagccccccctctcgagggtctccctcaaatgaagggttatgtgccgtttgcggcgacaatgcagcatgccaacactacggtgtgaggacgtgtgaaggctgcaaggggttttttaaacgaactgtccaaaagaacgcaaagtacgtctgcctagccaataaaaattgtccggtggacaagcgtcgtaggaacagatgccaatactgccggtttcagaaatgtcttgcggtcggcatggtgaaggaggtggtcagaaccgactccctgaaggggagaagggggagactcccctctaaacccaagagcccgcaggagccttcacctccttctccccccgtttctctcatcagtgccctagtccgggcccacgttgattccaatccagcaatgacatccctcgattacagccggtttcaggcaaacccggactaccaaatgagtggcgacgacactcaacatatccagcaattctatgatctgttaaccggtagcatggagatcatccgcggatgggccgaaaaaattccagggtttgccgatttgcccaaggcggatcaggacctgcttttcgagagcgccttcctggaactgttcgttctgcggcttgcctataggatctag

SEQ ID NO: 126978 - DNA, 1179 bp, synthetic construct
  misc_feature 1..1179: note = Description of Artificial Sequence: Synthetic coding sequence
  source 1..1179: mol_type = other DNA
atggataactactcaactggctacgacgtaaaacccccctgtctgtaccaaatgcctctctccggccagcaatcgtctattaaagttgaggatatccagatgcacaattatcaacagcactcccatctgcccccccagtccgaggagatgatgccccactccgggtcggtttattataagccttcctccccccctacaccgactactccaggctttcaggtgcagcactcccccatgtgggatgaccctggctccctgcacaatttccaccagaactatgtagccactacccatatgatcgaacaacggaaaacaccagtgtcacgcttaagcctattttccttcaagcagagtccccccggcactccagtgtcaagctgccagatgagattcgatgggcccctgcatgtgccgatgaatcccgaacccgctggaagccaccatgttgtcgatgggcagacttttgcagtacctaatccaatccgaaagcctgcttccatgggctttcccgggctgcagataggacatgcatcacagctgctggacactcaggtgccctctccaccttccaggggctcacccagcaacgagggactgtgtgccgtctgcggcgacaatgcggcgtgtcagcattacggtgtgagaacctgcgagggctgcaaaggcttctttaaacgtactgtgcagaaaaatgcaaagtacgtctgcctagctaataaaaactgtcccgttgacaagagacgtaggaacaggtgtcagtactgtaggttccaaaaatgccttgcagttggcatggtgaaggaggttgtacgcactgattctcttaaagggcggagaggacgtctcccaagcaagccgaagtcccctcaagagccatccccaccgagcccaccagtcagcctaatctctgcgcttgtccgggctcatgtggactcgaatccagccatgacatctctggactattccagattccaggccaatcccgactaccagatgtccggagacgacacacagcatattcagcagttctacgacctgttaaccggttctatggagattattcgaggatgggcagaaaagatcccaggtttcgcagacctgccaaaggcagatcaggacctcctcttcgagagtgcctttttggaactgtttgtacttaggttggcatataggatttag

SEQ ID NO: 126979 - DNA, 777 bp, synthetic construct
  misc_feature 1..777: note = Description of Artificial Sequence: Synthetic coding sequence
  source 1..777: mol_type = other DNA
atgccctgcgtgcaggcacaatatggatcctcccctcagggcgcatctcccgcctctcagtcgtattcctaccacagctccggagaatattctagcgactttcttacccccgagttcgtgaagttttccatggacttgaccaatacggaaattactgccaccacaagcctgccatcattcagcacattcatggacaattattcgaccgggtatgatgtgaagccaccgtgcctgtatcagatgcctttgtctggacagcagtcttcaattaaggtagaagacatccaaatgcataactatcaacagcactcgcatttgccgccccagtctgaggaaatgatgccacactccggctctgtgtattacaagccaagctcccctcctactcccaccacgccaggttttcaggtccagcattccccgatgtgggatgatcctggtagcctccacaacttccatcagaattatgtggctactacccacatgatcgaacagaggaaaacccccgtctctcgcctttcgttgttcagctttaaacagagtccccctggcactcctgtaagtagttgccagatgagatttgacgggccgctgcatgtcccgatgaaccctgagcccgctggatcccaccatgtggtggacggccagaccttcgcagtgccgaaccccatccgcaagccagccagcatggggttccccgggcttcaaataggccatgccagtcagctgctcgatacacaggtgccttctcctccctcaagggggtcaccttcttag

SEQ ID NO: 126980 - DNA, 1608 bp, synthetic construct
  misc_feature 1..1608: note = Description of Artificial Sequence: Synthetic coding sequence
  source 1..1608: mol_type = other DNA
atggataattactcaacaggttatgatgtgaaacccccttgtttataccagatgcccctatctgggcagcaaagcagcatcaaagtggaggacatccagatgcacaactatcaacaacattctcaccttcctccacagagtgaggaaatgatgcctcattctggatccgtttattataagccaagttctcctccaactcctacaactcccgggttccaggtacagcattccccaatgtgggacgatcctggatctttgcacaacttccaccagaattatgtcgccactacccacatgattgaacaaaggaagacaccagtatcaaggctgagcctgttctcattcaaacagagcccccccggcactccagtaagcagttgccagatgaggtttgacgggcccctgcatgtgccaatgaatccagagccggcaggcagccatcacgtagtcgatggacaaacattcgccgtccccaaccctattagaaagccggcaagcatgggcttccctggccttcagatcgggcacgcgtcccagctcttggacacccaggtaccaagccccccaagtaggggctctccttccaacgagggtctgtgtgccgtttgcggcgacaacgcagcctgccagcactatggcgtgcgaacatgcgagggctgcaaaggtttcttcaagcgtactgtgcagaagaatgccaagtacgtgtgcctcgcaaacaagaattgccccgtggataagcgccgacggaacaggtgccagtattgtcgcttccagaagtgtctggccgtagggatggtgaaagaagtggtgcgaacagattctctgaaggggagacgcggccgtctgcctagcaagcccaagtcgcctcaggagccatctccacccagcccacccgtctctctgattagtgcgctagtgcgtgctcacgtggacagtaaccccgcaatgacaagtctggactactcccgtttccaagcaaatccagattaccaaatgagcggcgacgatacccagcatatccagcaattctatgatttactcaccggcagcatggaaattattagaggatgggccgagaagattcccgggttcgcagacttgcctaaagccgaccaggatctgctctttgagagcgcgtttctcgagttgttcgtgctcagactggcataccgctctaaccctgtagagggtaagctaatcttttgcaacggcgtagtgttgcacagactgcagtgcgtgcgtggattcggcgaatggattgatagtatcgtggagttctcatcaaaccttcagaatatgaatatcgatatttctgcctttagctgcatcgcggccctggccatggttactgagaggcatggtctcaaggaacccaagagagttgaggaattgcagaacaaaattgtgaattgtctcaaggaccacgttaccttcaacaatggggggctgaaccgaccaaattacttgtctaaattgctagggaagctccccgagctgaggaccctctgcacccagggccttcagcgaattttctatcttaaattagaggatcttgtgccgccacccgctattattgacaaactttttctggatacccttcccttctag

SEQ ID NO: 126981 - DNA, 1830 bp, synthetic construct
  misc_feature 1..1830: note = Description of Artificial Sequence: Synthetic coding sequence
  source 1..1830: mol_type = other DNA
atgaacgaagaccggcgaggggagctgttgacaatgccctgtgtccaggcccagtatggatcctcaccacaaggggcgtctcccgccagccagtcctactcctatcatagctcaggcgaatactcttcggactttctgacccctgaattcgtgaagttttccatggacctaaccaataccgaaatcacggcgacgacatcactgccctctttcagtacattcatggataactacagcacggggtatgatgtgaaacctccttgcctctaccaaatgcctctcagcggccagcaaagttctattaaggtcgaagatatacagatgcacaactatcagcaacactcccacttacccccacagagtgaagagatgatgccgcactccgggtccgtctactacaagccttcttctccacctactcccacaactcctgggtttcaggtccaacacagccctatgtgggacgatccgggaagtctgcacaattttcaccaaaactacgttgctacaacccatatgattgaacagagaaagactcctgtgtcacgtctaagcctgttttccttcaagcagtcccctcccggcactcccgttagttcctgccagatgagatttgacggccccctccacgtgccaatgaatcccgagcccgcgggctctcaccacgttgtagacggacagacatttgcagttcctaaccccataaggaaaccagcctcgatggggttccccggattgcagatcggacacgcctctcagttgctcgacacacaggtgccctctcctccctccaggggaagtcctagcaatgaggggctatgcgcggtgtgcggggacaacgcagcttgtcagcactacggcgtaaggacatgtgagggatgcaaaggcttctttaaaagaactgtccagaagaatgccaagtacgtctgcctggcaaacaaaaattgtcctgtggataaacgaagaagaaataggtgtcaatattgcaggtttcagaaatgtctcgcagtaggcatggtaaaggaggtggtgcggactgactcattgaaagggcggcgcggcagactgcctagtaagccaaagagcccacaggagccgagcccccctagccccccggtaagtctcataagcgcgttagttcgggcacacgtggattctaaccccgcaatgacttctttagactactccaggtttcaggcaaacccggactatcagatgtccggggacgacactcagcatatacaacagttctatgacctcctcactggcagcatggagatcatccgaggttgggccgagaaaattccaggattcgccgatttgccgaaggctgaccaggatttgctctttgagtctgcgtttcttgagttgtttgtgctccgcctagcttacaggtccaaccctgtcgagggcaagctgattttctgtaatggggtggtgcttcatcgtctccaatgtgtgcgaggttttggagaatggattgattcaatcgtcgaattctcttctaatctgcagaatatgaacatagatatcagcgctttctcctgtattgctgccctcgctatggttaccgagcgccatggactcaaagagcccaaacgtgtggaggagctgcagaataaaattgtgaattgcctgaaagaccatgtaacgttcaacaacggcgggctaaaccgccctaattacctcagtaagcttcttggcaagctgccagaactgcggactctttgtacacaagggcttcaaaggattttctacctaaagttagaggatttggtgccgcccccagctatcatcgataagctgtttcttgatacacttccgttttag

SEQ ID NO: 126982 - DNA, 738 bp, synthetic construct
  misc_feature 1..738: note = Description of Artificial Sequence: Synthetic coding sequence
  source 1..738: mol_type = other DNA
gtggaagaggagggcgatgtttctaatcgcggcgtcgaactccttcagctagaaccagacgaagatcaggtacgcgcccggattctcggctgcttgcaggaaccaacaaagtccagacctgatcagccagccgcctttggccttttatgcaggatggcggatcaaacgttcatcagcattgtggattgggcccgtagatgtatggtttttaaagagctcgaggtggcagatcagatgacactgcttcagaactgttggtctgagctgctggtgtttgatcacatctatcggcaggttcaacatggaaaagaaggcagcattttgttggtgaccggacaggaagtggaactaacaaccgtggcaacccaggccggttccctgttgcactccctggtcctgcgcgcgcaggagttggtccttcagctactggccctgcagttggacaggcaagaattcgtgtgcctgaagtttattatcctattttctcttgatttgaagtttctgaacaatcacattctagtgaaagacgcacaggagaaggcaaacgcagccctgttggattacactctgtgccattaccctcattgtggcgataaatttcagcagttgctgctgtgcttggtggaagtgcgggccctgtcgatgcaggcgaaggaatacctgtaccacaaacatctcggtaatgaaatgcctagaaacaacttattgattgaaatgctgcaggcaaagcagacctag

SEQ ID NO: 126983 - DNA, 1386 bp, synthetic construct
  misc_feature 1..1386: note = Description of Artificial Sequence: Synthetic coding sequence
  source 1..1386: mol_type = other DNA
atggattatagctacgatgaagatctggacgagctgtgtcctgtgtgtggtgacaaggtttccggttatcactacggactcctgacgtgtgagtcatgtaagggatttttcaaacggaccgtgcaaaacaacaagcattatacatgtaccgaatctcagagctgcaagatcgacaagactcagaggaaaaggtgtcctttctgccgcttccagaaatgcctgaccgtcgggatgcggctcgaggctgtgcgggccgatagaatgagaggtggccgaaacaagttcggccctatgtacaagagggaccgggccttaaagcagcagaaaaaagcccagattcgcgcaaacggctttaagctggagaccggcccccccatgggcgtgcctcctcccccaccacccgcccctgactatgttctcccaccaagccttcacggacctgagcccaagggactggccgctggcccccccgcaggccctctgggcgattttggggcacctgctttaccaatggccgttccaggtgctcatgggcccctggccggctacctgtaccccgcatttcctggtcgagcgattaaatctgaatatcccgaaccctacgcctccccacctcagcctggcctgccctatggttaccctgagcccttttcaggagggcccaatgtccctgagctcatccttcagctattgcaactggaacccgacgaggatcaagtgcgggcacgaatcctcggctgtctgcaggaacctacaaaatcaagaccagaccagccagcagccttcgggttgctctgccgcatggcagatcagacttttatcagcatagtggactgggctaggagatgtatggtttttaaagagctagaggtggcagaccagatgaccctgcttcagaattgctggtccgagttactggtgtttgaccatatctaccgccaggtccagcatggaaaagagggatcgatactgcttgttactggccaggaggtggagctgactacagtggcaacgcaggccgggagcctgctgcattccctggtgttaagagcccaagaactggtgttacaactcctcgccttgcagctggatagacaggagttcgtctgcctgaaattcattatactctttagcctcgacctgaagttcctgaacaaccatattctggtgaaagacgctcaggaaaaggccaacgcagctctgctcgattatacattgtgtcactacccccactgcggcgacaagttccagcaacttctcttgtgtctggtggaggtcagggcgctgtcgatgcaggccaaagagtacctctatcataaacacttgggcaacgagatgcctcggaataacctgctcatcgaaatgctgcaggccaaacaaacatag

SEQ ID NO: 126984 - DNA, 537 bp, synthetic construct
  misc_feature 1..537: note = Description of Artificial Sequence: Synthetic coding sequence
  source 1..537: mol_type = other DNA
atggactactcatatgatgaggatctcgacgagttatgcccagtgtgtggggacaaggttagtgggtatcactatgggctgcttacgtgtgaatcttgtaaaggcttcttcaaaaggacagtgcagaacaacaagcattacacttgtacagagtcgcaatcctgcaagatcgataagactcagcgcaaacggtgtccattctgcagatttcagaaatgccttactgtaggaatgagattagaggctgtgcgcgcagatagaatgcgtggggggcggaataagttcggccccatgtacaaacgcgatagggccctgaaacaacaaaaaaaggcacagattcgcgctaacggattcaaactcgaaaccgggccccccatgggcgtgccccctccaccaccaccggcccctgactatgtgttgcccccctccttgcacgggcctgagccaaagggtctcgccgccggccctccagccgggcctttaggcgacttcggcgcaccagcactgcctatggccgtccccggggctcacggctag

SEQ ID NO: 126985 - DNA, 972 bp, synthetic construct
  misc_feature 1..972: note = Description of Artificial Sequence: Synthetic coding sequence
  source 1..972: mol_type = other DNA
gatctcgaggaactttgtcctgtgtgcggagataaggtgagcggctaccactatggccttctgacctgcgaaagctgcaagggcttcttcaagcggacagttcaaaataacaagagatacacatgcatcgaaaaccaaaattgtcagatagacaagacgcagagaaagagatgtccttactgccgatttcagaagtgtctgtctgtcggcatgaagttggaagccgtgagggctgatcgcatgcgagggggtcggaacaaatttggcccaatgtataaaagagacagggctctgaagcaacaaaagaaagctctgatacgggcaaatgggctgaagctggaggccatgtcccaggtcattcaggcaatgcccagcgacctgacaatttctagcgctatccagaacatccactcagcctccaaggggcttcccctcaatcacgccgctctgccccctacagactacgatcgatctccgtttgtgacttctccgatttctatgactatgcccccgcacggatccctgcaggggtatcaaacctatggacattttccatctagggccatcaaatctgagtatcctgacccatatacgtctagccccgaaagcatcatgggctattcatatatggacagctaccagacttcgtcaccggcatcaatcccacatctcatcctcgaactgcttaagtgcgagccagacgaaccccaggtgcaggctaagataatggcttatttacagcaggaacaagcgaaccgttcaaagcacgagaagttgtcaacatttggcctcatgtgtaagatggccgaccagacccttttctccatcgtggagtgggccagaagtagcatcttcttccgggaactgaaagggttgaccttatccccttccctcgagtgttccggcagctggctcatggcaacctccacatcgtgtatccaggtgattcgactgcctcaaccccccgaatag

SEQ ID NO: 126986 - DNA, 1488 bp, synthetic construct
  misc_feature 1..1488: note = Description of Artificial Sequence: Synthetic coding sequence
  source 1..1488: mol_type = other DNA
atgtcatcaaattccgatactggcgatctgcaggaaagcctcaagcatggtttaactccgatcgtctcccagtttaaaatggtaaactactcctatgacgaagacctggaagaattatgccctgtttgcggagataaggtgagcggataccattatgggctgcttacatgcgagagttgtaaaggattcttcaaaaggacagtgcagaataacaagagatatacgtgtattgagaatcaaaactgccaaatcgataaaacacagagaaaacgctgcccatattgtcgctttcagaagtgtttgagcgttgggatgaagctggaggcagtgagagccgataggatgcgtggaggaaggaacaagtttgggccaatgtataagcgcgaccgcgcattaaagcagcagaaaaaagcactgatccgcgcaaacgggctgaagctcgaggcaatgagtcaggtcatacaagccatgccttctgatctgaccatctcctccgccatacagaatatccatagcgcttctaagggcttgcccctcaatcacgccgcactccctcccacggactacgatcggagtcccttcgtgacttccccaatctctatgactatgccaccccacgggtcattgcagggataccagacctacggacattttccatcaagggctattaaaagtgagtaccccgacccatacacgagttcacctgagtccattatgggttattcctacatggactcctaccaaacttcctcaccagcttctattcctcacttgattttggagttgctcaaatgcgagcccgatgaaccacaggtacaggctaagatcatggcatacttacagcaagaacaggccaatcggtccaaacacgagaaactctcgactttcggcctgatgtgtaagatggccgaccagaccctattctccatcgtagagtgggcccgcagttcgatctttttccgggaactcaaagtggacgatcagatgaaactcctccagaactgttggagcgagcttctgatccttgaccacatctataggcaagtggtgcatgggaaggagggatctatattcctggtgactggccaacaggttgactactctatcatcgcctctcaggcaggcgccactctgaataatttgatgagccacgcacaggagctcgtggcaaagctgagatcccttcagttcgatcagcgggagtttgtgtgtttaaagttcttggtgcttttcagcctggacgttaagaacctagagaattttcaactggtcgagggcgtgcaagagcaagtgaatgccgccctgttggattatacaatgtgcaactatccacagcagacggagaagtttgggcagctgctcctaagactcccagagatcagagcaatatcaatgcaggcagaggaatacctgtactacaaacatctgaatggcgatgtgccttataacaatctcctgatagaaatgcttcacgctaagcgtgcttag

SEQ ID NO: 126987 - DNA, 1134 bp, synthetic construct
  misc_feature 1..1134: note = Description of Artificial Sequence: Synthetic coding sequence
  source 1..1134: mol_type = other DNA
taagatctcgaagagctttgccccgtgtgcggtgacaaagtgtccggataccactacggtctactgacatgtgaaagctgtaagggctttttcaaaaggaccgtgcaaaataacaaaaggtatacctgtattgagaaccagaattgccagattgacaagacacagcgtaagaggtgcccatattgtaggtttcaaaaatgtctttctgtcggtatgaaactggaagcagtccgagcagatcgcatgcggggcgggcgaaacaaattcggtcctatgtacaagcgggacagggccctgaaacagcagaagaaggcgctgattcgcgcaaacggcctaaagctggaggctatgtcccaggtgattcaagcgatgccgtccgacttgaccatctcttccgctatacaaaacatccactctgcatccaagggtctgccactgaaccacgccgctttaccacctaccgactacgataggagcccttttgtgacttccccaatcagtatgaccatgccaccccacggatcgttgcagggctatcagacctacggacatttcccctcaagggccataaagagtgagtatccagatccctatacctctagtcctgaatcaattatggggtatagttacatggacagctaccagacttcaagcccagccagtataccccacctaatcttggagttacttaagtgcgaacctgatgagcctcaggtccaggctaagattatggcctatctgcagcaggagcaggccaacagatctaagcatgagaagctgtctaccttcgggctgatgtgcaagatggccgatcagacgctgttctccatagttgagtgggcccgcagtagcatcttcttcagggagctgaagggcctgactctttcgccaagcctggagtgttcgggaaccattctcgctcacggcaatttgcatttactgcatagctccgattctcctgcctccgcaagtagagtcgctgggatcacaggggtacaccacaatacccacttgatattcgtgttcctggtggaaatggggttttgccatgtcggccaagccggactcaagacccccgacctccgcgtcatttgcctgccgagacccccaaaagtgcttggactctgggcatag

SEQ ID NO: 126988 - DNA, 1626 bp, synthetic construct
  misc_feature 1..1626: note = Description of Artificial Sequence: Synthetic coding sequence
  source 1..1626: mol_type = other DNA
atgagttctaactctgacacaggtgatctccaggaatccctgaaacacggccttacccctattggcgccggactccctgatcggcatggttcgccgatacctgcccgaggtcggttagtcatgctcccaaaagttgagaccgaagccttgggcttggcaaggtcccatggcgagcaaggacagatgccggagaacatgcaggttagccagtttaagatggtcaactatagctatgatgaggacttggaggagctctgccctgtgtgcggtgataaggtgtctggttaccactacgggctgctgacatgcgagtcatgcaaaggattctttaagaggacagtgcagaataataagcgatatacttgcatcgaaaatcagaattgccagatagacaagactcagcgaaagaggtgcccatattgtaggttccagaaatgcttgtcggtcggaatgaagttggaggctgtccgggccgatcgaatgaggggaggcagaaacaaatttggacccatgtacaagagagatcgcgcgttaaaacagcagaagaaggctctcattcgggcaaacggactgaaacttgaagccatgagccaagttatccaggccatgcctagcgacctgactatcagctctgccatccagaacatccatagtgcgagtaaaggattgccgcttaaccacgccgccttgccacccaccgattacgataggtctccgttcgttactagccccattagtatgaccatgcctccacacggtagccttcagggataccaaacttacggccactttcccagcagggctatcaagagcgagtacccagatccttacacatcatcacctgaaagtattatgggctactcctacatggattcttatcagacatctagccccgccagcattccgcatcttattctggaactcctgaagtgtgaaccggatgagccacaggtgcaggccaagatcatggcttacctgcagcaggagcaagccaatcggtcgaaacacgagaagcttagcactttcggtttgatgtgcaaaatggctgaccagacattgttcagtatcgtggagtgggccagaagttcaatcttctttagggagcttaaggtggatgaccagatgaagctgcttcagaattgctggtccgagctactgatactcgaccacatctaccgacaggtggtccatggcaaggaggggtcaatttttcttgtaaccgggcaacaggtggactattccatcattgcgtcacaggccggagccactctcaataacctgatgtcacatgctcaggagctcgtggctaaactacgttccctgcagttcgaccagagagagttcgtgtgcctcaagttcctcgtgttgttttcgttagacgtaaagaatctcgagaacttccaactggtggagggcgttcaggagcaggtgaacgccgctctgctggactataccatgtgcaattatccccagcagaccgagaagtttgggcaactgttgttgaggttgcccgagatcagggccatctcgatgcaggcggaagagtacctgtattacaaacaccttaacggagacgttccttacaataacctgttaatcgaaatgcttcacgctaagcgtgcgtag

SEQ ID NO: 126989 - DNA, 216 bp, synthetic construct
  misc_feature 1..216: note = Description of Artificial Sequence: Synthetic coding sequence
  source 1..216: mol_type = other DNA
tgatctctgaaacacggtctcactcccattgatcgcggcaattgtagaagcggctgtttcagtttcgcagctaccctgaggcagcgcagtctgctgaccagctgtgctggcctgccagatcgccacggaagtcccattcccgcccgaggccgacttgtgatgttgcccaaagttgaaaccgaggctctaggcctggctagatcacatggcgagtag

SEQ ID NO: 126990 - DNA, 66 bp, synthetic construct
  misc_feature 1..66: note = Description of Artificial Sequence: Synthetic coding sequence
  source 1..66: mol_type = other DNA
atgtcaagcaactccgatacaggggacctccaagagtccctcaagcacgggctcacgccaatctag

SEQ ID NO: 126991 - DNA, 249 bp, synthetic construct
  misc_feature 1..249: note = Description of Artificial Sequence: Synthetic coding sequence
  source 1..249: mol_type = other DNA
atgagttcgaattctgatactggggaccttcaggaatctctgaaacacgggctgactcccatcgacaggggaaattgtcgcagtggctgcttttcatttgcggcaacactgcggcagcgatctctcttgacgtcctgtgcaggcctgcccgaccgacacggctcccctattccagctagaggcagactcgtgatgcttccaaaggtggagacagaggcactcgggcttgcacgctcacatggcgagtag

SEQ ID NO: 126992 - DNA, 1410 bp, synthetic construct
  misc_feature 1..1410: note = Description of Artificial Sequence: Synthetic coding sequence
  source 1..1410: mol_type = other DNA
atggttaattatagttatgatgaggatctcgaggagctgtgccctgtgtgcggcgataaagtatctggttatcattatgggctactgacttgcgaaagttgtaagggattctttaaacgtacagtgcagaacaataagcgctacacctgcatagagaatcagaattgtcagattgacaaaacacagagaaagcgctgtccttattgccgtttccagaaatgtttaagcgtaggcatgaaactcgaggcagtgcgagcagatcgcatgcggggtggtcgaaataaatttggaccgatgtacaagcgggacagagccttgaaacagcagaagaaagctctgattagagccaacggacttaagcttgaagcaatgagtcaagtgattcaggcaatgccctcggatctcacgatttcgtcagctattcagaatatacattcagcttccaaagggttgcccttgaatcacgccgcgcttccccctaccgattacgacagatcaccttttgttacttcccccatctctatgactatgccacctcacggatcactccaaggctatcagacctacggccattttccgagtcgggccataaaatcagagtatcctgacccctacacaagctctccagaatccatcatgggctactcttatatggacagctaccagacttcatctcccgcctcgattcctcatttgatattggagctgctgaagtgcgaaccagacgaacctcaggtccaggcaaagatcatggcctacctgcagcaagaacaggccaaccggtcaaagcacgaaaaactctccacgtttggactgatgtgcaaaatggctgaccagaccttgttctccattgtggaatgggcccgaagctctatcttttttagagaacttaaagttgacgaccagatgaaactcctgcagaattgctggagcgaactcctgatcctggaccacatctatcgccaagtggtgcacggtaaggagggctctatctttcttgtgacaggccaacaggtggattactctatcatcgcctctcaagctggcgccacattgaataacctgatgagtcacgcacaggaactggtggccaaattacggagccttcagttcgatcaacgagaatttgtctgtctgaagtttcttgtattattttcccttgacgtaaaaaatctcgaaaacttccagctcgtggagggcgtccaagaacaggtaaacgcggcactccttgactacacaatgtgtaattacccacagcagaccgaaaaatttggacagctgctgctgagattgcctgagatcagggccatttccatgcaagccgaggaatacctgtactacaagcacctcaatggcgacgtcccttataacaacttgctgattgagatgctgcacgcaaagcgagcatag

SEQ ID NO: 126993 - DNA, 681 bp, synthetic construct
  misc_feature 1..681: note = Description of Artificial Sequence: Synthetic coding sequence
  source 1..681: mol_type = other DNA
atgctcttgcgcctggtgtcaaactcatggccgcaggtaattttaccccctagaccccccaaggtcctgggcctgcaagcgccgaggcgagcccgtaagcgagcagaggggacagcttcatcaaatgttttcagtatgtttgaccagtctcagattcaagagttcaaagagtccttagccctctcaccccgcctcgagcggaacggcatgatctcagctcattgtaacttatgcctcacaggaagcagcaactctccagctagcgcatcccaggcctttacgataatggatcagaatcgagacgggttcatcgataaggaagacctcagggacacattcgctgcccttggccggatcaacgtcaaaaacgaagaactagaagctatggttaaagaagctcccggacctattaactttaccgtgtttctaaccatgtttggggagaagctgaagggaaccgacccggaggagaccatcctgcacgcctttaaagtgtttgacacagagggcaagggcttcgtgaaggcggacgtgatcaaggaaaagctgatgactcaggcggatagattcagcgaagaggaagtcaaacagatgttcgccgctttccctcctgatgtgtgtgggaatctggactatcgtaatctctgttacgttataacccatggcgaagaaaaagactag

SEQ ID NO: 126994 - DNA, 1569 bp, synthetic construct
  misc_feature 1..1569: note = Description of Artificial Sequence: Synthetic coding sequence
  source 1..1569: mol_type = other DNA
atggaagaacacggggttacccagaccgagcatatggcaactatcgaggctcacgccgtcgcacagcaggtccagcaggtgcatgtagctacgtacaccgagcattctatgctgagcgccgacgaggattccccatcaagtcctgaagatacttcttacgacgattctgacatcctgaattctacagctgccgacgaggtaaccgcgcacctcgctgccgcaggcccagtcggcatggcagccgctgccgccgtcgcaacaggcaagaagaggaagaggcctcacgtgttcgaatctaacccctcaattcgtaagcgacagcagacacggctcctgaggaagctccgggctacccttgacgaatacacgactagagtaggccagcaggctatcgtactctgcatcagcccttcgaagcccaatcctgtttttaaggtgttcggcgccgcgcccctggaaaacgtggtccgaaagtataagagtatgatcctggaggacctggagtcagccctcgctgagcacgcccctgcacctcaagaagtaaactcagagctgcctccactcacaattgacggaatcccagtgtccgtggacaaaatgacacaggcccaactgagggctttcataccagagatgctgaaatactctacggggagggggaagcccgggtggggtaaggaatcatgtaaacccatatggtggccggaggatatcccatgggcaaatgttaggtccgacgtgaggaccgaggaacagaaacaaagagtatcatggacacaggccctccgcaccatagtgaaaaactgctataagcagcacggaagggaggatctattatatgcgttcgaggaccagcaaacccagacccaggcaaccgctactcatagcatcgctcatctggtgccgtcgcaaacagtggtacagacttttagtaatcccgacgggaccgtgagtctgatccaagtgggcacaggcgctacagtggcgacgctcgccgacgctagcgagctgcctacgacagttaccgttgcacaagtgaattacagtgccgtggctgatggcgaggtggagcagaactgggccacactccaaggcggcgaaatgacaatccaaactactcaggcgagcgaggctacccaggcagtcgcatctctcgccgaagcagccgtggccgcctctcaggagatgcaacagggtgctacggtcactatggcactcaattccgaggccgcggcacacgccgtggccaccctcgcggaagcaacgctccaaggcggggggcagattgtgttaagtggcgagacagccgctgcagtcggagctttaaccggtgttcaagacgcaaacggcctgtttatggcagacagagctggccgaaaatggattctgacggataaagcgactggactggtgcaaataccagtatcaatgtatcaaactgttgttacatccctcgcgcaggggaatggtcccgtgcaggtggccatggcaccagttaccaccagaataagcgactccgccgtcaccatggatggacaagcagtggaggtcgtaactttggaacagtag

SEQ ID NO: 126995 - DNA, 1314 bp, synthetic construct
  misc_feature 1..1314: note = Description of Artificial Sequence: Synthetic coding sequence
  source 1..1314: mol_type = other DNA
atggaggaacacggagtaacccaaaccgaacatatggctacaatcgaagcgcatgccgtggcacaacaggtccagcaggtgcacgtcgcaacttacactgagcactccatgctaagcgctgacgaagacagccccagttcccccgaagacaccagctatgacgattccgacatcctcaactctaccgcagcggatgaggttacagcccacctcgctgccgcaggacccgttggcatggccgcagctgcagcagtcgcaacaggaaagaaacggaagagaccccacgtgtttgagtcaaaccctagcatcagaaaaaggcagcagaccaggttgctgagaaagctcagggcgaccctcgatgagtacacaacacgggtcggccagcaggctatcgtgctgtgtatctcccctagcaagccgaatcccgtctttaaagtattcggagccgcacctctggaaaacgtcgtacggaaatacaagagcatgattcttgaggacctcgagtcagcccttgctgagcacgctcctgcaccccaagaggtgaactcagagctgccacctctgacgatcgacggcatccctgtgagcgtggacaagatgacacaagcgcaactaagagccttcattcctgaaatgctgaagtatagcaccgggcggggcaagcctggctggggtaaggaatcatgtaagccaatttggtggcctgaggacatcccttgggctaatgtccggtccgacgtgaggactgaggaacaaaagcagagggtggggaccggagccacagtagccacactggcagacgcgtctgagctgcctacaactgtgactgtcgcccaggttaactactccgctgtggccgatggggaggtggagcagaactgggccaccctgcaaggaggcgaaatgacaatccagactactcaggcaagcgaggcgacacaggccgttgcttccctggccgaggcagcagtcgctgcctcccaagaaatgcagcaaggggccaccgtcaccatggctttgaatagtgaagctgcagctcacgccgtcgcaactcttgccgaagctactctccagggggggggacagatcgtcctcagcggcgaaacagctgccgccgtcggcgcactaacgggggtccaggatgctaatgggcttgtccagatacctgtctccatgtaccagacagtggtcacctcactggcccaaggcaacgggcccgtgcaagtggcgatggcgcccgttacaaccaggataagcgacagcgccgtgacgatggacggccaggccgtggaggtggtgacattggaacaatag

SEQ ID NO: 126996 - DNA, 1512 bp, synthetic construct
  misc_feature 1..1512: note = Description of Artificial Sequence: Synthetic coding sequence
  source 1..1512: mol_type = other DNA
atggaggaacatggcgttactcagactgaacacatggcaacgattgaagcgcacgccgtggctcagcaggtccagcaagttcatgtcgctacttatactgaacacagcatgctgtccgctgacgaggactcaccctcctctccggaagataccagctatgatgactccgatatcctaaatagtactgccgcagacgaagtgactgcacacctcgccgccgctgggcccgtgggcatggctgcagctgcagccgtcgcaactgggaaaaaacgaaagagaccccacgtcttcgagagtaatcctagtattaggaaacggcagcagactcggctgcttcgcaaactgcgtgccaccctcgacgagtatacaaccagggtaggacagcaggccattgttctgtgcattagcccctcgaagccaaacccggtgttcaaggtattcggcgctgcccctctggagaacgtagtgcggaagtataagtcaatgattctcgaagacctcgagtccgcactggcggagcatgcccctgcaccccaggaagtcaacagtgagctgccaccattaaccatagacgggattcctgtaagcgtggacaagatgacacaggctcaactccgggcattcatacctgagatgctgaaatatagtacaggtcggggcaagcccgggtggggaaaagaaagctgcaagcccatatggtggccagaggatataccctgggctaacgttagatctgacgtgagaacggaagaacagaaacagcgcgtgtcgtggacacaggctctccggaccattgttaaaaattgctacaaacaacatggccgcgaggatttactctacgcgttcgaggaccagcagacccaaactcaggcaacggcaactcacagtatcgcacatctggtaccaagccaaaccgtcgtgcagaccttttccaaccctgatggaactgtctctttaatccaggtggggacaggtgctaccgtagctacattggccgacgcatcggagttaccaaccactgtgaccgttgcccaagtcaattatagtgcagtggccgacggcgaagtagaacagaactgggcaaccctccaggggggagagatgaccatccagaccacacaagcctccgaggccactcaggctgtggccagcctcgctgaggccgccgtggccgccagtcaggagatgcagcaaggtgccactgtgacaatggcccttaatagcgaagcggcagcccacgccgttgcaacgttggccgaggccaccctgcagggaggggggcagatcgttctatccggtgagacagccgccgctgtcggcgccctgaccggggttcaggatgccaacgggctggtgcagatccccgtttctatgtaccagactgtggtcaccagtctggctcagggcaatggccccgtgcaggtcgccatggcgcccgtgactactagaatctccgattccgccgtgactatggatggccaggccgtggaggtggtaacacttgagcaatag

SEQ ID NO: 126997 - DNA, 1569 bp, synthetic construct
  misc_feature 1..1569: note = Description of Artificial Sequence: Synthetic coding sequence
  source 1..1569: mol_type = other DNA
atggaagaacatggagttacgcagacagagcacatggcaaccatagaagcccatgccgtggctcagcaggtccaacaagtgcatgtagctacatacacagagcactctatgctttctgccgacgaggattctccatcatcacctgaagatacatcatacgatgacagcgacatccttaattcaacggccgcagacgaggtcactgcacacctggccgccgcagggcccgtcgggatggcggcggccgcggctgtggctacaggtaagaagcgcaagaggccccacgtgttcgaaagcaaccctagtattcgcaagaggcagcagacgcgcctgcttcgcaagctccgtgcgacactggacgagtacaccactagggtggggcagcaagctattgtcctctgtatttctccttcaaagcccaacccagtgtttaaggttttcggcgctgctcctttggagaatgtggtgcgcaagtataaatccatgatactggaagacctggagtcagctctggccgagcatgcgcccgcgccccaagaggtgaactcggaactaccaccgttaactatcgatggtatccctgtgagcgttgataagatgacacaggcacaactgcgggcgttcatccctgaaatgttgaagtatagtacaggtcgcggcaagcccggctggggaaaagagtcatgcaagccgatctggtggcctgaggatatcccgtgggctaatgtgcggagcgacgttagaactgaggagcagaagcagagggtcagttggacccaggccctgcgcacaatagttaagaattgttacaaacagcacgggagggaggacctcctatacgccttcgaagaccagcagacccagacacaggccacagctacacatagcattgcccatctggtcccttcccagacagtggtccaaacatttagtaaccccgatggcaccgttagcttgatccaggtgggtactggtgccacagtggccacgttggccgatgcatcggagctcccaactacagtgactgtggctcaggttaactactccgctgtagctgatggggaggtcgaacagaactgggctacattgcagggcggggagatgacaatacagaccacccaagccagcgaggctacgcaggcagtagcgagtctggcggaggccgctgtggccgctagccaggagatgcaacagggagcaaccgtgacgatggcactcaacagcgaagctgccgcccacgcggttgcgaccctggcagaagccacgcttcagggaggcggccaaattgtcttgagcggggaaacggccgctgctgtgggggctctgacaggggtgcaagatgctaatggcctcttcatggccgatcgtgccggaaggaagtggatcctcaccgataaggcaaccggcctagtccaaattcccgtcagcatgtaccagaccgttgtaacctcactggcacaaggcaacggccctgtccaggtagcgatggcacccgttaccacccggatttcagattcggccgtgaccatggatggacaggccgtggaggtggtgacactggagcaatag

SEQ ID NO: 126998 - DNA, 1512 bp, synthetic construct
  misc_feature 1..1512: note = Description of Artificial Sequence: Synthetic coding sequence
  source 1..1512: mol_type = other DNA
atggaagaacatggagtgacacaaacagaacatatggccacaatcgaggctcatgccgtggcccagcaggtccaacaggtgcacgtggcaacatacactgagcattccatgctcagcgcagacgaagattccccgtcctctcctgaggacaccagctatgatgattccgatatcctgaactctactgctgcagacgaggtgacggcccacctggctgcagcgggcccggtgggcatggccgcagcagcagccgtagctacgggcaaaaagagaaaacggccacacgtcttcgaaagtaacccttccattcgcaaaagacagcagacgagacttttacgcaagctcagagccacccttgacgaatacacaacccgtgtcggtcagcaggccatcgtcctgtgcattagcccatccaaaccgaaccccgtgttcaaggtctttggagcggctccacttgagaacgttgtgcgtaaatacaagtcgatgatcctggaggacctggagtctgcgctggctgaacacgcgccagcgcctcaagaggtgaactccgagttacccccccttacaatcgacggcatcccagtgtctgtcgataagatgacacaggcgcaactcagggcgttcatacctgagatgctaaagtattcgaccggacgaggaaagccgggttgggggaaagagtcatgtaaaccgatctggtggcctgaggatatcccctgggccaatgtcaggtcggatgtgagaacagaggagcagaaacagcgggttagttggactcaagccctgagaacaattgtgaaaaactgctacaagcaacacggtagagaggacctactttacgcttttgaagaccagcagactcagacacaggctaccgccactcatagcatcgcccacctggtccccagtcagaccgttgtgcagactttttccaatccggacggaacagtctctctgattcaagtgggtaccggggcaaccgtggccaccttggcagatgcaagcgaactaccaacaacggttactgtcgctcaagtgaattattctgcagtggctgacggagaggtcgagcagaactgggcgactttacaaggaggtgagatgacaattcagacgacacaggctagcgaggcaactcaggctgtggcctcccttgcagaggcggccgttgcagcctcacaggaaatgcagcagggggctacagtgactatggccctgaactctgaagcagccgcgcacgcagtcgccactctggcagaggctactttgcagggaggaggtcagattgtactaagtggcgagacggctgccgccgtcggagcgctgacaggcgtccaggacgcaaatggtctggtgcaaatacctgtgtcaatgtatcagactgtcgttacctccctggcccagggcaacggcccagtgcaggtcgcaatggccccggtgacaaccaggatctcagacagtgcagtgacgatggacgggcaagccgttgaagtggtaacattggaacagtag

SEQ ID NO: 126999 - DNA, 633 bp, synthetic construct
  misc_feature 1..633: note = Description of Artificial Sequence: Synthetic coding sequence
  source 1..633: mol_type = other DNA
atggaggagcacggggttacccaaacagaacatatggctacaatagaagcacacgccgtcgctcaacaggtgcagcaagtgcacgtggcaacgtatacggaacactccatgctgtctgccgacgaagactctccttcttcccctgaagatacgagctatgatgatagcgacattctgaatagtaccgctgccgatgaggttacagcacatctggccgctgccgggcccgtcggtatggcagcagccgccgcagtggctaccggcaaaaagcgcaaacgccctcacgtctttgagtcgaatccaagcatccgtaaacgacagcagacaagactgttgcgtaagttgcgggccactctggacgaatacactacgagagtcgggcaacaggcaatagttctgtgtatcagtccgtccaagccaaatccagtgtttaaggtgttcggcgcggcaccactggagaatgtggtgcgaaagtataaaagcatgattttggaagacctcgagtcagccttggccgaacacgctcccgccccccaggaggtcaattcggaattacctccactgaccattgacggcattcccgtgtcagtagataaaatgacacaagcgcagctccgtgcttttattccctag

SEQ ID NO: 127000 - DNA, 1029 bp, synthetic construct
  misc_feature 1..1029: note = Description of Artificial Sequence: Synthetic coding sequence
  source 1..1029: mol_type = other DNA
atgattctggaggaccttgagtcagccctcgctgagcatgcccctgctcctcaagaggtgaatagcgaactgcctcccctgacaatcgacggaatcccggtctccgttgataaaatgactcaggctcaacttagggccttcatccctgagatgctgaaatactccaccgggaggggcaagccaggctggggaaaggaatcctgtaagcccatttggtggccggaagatatcccctgggccaacgtcaggtctgacgtccgcacagaggaacagaaacagcgagtgtcatggacccaagctttgaggaccatcgtgaagaactgctacaagcagcacgggcgggaggatttgttatatgcttttgaagatcagcagacccagactcaggcaaccgccacacatagtatcgctcacctggtcccatcgcagaccgtcgttcaaacctttagcaatcctgacggtactgtctctcttattcaagtggggacaggcgcaaccgtcgcgaccctcgccgatgcatccgagttaccaacaacagtcacggttgcacaagtcaactattccgcggtggcagatggtgaggtcgagcagaactgggccacgctccagggcggcgaaatgaccatccagacgacccaggcctctgaagccacgcaggccgtggcctcactcgccgaagcggccgtcgctgctagccaggaaatgcagcagggggccacagtgaccatggcgttgaattcagaggctgctgctcacgcagtagctacgctagccgaagctaccctgcagggtggaggccagattgtcttaagcggtgaaaccgccgccgctgtcggggccctcaccggtgtccaggatgccaacggacttgttcaaatccccgtgagcatgtaccaaaccgtcgtgacgagcctcgcccagggcaacgggcccgtccaggtcgccatggcacccgtcactacaaggataagtgactccgcggtcactatggatggacaagcagttgaggtggtcaccctggagcagtag

SEQ ID NO: 127001 - DNA, 1860 bp, synthetic construct
  misc_feature 1..1860: note = Description of Artificial Sequence: Synthetic coding sequence
  source 1..1860: mol_type = other DNA
atggctgacgaaggaaagtcctattcggagcacgacgacgagagggttaacttcccgcagagaaagaagaagggcagaggaccatttcggtggaagtacggagaaggaaaccgccggagcggcagagggggatctggcatacggagctcccgcctggaagaggacgacggcgacgttgccatgtccgatgctcaggatggcccacgcgttcggtataacccctacaccacccgtccaaatcgccggggggacacatggcacgaccgtgaccgcattcacgtgaccgtgcggcgagaccgggcccctcccgaaagaggaggcgcagggacttcccaggacggaacaagcaagaactggttcaagataacaattccctatggccggaagtatgacaaagcgtggctgttgtccatgatccagagcaaatgctccgtgcccttcactccgatagaatttcactatgaaaacacccgcgctcagtttttcgtagaagatgcaagcactgccagcgcgcttaaggccgtgaactacaagatcctggacagagagaaccggcgaatatccatcatcataaactcgtcagcacctccccacaccatactgaatgagcttaaacctgaacaggtggagcagctcaagctaatcatgagcaaaagatacgacggaagtcaacaggcgcttgacttgaaaggactgcgaagtgaccctgatctcgtggctcagaatatagatgtcgttttgaatcgaaggtcgtgcatggccgctacactcaggatcattgaagagaacataccagaactgctgtccctgaatctaagtaataatcgactttaccggctggacgatatgtcgagcattgtgcaaaaggcaccaaatctaaagatattgaatctgagcggaaatgagttaaagtccgaaagggagttggataaaatcaaagggctaaagttggaggagctctggctagatggcaactctctgtgcgacaccttccgcgaccagagtacatacataagcgcaatcagagaaaggtttcctaaacttctacgccttgatggacatgagctgccccccccgatcgcttttgatgttgaggcacccacaacactgcctccctgtaagggatcttatttcggcactgagaatcttaaaagtcttgttctacacttcttgcagcagtactatgcaatctatgactcaggggataggcaaggcttactggacgcttatcatgatggggcatgttgctcgctgtccattccttttatcccgcaaaatcctgcccggtcgtccctggcggagtactttaaagattcacggaatgtgaaaaagttaaaagaccccacactccgcttcaggctcctgaagcatacgaggttaaatgtagtagcctttttaaacgagctcccaaagacacaacacgatgtgaacagttttgtagtcgatatcagcgcacagacctctacgctcctgtgttttagtgtcaacggggtgttcaaggaagtggacggtaaatcaagggactctctccgggcctttacccgaaccttcatcgcagttccagcgagtaactcaggattgtgtatagtgaacgacgagcttttcgtccggaatgcctccagcgaggagatacaacgagccttcgccatgcctgctcctacacctagcagttcccccgtaccaaccctcagcccagagcaacaggagatgctgcaggcgttttccacccagtccggtatgaatcttgaatggtcccaaaagtgtctacaggataataactgggactatacccgctcggctcaagcctttacccatctgaaagccaagggggagatccccgaagtggcattcatgaagtag

SEQ ID NO: 127002 - DNA, 1071 bp, synthetic construct
  misc_feature 1..1071: note = Description of Artificial Sequence: Synthetic coding sequence
  source 1..1071: mol_type = other DNA
atggccgatgaaggtaaaagctattccgaacatgatgacgaaagggtgaacttccctcagcgcaagaaaaagggccggggccctttccggtggaaatacggcgaaggaaaccgcagaagtggcaggggaggtagtggaatcaggagctctcgcctggaagaggacgacggcgatgtggccatgtcagatgcgcaggatggaccacgtgtaaggtataatccctacactacccgaccaaatcgacgcggcgacacctggcatgacagagaccgtattcacgtgaccgtgcgaagagacagggcccccccggagcggggcggtgccggcacctcacaggatggtacttctaaaaattggttcaaaattacaatcccctacggccgtaagtatgacaaggcctggctgcttagtatgattcagtcgaagtgttccgttccatttactcctattgaatttcactacgagaacacacgggcacagtttttcgtggaagacgcgagtaccgcgtccgccctcaaagccgtgaactataagatcctggatcgcgagaatcggaggatatcaattattattaacagctcagcccctcctcacacaattctaaacgagctcaaacctgaacaggtggaacagctaaagctgattatgagtaagcggtatgatggcagtcagcaagccctggatctgaagggccttcggtccgatcccgacctggttgcccagaacattgacgtggtccttaacagacggtcctgtatggccgcaactttgaggattattgaggagaatattcccgaactgctatccctgaatttatccaataatcggctgtatagactcgacgacatgtcttccatcgttcaaaaagctcctaacctgaagattcttaatctcagcggaaatgagttaaaaagtgaacgcgagttggataaaatcaaggggctgaaactcgaagagctctggctggatggaaacagcctgtgcgacacattcagagaccagagtacctatattcgcagcgttgttgcttgcgtctccccccccggagacctgcacccactgggcgggtag

SEQ ID NO: 127003 - DNA, 1071 bp, synthetic construct
  misc_feature 1..1071: note = Description of Artificial Sequence: Synthetic coding sequence
  source 1..1071: mol_type = other DNA
atggcagatgaagggaagagttattcagagcatgacgatgagagggtgaacttccctcagagaaagaagaagggcaggggaccatttaggtggaaatatggggagggcaacaggcgatctggaaggggcggaagcgggattcgcagtagccgtctggaagaggacgatggtgacgtcgctatgagcgatgcccaggatggacccagggtgcgctataatccatacacaacacgcccgaaccgcagaggcgatacatggcatgacagagatcggatccacgtgactgttcgccgggacagggcccctccggagcgcggtggggccggcacaagtcaagatggaaccagcaaaaattggtttaaaatcactatcccatacggccgaaagtatgataaagcctggctcctcagtatgattcaatccaaatgctcagtgcctttcacccccatcgagtttcattacgaaaacactagggcccagttctttgttgaggatgcttccaccgcttccgcccttaaggcagtaaactacaagatcttggacagagaaaatcgccgaatatccatcattatcaattcatcagcacctccccacactatactgaatgagcttaaacctgaacaggtggaacaactgaaacttataatgagcaaacggtacgacggatcacagcaggccttagatttgaagggcctgcgatccgaccccgaccttgtcgcacaaaatatcgacgtggtcctgaaccgcaggagttgcatggccgcaacactgaggataatcgaagagaacatccccgagctcctctcactgaatctgtcaaacaataggctctaccggctcgatgatatgagctccatcgtccagaaggccccgaatcttaaaatcctaaacttgtccgggaacgaactcaagagcgagcgggagctggacaagatcaagggactgaagctcgaggagctttggctggatggcaattcactgtgcgataccttccgggaccaatcaacatatattcgctctgtcgtagcttgcgtgtctcccccaggtgacctgcatccattgggtggttag

SEQ ID NO: 127004 - DNA, 1860 bp, synthetic construct
  misc_feature 1..1860: note = Description of Artificial Sequence: Synthetic coding sequence
  source 1..1860: mol_type = other DNA
atggcagacgagggtaaaagctattctgagcatgacgacgaacgggtgaattttccacagcgtaagaaaaaagggcgcggtccattccggtggaaatatggtgagggaaacaggcggtctggacgcggaggatcaggaattcgatcatctagattggaggaagacgacggagatgtagctatgagtgacgctcaagatgggccacgggtccggtacaacccatatacaacgagacccaatagacggggcgacacttggcatgatagagacagaatccacgtgacagtgcggagggaccgcgctccgcctgaacgcggcggggccggaacatctcaggatggcacctctaaaaactggtttaaaatcaccatcccatacgggagaaaatacgacaaggcctggcttttgtcaatgatccagtcaaagtgtagcgttcccttcactcccattgagttccactacgagaatactagggcacaattctttgtggaggacgcttcgactgcttccgcccttaaggctgtgaactataagattctggacagggaaaatcgccgtatcagtatcataattaacagttcagcccctccgcataccattctaaatgaactcaagcccgagcaggtggagcagcttaagcttatcatgtcgaaacgctacgatggatctcagcaggctttggacctgaagggcctacgcagtgaccccgacctggtggcccagaacatcgacgttgttctcaaccgcagatcatgcatggctgctacacttcggatcatcgaggagaatattcctgagctgttgtctctgaatcttagcaacaacagactgtacaggttagatgacatgagctccattgtgcagaaagctcctaacctgaagatcctaaacctttccggaaacgaactgaagtccgagcgggagttggacaagatcaagggacttaagctggaagagctgtggttggacggcaactcactatgtgacacctttagagaccagagtacttatatctcagctattcgtgagcgatttcctaagctcttgcgactggatgggcacgagcttcccccccccatcgcattcgacgtggaggctcccacaacgctgcctccatgtaaaggttcttatttcgggacggaaaacctgaagagtttagtgttgcacttcttgcagcagtattacgcaatctacgactctggtgataggcaggggctgctcgatgcctatcacgacggtgcatgttgcagcttatctattccattcatcccccagaatccagcacggagcagtctcgcggaatatttcaaagacagccgcaacgttaagaaattaaaagaccctacactgcgcttcaggctgttgaaacacacccgccttaacgtagtggcatttctgaacgagctgcccaaaacacagcatgatgtcaactcctttgtagtggacatctctgcccaaacaagcacactgttatgcttctccgtcaacggcgtgtttaaggaggttgacgggaaaagccgagactcattgcgtgcatttacccggactttcattgccgtgcctgcctccaactccggactgtgcatcgtaaacgacgagctctttgtacgcaatgcttcctcagaggagatccagagggccttcgctatgcccgcccctacaccttctagcagtccagttccaaccctgagtcccgaacagcaggagatgctgcaagcgttctcaacccaatccgggatgaatctcgaatggagccaaaagtgcttacaagacaataattgggactacaccagatctgcgcaagcttttacccatctcaaggcaaagggagagattccggaagtagcttttatgaagtag

SEQ ID NO: 127005 - DNA, 1881 bp, synthetic construct
  misc_feature 1..1881: note = Description of Artificial Sequence: Synthetic coding sequence
  source 1..1881: mol_type = other DNA
atgtgcagtacactgaaaaagtgcggcacctaccgcaccgaggttgcggagtgccatgatcatggctccacctttcaagggcgtaagaaggggggcagctcttttcgagataatttcgacaaacgctcttgtcactacgaacatgggggttatgagaggcctcccagccattgtcaagagaacgatggttctgtcgagatgcgggacgtccacaaagatcaacaactgcgacataccccatactccatcaggtgcgaacgtagaatgaagtggcacagtgaagacgaaattcgcatcaccacttggaggaaccgtaaaccgccggagcgtaagatgagtcagaatacacaggatggatataccagaaactggtttaaggttactatcccttacggcatcaagtacgacaaagcctggctgatgaacagcatacagtcacattgctccgacaggtttacacccgtagattttcattatgttcggaacagggcatgcttcttcgtccaggacgccagtgccgctagcgcactcaaagatgtgtcgtataaaatttacgacgacgaaaatcagaagatatgtatctttgtcaatcactccacggcaccctacagtgtgaaaaataagctaaagcctgggcagatggagatgctcaagctgacaatgaacaaaaggtacaacgtttcacagcaggccctggaccttcaaaacctcaggtttgaccctgacctcatggggcgagatatagacatcatattgaaccgccggaactgtatggcagcaacacttaagatcattgagcgtaatttcccggagcttctgtctcttaacctgtgcaacaataagttgtaccagctggacggcctgagcgacatcactgagaaggcccccaaggtgaagaccttaaatctgagtaagaataagctcgagtcggcctgggagcttgggaaggtgaagggactcaaactggaagagctctggctggagggcaaccctctctgttccacattctcagatcagtccgcctatgtctcagccattagagattgctttcccaaactgctgagactggacggtcgcgagctgagtgcaccggttatcgttgacatagactcctctgagacaatgaaaccctgcaaggaaaacttcaccggttccgagacattgaaacatcttgttctgcaattccttcaacagtactactctatctacgacagcggagatcgtcaggggctactgggggcttaccacgacgaggcttgtttctccctcgctatcccatttgaccccaaagattccgcgcctagcagtctctgtaagtacttcgaagactcacgcaacatgaagactctgaaagatccatatctcaaaggggagctgctcagacgaacgaaacgcgacattgtcgactcactgtccgcattacccaagactcagcatgatctgagctctatcctggttgacgtctggtgccagacagagcgcatgctatgctttagcgtcaatggagtgttcaaagaggtggaagggcagtcccagggctctgttctcgcctttacaaggacgtttatagccacccccgggagctcctcctccctgtgtattgtcaatgacgaactcttcgtgcgcgatgcatcccctcaggagacgcaatccgcgttttccattcccgtatccaccttgagctctagctcagagccttcactttcccaggagcagcaggagatggtacaggctttttctgcccagagcggaatgaagctcgaatggagccagaagtgtcttcaggataacgaatggaattatacccgtgccggtcaggctttcacgatgctgcagaccgaagggaaaattcccgcggaagccttcaaacagattagttag

SEQ ID NO: 127006 - DNA, 1881 bp, synthetic construct
  misc_feature 1..1881: note = Description of Artificial Sequence: Synthetic coding sequence
  source 1..1881: mol_type = other DNA
atgtgctctacgcttaaaaagtgcggtacctaccgaacggaggtggcggaatgccatgaccacggctcgacattccagggtcgcaagaagggcggctcctccttccgagataattttgataagcggagctgtcactacgagcacggtggatacgagagaccccctagccactgtcaggaaaatgatggatccgttgaaatgagggatgtccataaggatcagcaactgcggcacaccccgtactccatacgatgtgagaggcggatgaagtggcactccgaggacgagatcagaatcactacatggcgcaatagaaaaccccctgagagaaaaatgagccagaatacccaagacgggtacacaagaaactggttcaaggtgacgatcccttatgggatcaagtatgataaagcatggctcatgaattccatacagtcacactgcagcgaccggttcactccagtggacttccattacgtgaggaacagagcctgtttctttgttcaggatgccagcgccgcttctgccctgaaggatgttagctataaaatttatgatgatgaaaaccagaagatatgcatcttcgtgaaccattccacggccccatattcagtaaagaacaagctgaaacccggtcagatggagatgctgaaactgaccatgaacaaaaggtataatgtttcacaacaggcactggatctgcagaacctgagattcgaccccgacctcatggggagagatatagatattattttgaaccgaagaaactgtatggccgccacgctgaagattattgaacggaacttcccagaactactgtccctcaatctgtgtaataataaactgtaccaactggatggcctgtctgatataacagagaaggccccaaaagtcaaaacactgaatctctccaaaaataaactagagtccgcctgggagctgggcaaagttaaaggcctcaagctggaagagctgtggttggagggcaatcccttatgtagcactttctctgaccaatctgcctacgtgagcgcgattagagactgcttccctaagttgctccgtctcgatggccgcgagctaagcgctccggtaatagtagacattgatagttccgagactatgaaaccttgcaaagagaacttcacaggtagcgagacactaaaacacctggtgctgcagttcttgcagcagtactatagcatttatgactccggtgacaggcagggattgctgggggcctatcacgatgaggcctgtttttctctcgctatacctttcgaccccaaagactcggctccatccagtctgtgtaaatactttgaggattcccggaatatgaaaactctgaaagatccttatcttaagggagagttattgagacgcaccaagagagacattgtcgactcactgtccgcactaccaaaaacccagcacgatctgtcaagcatactggtggatgtctggtgccagacagaaaggatgctgtgtttctccgttaacggagtatttaaggaagttgaagggcagagccagggatcagtgctggcttttactcggacctttatagctacgccagggagctcttcctccctgtgtattgtgaacgatgagcttttcgtgcgcgatgcttccccacaggaaacgcagtccgccttcagcatccctgtgtcaacactgtcatcatcctcagagccctccctgtcacaggagcagcaagagatggtccaggcgttcagcgctcagtcaggtatgaagctcgagtggagccaaaaatgtctgcaggataacgaatggaactacacacgtgccggccaggcatttaccatgctgcaaactgaaggaaagattccagccgaagctttcaagcagatttcttag

SEQ ID NO: 127007 - DNA, 1881 bp, synthetic construct
  misc_feature 1..1881: note = Description of Artificial Sequence: Synthetic coding sequence
  source 1..1881: mol_type = other DNA
atgtgtagcaccctgaaaaaatgcggcacatatcggacagaagtggccgagtgccacgaccacggctccacctttcagggccgcaagaaaggcggttcatcattccgggataatttcgataaaagaagctgtcactacgaacatggtggatatgagcgaccgccctctcactgccaagagaatgacggatccgtagagatgcgcgacgtccacaaagatcagcaactgagacatactccatatagcatccgatgcgaacgtcgcatgaagtggcactcagaagatgaaatcagaatcacaacctggcggaataggaagccaccagagcgcaaaatgagtcaaaatacgcaggatggctacacacggaactggtttaaagttacgatcccctatgggattaagtacgataaagcttggttgatgaattccatacagtctcattgcagcgatcgattcactccagtggactttcattatgtacggaacagggcttgtttcttcgtgcaggacgcatctgccgcatcagcgttgaaagatgtgtcatataaaatctacgatgatgagaaccaaaaaatctgtatctttgtaaatcattctaccgccccctatagcgtgaaaaacaaactgaaacccgggcagatggagatgctcaagctgacaatgaataagagatataatgtctcccaacaggccctcgatttgcagaatctgcgcttcgatcctgacctgatggggcgggacatcgatatcatcctgaacaggcggaattgtatggccgcaactctcaagatcatagaacggaatttcccagaattacttagtttgaatttgtgtaataacaaactgtaccagctggatgggttgtccgatatcacagagaaagctcctaaagtcaagacactgaacctcagcaaaaataagttggagtcagcttgggagttggggaaggtgaagggactgaagcttgaagaactctggctggagggaaatcccctgtgctcaaccttttcagatcagagtgcatatgtgtctgccataagggattgcttccccaagttactcagattagatggccgcgagctttctgccccggtcatcgtcgatatcgatagcagtgagaccatgaaaccatgcaaggaaaatttcactggttctgaaacactgaagcatttggtattacagtttctgcagcaatactactccatatatgattctggtgaccgtcaaggcttactgggcgcataccatgacgaagcctgttttagtctggctataccattcgatccaaaagacagcgctccaagttctctttgtaaatacttcgaagattcaagaaatatgaagactctgaaggatccataccttaagggcgagcttctgcgccggactaagcgggatatcgttgacagcttgtctgcacttcctaaaacccaacacgatctgtcctctatcctggttgatgtctggtgccaaacagagagaatgctgtgcttttccgtgaacggggtgtttaaagaagtggaaggtcagagccaggggtctgttctcgcctttacgcgcacatttatcgccacgccaggttcctcctcctctctatgcatcgtgaatgatgaactctttgtcagagatgcatcccctcaggagacacagagcgctttcagcattcccgttagcaccctttcttcaagttcagagccgtcactgtctcaggagcagcaagagatggtccaagccttctctgcgcagtctgggatgaaactggaatggagtcagaagtgcctccaggacaatgaatggaactatacaagggcaggacaggctttcactatgttgcagacagaggggaagataccggccgaggcttttaagcagatctcctag

SEQ ID NO: 127008 - DNA, 1230 bp, synthetic construct
  misc_feature 1..1230: note = Description of Artificial Sequence: Synthetic coding sequence
  source 1..1230: mol_type = other DNA
atgaagtggcactccgaagatgaaatccgcattacaacatggcgcaatcgaaagcctccagaaaggaaaatgtcccaaaatacacaggatggatacacgaggaattggtttaaggtcaccattccctatggcatcaagtatgataaggcctggctgatgaatagcatccagagccactgcagtgacagatttacaccggtagatttccactacgtgcgaaaccgagcttgcttctttgttcaggatgcttccgcagcgagcgccctgaaggacgtctcttacaaaatttatgacgacgagaaccagaagatttgtatttttgtgaaccacagcacagctccctattctgtcaagaacaaactaaagcctggtcagatggagatgcttaagctgacgatgaacaaacgatacaacgtgagccagcaggccctggacctgcagaatttgagatttgatcccgatctgatgggccgcgatattgatatcatccttaatcgcagaaactgcatggctgcaacacttaagattattgaacggaacttcccagagctcttatcgcttaatctctgtaacaacaagctgtaccagctcgatggcctaagtgatataacagagaaagctcctaaggttaaaacactaaacctgagtaaaaataaactggagagcgcgtgggagttggggaaagtgaaagggctcaaactggaagaactgtggctcgaaggaaaccctttatgtagtactttcagcgaccagagtgcttacgtcagcgctattcgcgactgcttcccaaagttgctgagattagacggacgggagctctccgctccagtgattgttgacatcgacagcagtgagacaatgaagccgtgtaaagagaacttcactgggtccgaaactctgaagcacctcgtgctccagttcctgcagcagtactatagtatatacgattcaggggaccggcagggcctcctgggagcatatcacgatgaggcctgttttagtcttgctatcccttttgatcccaaggatagtgcgcccagttcactctgcaaatattttgaggacagccgcaacatgaaaaccttgaaagatccgtatctaaagggagagctgctgaggagaacaaaacgcgacattgttgacagtttgtccgccctcccaaagactcagcacgacttgtccagtattttggtcgacgtgtggtgccaaacggtgccttccgggcagtag

SEQ ID NO: 127009 - DNA, 1881 bp, synthetic construct
  misc_feature 1..1881: note = Description of Artificial Sequence: Synthetic coding sequence
  source 1..1881: mol_type = other DNA
atgtgtagtacattaaagaaatgtggcacgtaccgaactgaggtcgccgagtgtcacgaccatggatcgaccttccagggacgcaagaaggggggctcaagtttcagagataacttcgacaaacggagctgccactatgaacatggcggatacgagcgtccacccagccattgccaggagaatgacgggtcagtggagatgcgtgatgtccacaaagaccagcagttgcgccataccccgtactccatccgttgtgagagacggatgaaatggcattctgaggatgaaattaggataaccacatggcgcaaccggaagcctccggaacggaagatgtctcaaaacactcaggacggatacacacgtaactggttcaaagtcaccatcccatatggcatcaaatatgacaaagcatggctaatgaactccatccagtctcactgttccgaccggttcactccagtggattttcattacgtccgaaatcgagcatgttttttcgtccaggacgccagtgccgcgtcagccttgaaagatgtgtcctacaaaatctacgacgatgaaaaccagaagatatgcatcttcgtaaatcactcaaccgccccctattccgtaaaaaataaactgaagcctgggcagatggagatgttaaagttgaccatgaataaaagatacaatgtctcccagcaggcgcttgatctccaaaatctgaggttcgatcccgacctcatgggcagggatattgacatcatactcaatcgaaggaattgtatggcagcgactctgaaaattattgaaagaaattttccagaactgttgtccctgaacttgtgcaataataagctctatcagctagacggtttgagtgacataaccgagaaagctcccaaggtgaaaacgttgaacttgtccaagaacaaattagagtctgcctgggaactgggcaaagtgaagggactcaagctcgaagagctttggctggagggaaaccctctgtgcagtaccttcagtgatcaaagtgcatacgtgagcgccattcgtgactgcttccccaagctgttacgcctggatggcagagaattaagcgcacctgtgatcgtcgatatcgattcttctgagaccatgaagccatgtaaggaaaatttcaccggaagcgagactctgaaacaccttgtactgcagttcctgcagcagtactatagcatttatgatagtggcgaccgccaagggctgctcggcgcgtatcatgatgaggcctgtttttcgttggccatccctttcgaccccaaggattctgcacctagcagcctgtgtaagtactttgaggatagtcgtaatatgaaaacgctgaaggatccatatttgaagggagagctgctcagacgcaccaaacgagacatagtggattccctgtcagctttgcccaaaacccagcatgacctgagttctatcctggtggatgtgtggtgtcaaacagaacggatgctgtgtttcagtgttaacggagtctttaaggaggtcgagggacagtcgcagggatcggttctcgcttttacccggaccttcatcgccactccaggatcatcgtcatcactgtgcatcgtgaatgatgaattgttcgtccgggacgcaagtcctcaagaaactcaaagcgcattttccatcccagttagtaccctgagcagtagctccgagccttctttgtcccaagaacagcaagagatggtccaggccttctccgctcagtctggcatgaagctagaatggtcccagaaatgcctgcaggataatgagtggaattacactcgcgcgggccaggcctttaccatgctccaaaccgagggtaaaatcccagccgaggccttcaagcagattagctag

SEQ ID NO: 127010 - DNA, 1596 bp, synthetic construct
  misc_feature 1..1596: note = Description of Artificial Sequence: Synthetic coding sequence
  source 1..1596: mol_type = other DNA
atgagtctcccaagcggacatacaactgggcacacggaccaagttgtgcagagaagagccaggtgttgggatatttaccaacgccgcttttccagtcgatccgagcccgtaaatcccggcatgcattcttccagtcaccaacagcaggacggtgatgctgcaatgcatggcgctcacatggattcacccgtgagatataccccctataccattagcccctacaaccgtaaaggtagcttccggaaacaagaccaaactcacgtgaacatggagagggaacaaaagcctcccgagagaaggatggagggcaatatgccagacgggacgcttgggagttggttcaagatcacagtaccgtttgggatcaaatacaacgaaaagtggctcttgaatcttattcaaaacgaatgcagtgtgccgttcgtgccagtggaatttcactacgagaacatgcacgcttctttcttcgtcgaaaatgcttccatcgcctatgctctaaaaaacgtgagcggtaaaatttgggatgaagataatgagaagatatccatcttcgtcaaccctgccggaattccacactttgtgcacagggaactgaagtccgagaaggtggaacagatcaagcttgctatgaaccaacagtgcgacgtctcgcaggaggctctggatatccagcggctgccattttacccagatatggtaaaccgcgacaccaagatggctagcaatcccagaaaatgtatggctgcctccctcgatgttcatgaggagaacatccccactgtcatgtctgccggcgaaatggacaaatggaagggcattgagcccggcgaaaagtgtgcggaccgaagcccagtttgtaccactttctctgacacaagcagcaatatcaactcaattctggaattattcccaaaactcttatgtctggatggtcagcagtcgccacgagcaaccttgtgcggaaccgaagctcacaaacgactgcccacctgcaaaggttctttctttggcagcgagatgctgaagaacctcgtgctccagtttctccagcagtactatcttatctatgacagtggcgacagacagggcttgctctctgcttaccatgacgaggcctgcttctcacttagcatcccttttaacccagaggacagcgcaccatctagtttctgtaagtttttcaaggacagtcgaaacataaagatccttaaggacccgtaccttcgcggggaattgttaaagcacaccaaattggatatcgtcgacagcctctcagccttgcctaaaactcagcacgatctatctagctttctcgtggatatgtggtaccagaccgagtggatgttgtgcttttcggtgaatggggtgttcaaagaggtggagggacagagccagggctctgtcctggcctttaccagaacatttatcgctactcctgggtcttcgtcaagcctttgcattgtcaacgacaaattattcgtgagggatacaagccaccagggaacccagtcagctcttttcaccctggttcccacggcctttagtagctcggtgcccgctttttcgcaggaacagcagaagatgctgcccagttag

SEQ ID NO: 127011 - DNA, 702 bp, synthetic construct
  misc_feature 1..702: note = Description of Artificial Sequence: Synthetic coding sequence
  source 1..702: mol_type = other DNA
atggagcgggagcagaagccgccagaaagacgcatggaaggcaatatgcccgacggtaccctggggagctggttcaagattactgtccccttcgggattaaatacaacgagaaatggttactcaatttgatccaaaatgaatgctccgtacccttcgtgcccgtcgagtttcactatgagaatatgcatgccagcttcttcgtggagaacgcctctattgcttacgctctaaagaatgtgagtggcaagatatgggacgaggataatgagaaaatcagtattttcgtgaaccccgctgggattcctcacttcgttcacagggagcttaagtctgagaaggttgagcagattaaattggctatgaaccagcagtgtgacgtgagccaggaggcactcgacatccaacggctccccttctatcccgatatggtgaacagagataccaagatggccagtaatcctaggaagtgcatggctgcctcacttgatgtgcatgaggaaaatattcccactgtgatgtctgccggcgaaatggacaagtggaaagggatcgaacccggggaaaaatgcgccgatagaagcccggtttgtactacattctcagacacatcatcaaatatcaagtcggtagttcccagtgtcaccacctgggatcctgatctgtgcttaattgctccattctgcaggcggaggcaacactag

SEQ ID NO: 127012 - DNA, 612 bp, synthetic construct
  misc_feature 1..612: note = Description of Artificial Sequence: Synthetic coding sequence
  source 1..612: mol_type = other DNA
atggcctccagccacccggagcagctctatgtggtactcaagccaactcggggttatcagccagtgagatactacttgatctatgatagcggcgaccgccaaggcctgctgtcagcttaccacgacgaggcttgctttagcttatcgatacctttcaaccctgaagattccgcacctagctctttttgtaagttttttaaggatagcaggaatattaaaatcctcaaggacccctacctaagaggagaattgctgaagcacaccaaattggatatagtcgactcacttagtgccttacccaaaactcagcacgatctatcaagttttctagtcgatatgtggtaccagaccgaatggatgctgtgtttcagcgtaaacggcgtcttcaaagaggtggagggacagtctcagggaagcgtattggcattcacacggacttttatcgccacgccgggctcctcttcgagcttgtgcatcgttaacgacaagctgtttgtgagagacacttcccaccaaggcacccaatctgctctgtttaccctcgttccaacagctttctcctcctcagttcccgcgttctcacaggaacaacagaaaatgttgccctcatag

SEQ ID NO: 127013 - DNA, 1086 bp, synthetic construct
  misc_feature 1..1086: note = Description of Artificial Sequence: Synthetic coding sequence
  source 1..1086: mol_type = other DNA
tagaatgagaagtggttgcttaatcttatacagaacgagtgttctgtcccatttgttccagtggagtttcactacgaaaatatgcatgcatcttttttcgtggagaatgcatccatagcatatgctctgaagaatgtgtcgggcaaaatttgggatgaggacaatgaaaagatctcaatctttgtcaacccggcgggaattccccacttcgtccaccgagaactgaagtctgagaaagtcgagcaaattaaactggctatgaaccagcagtgcgacgtgtctcaggaagctctggatattcagaggctcccattctatcccgacatggtgaaccgtgacacaaaaatggcttctaatcctagaaagtgcatggccgcttccctggacgtgcatgaggaaaacattcctactgtgatgtcagcgggagagatggataaatggaagggaattgaacccggcgaaaagtgtgctgaccgcagtcccgtgtgcactaccttctctgatacgtccagtaacatcaactccatattagagttgtttcccaagctgctgtgtctcgatggacagcagtcaccaagggcaaccctgtgtggcactgaagctcataagcgcctgccgacctgtaagggtagtttttttggatccgagatgctcaaaaacctcgtattgcagttcttgcaacagtattatctgatctacgacagcggcgatcgccagggtcttctgagtgcgtatcatgacgaggcttgtttcagtctctccatcccgtttaatcctgaggactccgcacccagttccttctgcaaattttttaaggattctaggaacattaagatattgaaggatccttatctgagaggtgaactactcaaacacaccaagcttgacatcgtggattccctcagcgcgttgccgaagacccagcacgatctgagctcatttctcgtcgatatgtggtatcaaactgaatggatgttgtgcttttctgtgaacggcgtgtttaaggaggtaagcgggttttgctctcggcttcaccccgaccttcactgttatccatggcagcagtttcagtccgtccacagatag

SEQ ID NO: 127014 - DNA, 1194 bp, synthetic construct
  misc_feature 1..1194: note = Description of Artificial Sequence: Synthetic coding sequence
  source 1..1194: mol_type = other DNA
atgaggcgaaatactcaggacgagaatatgagaaagtggttcaaggttaccatcccttatggtataaagtatgacaaggcctggctgatgaattcaatccagagcaactgtagtgtccctttcacccccgttgattttcactatatacgaaatagggcctgtttcttcgtgcaagtagcctctgctgcatctgcactgaaagatgtgtcttacaaaatatacgacgatgaaaaccagaagatctgtatctttgtgtctcactttacagctccctactcagttaagaataaactcaaaccgggacagatggaaatgcttaaactcacaatgaataagagatacaacgtcagtcaacaagctctcgatttgcagaacctgcgatttgatccagacctcatgggccgggatattgatattattctaaacaggagaaattgcatggcggctaccctgaagataaccgaacgcaattttcccgaactgctcagccttaacttatgcaataataaactttaccagctggatggattgagcgatatcaccgaaaaggctccgaaagtcaagactttaaacctctctaaaaacaaactggaatctgcttgggaacttggcaaggttaagggactcaagctggaagaactgtggctggaaggaaaccctctgtgttcaaccttttccgaccagagtgcctacgtgtcagctattagggattgcttcccaaagctgcttcgattagacggcagagagctcagcgcccccgttattgtcgatatcgatagtagcgagacaatgaaaccttgcaaggagaactttacgggctctgaaacccttaagcatctcgttttgcaattcctgcagcagtctaacctgtgcaaatacttcaaggacagtcgcaacatcaaaatcctgaaggatccctaccttcaacgaaagctactgaaacacaccaaatgcccccggaacgtggactccttatctgcactccctgagacccagcacgactttactagcatccttgtggacatgtggtaccaaaccgtgaacacctgctttctgcctagggcggggcctgaatcccagcgctggtggtgcctgctgagtctgaagtggaaggatggactccgcgtgctgatactaccgtcgtgcggcccgtcatcactcccacttgccgctattccagtgtgcgccagctag

SEQ ID NO: 127015 - DNA, 1194 bp, synthetic construct
  misc_feature 1..1194: note = Description of Artificial Sequence: Synthetic coding sequence
  source 1..1194: mol_type = other DNA
atgaggcgcaacacacaggacgaaaacatgagaaaatggttcaaggtgacaatcccttacggcataaaatatgacaaggcgtggctcatgaacagtatacagagcaactgctcggtcccctttacgcctgtcgatttccattatatccgcaaccgagcatgctttttcgtccaggtggcctccgctgcctcagctctgaaggatgtgtcctacaagatctatgatgacgagaatcagaaaatctgtattttcgtgagtcacttcaccgctccatacagcgtgaaaaataagctcaagccagggcagatggagatgcttaagctcacaatgaacaagcggtataacgtgtctcaacaggctctggatcttcagaacctacgtttcgaccctgaccttatgggcagggacattgacataatcctgaatagaaggaattgtatggccgcgaccctcaagattactgagaggaattttcctgaactcctgagcctgaacctgtgcaataataagctgtaccagcttgatggcctctcagacatcaccgagaaggctccaaaagtgaaaaccctcaacctaagcaagaataagttagaatctgcgtgggagctggggaaggttaagggtttgaaactcgaagagctgtggttggaggggaaccccttgtgttcaaccttctccgaccagtctgcctatgtctccgcaattagggattgtttccctaagctgctgagattagatggacgggagctgtctgctccggttattgtggatatagattcttccgagacgatgaaaccttgtaaggagaactttaccgggagtgaaactctgaagcaccttgtccttcaattcctacaacagagcaacctctgcaaatacttcaaggactcaagaaatattaaaatactgaaggatccctatctgcagcggaagttgttaaaacacacgaagtgtccccgcaacgtggacagcttaagtgccctccctgagacccagcatgactttacctccatcctcgtggacatgtggtatcagactgtgaatacttgtttcttgccaagggccggtcccgaaagccagaggtggtggtgtttgctgagcctgaaatggaaggacggactccgggtgctgatactgccaagctgtggtccttcctccctgcccttggctgccatccccgtctgtgcgtcttag

SEQ ID NO: 127016 - DNA, 1098 bp, synthetic construct
  misc_feature 1..1098: note = Description of Artificial Sequence: Synthetic coding sequence
  source 1..1098: mol_type = other DNA
atgcggagaaacacccaggacgaaaacatgaggaagtggtttaaagtgacaattccatacggtataaagtacgataaagcgtggttgatgaactccattcagtctaactgctcagtgcccttcactccggttgatttccactatatacgcaaccgggcctgttttttcgtacaggtcgcctccgcagcttcagcactgaaggacgtcagctataaaatctatgacgacgagaatcagaagatctgtattttcgtaagccacttcacggctccctactctgtgaagaataaactgaagcctgggcagatggagatgctaaaacttacgatgaacaaaaggtacaatgtctcccagcaggcactcgatcttcagaacctgagatttgaccctgatctgatgggccgagatatcgacattatactgaataggaggaattgcatggcagccactctcaaaattaccgaaagaaactttccagaactcctctcactcaatctgtgcaataacaagttatatcagctggatggtctctccgacattacggaaaaagcccccaaggtcaagacactgaacctgagcaagaacaagttagaaagcgcgtgggaattgggcaaggtgaaaggattaaagttagaagaattgtggctagaaggcaatcctttatgttctacctttagtgatcaaagcgcttatgtcagcgccatccgggattgcttcccaaaactcttgaggctggacgggcgtgagctcagcgcacccgtgatcgtggatatagattcctcagagaccatgaagccctgcaaggagaacttcaccggcagtgagacgctcaaacacttggtcctccagtttctgcagcagagcaatctgtgtaagtacttcaaggattctcgaaacataaaaatcttgaaggatccatacctgcagcggaagctccttaaacataccaagtgcccaaggaacgtggactctcttagtgccctccccgagacgcagcacgacttcacaagcatcttggttgatatgtggtatcagacagtcaatacctgctttctacccagggccggacctgaatctcagtctttgcggccactttag

SEQ ID NO: 127017 - DNA, 1098 bp, synthetic construct
  misc_feature 1..1098: note = Description of Artificial Sequence: Synthetic coding sequence
  source 1..1098: mol_type = other DNA
atgcggcgcaatactcaggatgaaaatatgcgcaaatggtttaaggtgacgattccatacggcatcaagtatgacaaggcatggctgatgaactcaatccagtctaactgctcagtgccgtttactcccgtggacttccactacattagaaaccgcgcgtgtttctttgtacaggtggcttcagctgcctccgccctcaaagacgtgagttacaaaatctacgatgacgagaatcagaaaatctgtatcttcgtatcccacttcaccgccccttattcagtcaagaacaagctaaaaccagggcagatggagatgttaaagctaaccatgaacaaaagatacaatgtctctcaacaggctctggatctgcaaaaccttaggtttgaccctgacctcatgggcagagatattgacatcatactaaatcgccggaactgcatggccgctactctgaagatcacagagagaaattttccagagctactctcactcaatctgtgcaacaataagctctaccagctggacgggctcagtgatatcactgaaaaggctcctaaggtgaagactctgaatctatcaaagaataaactcgagtctgcttgggagctgggtaaagtgaaggggctgaagctagaagagttgtggctcgaaggcaatccactctgcagcacctttagcgaccagagtgcctacgtttccgctattagagactgtttccccaagttgctgcgcctggatgggcgtgaactttctgcccctgttatagtcgacattgactcttcagagactatgaagccgtgcaaagaaaattttaccggctctgagaccctgaagcaccttgtgcttcaatttttgcagcagagcaatttgtgcaaatactttaaggattccagaaacatcaaaatactgaaggacccttatctccaacgcaagctgctgaagcacacaaaatgccccaggaatgtggactccctatctgctctcccagagactcagcacgattttacttccattttggtggacatgtggtaccagacagtcaacacctgctttttaccgcgggctgggcctgaatcgcagagcttgagaccgctgtag

SEQ ID NO: 127018 - DNA, 1044 bp, synthetic construct
  misc_feature 1..1044: note = Description of Artificial Sequence: Synthetic coding sequence
  source 1..1044: mol_type = other DNA
atggagcaatatactgccaattctaacagcagtaccgaacagatcgtggtgcaagccggccagatacagcagcagcagcaggggggagtgactgccgttcaattgcagacggaggcgcaagtcgcatccgcgtctggacagcaagtgcagaccctccaggtggtccagggtcagccactgatggtgcaggtttctgggggccagctgataactagtacagggcagcccatcatggtccaagcggtgcccggtgggcagggccagactatcatgcaggtcccggtcagcggcacacagggccttcagcagatacagctcgtcccacccggccagattcaaattcagggaggacaggcagtgcaggttcaggggcaacaagggcagacacagcaaattatcatccaacaaccacagacagccgttaccgccgggcagacccaaacgcagcagcagattgcagtccagggccagcaagtcgctcagaccgccgagggacagactatcgtgtaccaacccgtcaacgccgacggcacaattctgcaacaggtcaccgtgccagtctcaggcatgatcactattcctgccgcttctctagcaggcgcgcagatagtccaaacaggtgccaacaccaacacaaccagcagtggacagggaacagtcacggtcacccttcccgttgctggcaacgtggtcaacagcggaggaatggtgatgatggttcctggagcgggtagtgtgccagccattcagcggattccactgcctggcgccgaaatgctggaggaagagcctctctatgtcaatgccaaacaatatcatcgcatccttaagagaaggcaggcccgcgctaaactagaggcagagggcaaaatccccaaggaaagaagaaaatacttacacgaatctaggcatagacacgctatggctagaaagaggggcgaaggaggtaggtttttttcccctaaggaaaaggatagccctcacatgcaggaccctaatcaggccgatgaggaggctatgacacagataattcgagtgagttag

SEQ ID NO: 127019 - DNA, 957 bp, synthetic construct
  misc_feature 1..957: note = Description of Artificial Sequence: Synthetic coding sequence
  source 1..957: mol_type = other DNA
atggaacagtacacagctaacagcaactcaagcaccgagcagatcgtggttcaggctggacaaatccagcagcaggtgcaggggcaaccattgatggtgcaggtctccgggggacaactgatcacctccacaggccagcccatcatggttcaggcagtgcctggtggccagggccagaccataatgcaggtacccgtgagcggtacacagggactacaacaaatacagctggtgccccctggccagatccagattcaggggggccaggctgtccaggtgcaggggcagcagggacagacccaacagatcattattcagcaacctcagaccgctgtaacagcgggccagacacagacacagcagcaaatcgctgttcagggacagcaggtcgcccagaccgccgaagggcagaccattgtgtaccagcctgtgaacgcggatggcacgatcctccagcaggtgactgttccggtcagtggcatgatcactatccctgcagcctcgcttgccggcgcccagatcgtccagactggggctaatactaataccacaagcagtggccaaggaacagtgactgtgacacttcctgtcgccggcaacgtggttaattctggcgggatggtcatgatggttccaggggcaggctcagtccccgcgatacagcgcatcccactccctggagcagaaatgttagaggaggagcctctctatgtcaacgctaagcagtaccatcgcatactgaagagaagacaggcacgcgctaaactggaggcggagggtaaaatcccaaaagagcgtaggaaatatctgcacgaaagccggcatcgccacgctatggcacgcaagcgcggggaagggggacggttcttctccccgaaagaaaaggactcaccccacatgcaggatcccaatcaggctgacgaggaagcaatgacgcagattatccgagtgagttag

SEQ ID NO: 127020 - DNA, 624 bp, synthetic construct
  misc_feature 1..624: note = Description of Artificial Sequence: Synthetic coding sequence
  source 1..624: mol_type = other DNA
atgacgatggatggcgacagttccacaaccgatgctagtcaattaggaattagtgcagactacatcggtggctcacactacgtaattcagccacacgacgataccgaagactccatgaacgaccatgaagacacaaatgggagcaaggagtccttccgggagcaggatatctacttgcctattgccaatgtcgcgaggatcatgaagaatgccatcccccagaccgggaaaatcgccaaggacgcaaaggagtgcgtgcaggagtgcgtctccgaattcatctctttcatcaccagtgaggccagcgagcggtgccaccaggagaagagaaaaaccattaacggtgaggatattctattcgccatgtccacactcgggtttgactcatacgtcgagccactgaagttgtacctgcagaagttccgggaggccatgaagggtgaaaagggcatcgggggagccgttaccgcgaccgacggactgagtgaggaactgaccgaggaagctttcacaaaccagctgcccgcgggtctgattactaccgacggccagcagcagaatgtgatggtatacacaacaagttaccagcaaatttcaggcgtgcaacagatccagttcagctag

SEQ ID NO: 127021 - DNA, 624 bp, synthetic construct
  misc_feature 1..624: note = Description of Artificial Sequence: Synthetic coding sequence
  source 1..624: mol_type = other DNA
atgaccatggatggtgactcctccaccacagacgcatctcagcttggcatcagcgcagactatatcggcggaagccactacgtgattcaaccacatgacgacaccgaagatagcatgaacgatcatgaggatacaaatggcagcaaggagtctttcagggaacaagacatttacctcccaatcgctaatgtcgcccggatcatgaaaaacgcaatccctcagaccggaaagatagccaaagacgcaaaagaatgcgtgcaggaatgcgtatcagagttcatatcctttattacaagcgaggcgagcgagagatgtcaccaagagaaacggaaaaccatcaatggcgaggatattctgttcgcaatgtctacgctcggcttcgattcttatgtggaacctctgaagctgtacctgcaaaagtttagagaggcaatgaagggggagaaaggtatcggcggcgcggttacagccaccgacggactctccgaagagctaactgaggaggctttcactaatcagcttcctgctggcttgattactaccgacggtcagcagcagaacgtcatggtgtacactacttcctatcagcaaatcagcggcgtgcagcagattcagttttcttag

SEQ ID NO: 127022 - DNA, 1377 bp, synthetic construct
  misc_feature 1..1377: note = Description of Artificial Sequence: Synthetic coding sequence
  source 1..1377: mol_type = other DNA
atgtctactgaaggtggctttggcggtaccagttcctctgatgcccagcaatccttgcagtccttttggccccgggtgatggaagagattaggaacttaacagtcaaggactttagggtacaagagctgcctctagcgcgaatcaagaaaataatgaagctggacgaggacgtgaaaatgatctccgctgaggcccctgtgctcttcgctaaggcagcccagatcttcatcacagagctgactctacgggcctggattcataccgaggataacaagaggaggactctgcagagaaatgatatagctatggccatcacaaagtttgatcagtttgatttcttgatcgacatcgtgccccgggatgaactgaaacctcctaagaggcaggaggaggtgcggcagtctgtgactcctgctgaacccgtgcagtactactttacgttggcacagcagcccaccgctgtgcaggtgcagggacagcagcaggggcagcagaccacctcctccacaactaccattcagccaggccagattatcatagctcagccacagcagggtcagaccactcctgtaaccatgcaggttggtgaaggccaacaggtgcaaatcgtgcaggcccagccgcagggacaagcacagcaggcacagtctggcacaggacagaccatgcaggtgatgcaacaaatcattacaaacactggcgaaattcagcagatccctgtgcaactgaacgctgggcagctccagtatatccggctggcgcagcctgtcagcggcactcaggtggtgcaggggcaaattcagacgctggccaccaacgcacaacagggacagagaaacgcttctcagggtaagccaagaaggtgcctgaaggaaacactgcagataacccaaacagaggtacagcaggggcagcagcagtttagccaatttaccgacggacagcggaacagcgttcagcaagcacgtgtgtccgagctgactggcgaggcagagcctcgcgaggtcaaggccaccggaaactccactccgtgcactagcagcttaccaactacccacccacccagccaccgagctggggccagttgcgtatgttgcagccagccccaacagagcagcacaagtcccccaccaagtgatgccctgcagtgggtggtcgttgaagtcagtgggacacctaaccagcttgagactcatagagaactacacgcccctctccccggcatgactagcctatctcctctgcacccttctcagcagctttatcaaattcagcaggttactatgccagccgggcaagacctcgcccagccaatgtttattcagtcagcgaaccagccctctgacggtcaggcccctcaagtcaccggggactag

SEQ ID NO: 127023 - DNA, 1008 bp, synthetic construct
  misc_feature 1..1008: note = Description of Artificial Sequence: Synthetic coding sequence
  source 1..1008: mol_type = other DNA
atgagcaccgaaggcggtttcggagggacgagcagtagtgacgcacaacaatcacttcagtcattttggccacgggtcatggaggaaattcgcaatctgacagttaaggactttagagtgcaagagcttcccctcgcccggattaaaaagatcatgaaattagatgaggatgttaaaatgatctccgccgaggcccccgtgctgtttgctaaagctgcgcagatcttcatcacagaacttacattgagggcctggatacacactgaggataacaagaggagaaccctgcagaggaatgacattgcgatggctataacgaagtttgaccaatttgacttcctgattgacatcgtacctagagatgaactgaagccacccaaaaggcaagaggaggttagacaatctgtaacccccgcagagcccgtccagtattatttcactctggcacagcagccgacagccgtccaggttcagggacagcaacagggacagcagacaacgtcatccacaacaacaattcaaccagggcagatcattattgcacagcctcaacagggccaaactacccccgtcacaatgcaagtgggggagggtcagcaggttcagatcgtgcaggcccagcctcagggacaggcccaacaagctcagtccgggactggtcagacaatgcaggtgatgcaacaaattatcactaatacaggagaaatccagcagatccctgtgcaactgaatgctggccaattacagtacattagacttgctcagcctgtctcaggcacccaggtggtgcagggtcagattcaaacgctggcaacaaacgcccagcagattacccaaacggaagtgcagcagggtcagcagcagttcagtcagttcacagatggacaacagctctatcagatacagcaggttacgatgcctgctggtcaagacctcgcacagcctatgttcatccagtcagcgaaccagccatcagacgggcaggcccctcaagtgaccggtgattag

SEQ ID NO: 127024 - DNA, 1320 bp, synthetic construct
  misc_feature 1..1320: note = Description of Artificial Sequence: Synthetic coding sequence
  source 1..1320: mol_type = other DNA
atgagcacagagggtggcttcggagggacctccagctccgacgcccagcaaagtctacaatctttttggccaagagtgatggaggaaatacgtaatctgacagtaaaggatttccgcgtccaggaactcccactcgctaggattaagaaaatcatgaagctggatgaggatgtgaagatgatcagcgcggaggctccagtattatttgctaaagcagctcagattttcattaccgaattaactctgcgcgcctggatacatactgaggataataaaagaaggactctgcaaagaaacgatattgccatggccatcaccaaatttgatcagttcgatttcctgatcgacatcgtcccaagagatgaactcaagccccctaaacggcaagaggaagtccggcaatctgtgacgcccgcagagcctgtccagtactatttcaccttagcccagcagcccactgccgttcaagttcaagggcagcagcagggacagcagaccacctcttcaactaccactatccagccaggacaaatcatcatcgctcagcctcagcaggggcaaactacacctgtgacgatgcaggtcggggagggccagcaggtccagatagtacaggcacaaccacagggccaggctcagcaggcccagagcggtactggccagaccatgcaggttatgcaacagatcatcacgaatactggtgagattcaacaaattccggtacagttaaacgccggacagttgcagtacattaggctagcccagcccgtttctggcactcaggtggtgcaaggacagatacaaacactagctacaaacgcacaacagatcacgcaaaccgaggtgcagcagggccagcaacagttcagccagttcacagatgggcagagaaactccgtccaacaagccagggtttcagagctcactggtgaggccgagcccagagaagtgaaggcaaccggaaatagcactccttgcacaagctcattgcctaccacccatcccccctcccatcgggcaggggcatcttgtgtgtgttgctctcagccccagcagtccagcaccagtccacctcccagcgatgccctgcagtgggtcgtggtggaggtgtctgggactccaaatcaactagagacccacagagagctgcatgctcccctgcccggaatgacctcgctatctcccttacacccttcacagcagctctatcagattcagcaagttactatgccggccggtcaggacttggcacagcccatgtttatacagagtgctaaccaacctagcgatggccaggccccccaggtgactggtgactag

SEQ ID NO: 127025 - DNA, 906 bp, synthetic construct
  misc_feature 1..906: note = Description of Artificial Sequence: Synthetic coding sequence
  source 1..906: mol_type = other DNA
atgtctacagagggtggttttggggggacctcatcttccgacgcacaacaatctcttcagagcttttggcctcgcgttatggaggagatcaggaatctcacagtaaaggattttcgcgtgcaggagttacctctagcccgcattaagaagatcatgaagctcgacgaagacgtgaagatgatctcggctgaggctcctgtgctgtttgcaaaggctgcccagatctttattacagagctgacattacgtgcttggattcacacggaagacaataagcgccggaccctgcagagaaatgatatagctatggccataactaagttcgaccagtttgactttctgattgacattgtgcctagggacgaactgaaaccccctaaaaggcaagaagaggtgagacagtcagtcacaccggccgagcccgttcagtattacttcacgttagcgcagcaaccaacggctgtgcaggttcaaggccagcagcagggccagcaaaccacctcatccacaaccacaatccaacctggccaaatcatcatcgcgcagcctcaacagggtcagacaatgcaggtcatgcagcagattatcactaacacaggtgagattcagcagatccctgtgcagctcaacgctggacagctgcaatatatcagactggcccagccggttagtgggactcaagtggtccagggccagatacagacgttggccactaacgcacagcagattacccagaccgaggtgcagcagggccagcaacagttttctcagttcaccgatggacaacaactgtaccagatccaacaggtcactatgccagctggtcaggatctcgcccagcccatgtttatacagtccgctaaccagccttccgatggccaggctccccaggtcactggggattag

SEQ ID NO: 127026 - DNA, 1008 bp, synthetic construct
  misc_feature 1..1008: note = Description of Artificial Sequence: Synthetic coding sequence
  source 1..1008: mol_type = other DNA
atgtctactgaaggcggcttcggtggtaccagcagcagcgatgcccagcagtcgttgcagtctttctggcctagggtgatggaggagatcaggaaccttactgtcaaagactttcgggtgcaggagctccccctggcccggattaagaaaattatgaagcttgacgaggacgtcaagatgatctcagccgaagcccctgtgctgtttgccaaggccgctcagatttttataacagaattgactctacgcgcctggatccacacggaagacaacaagcgtaggactctgcagcgcaacgatattgcaatggcaatcacaaagttcgatcagttcgattttctgatcgacatagttcctagagacgaattaaagcctcccaagcggcaggaagaagtccgacaatccgttacccctgctgagcccgtgcagtactatttcacactggctcaacagccgaccgcggtccaagtccagggacagcagcagggccagcaaactacctctagcactacaacgatccagccaggacaaatcatcattgcccagcctcagcaggggcagacaacccctgtcaccatgcaagtgggtgaggggcagcaggttcagattgttcaggcacagcctcagggacaggcacagcaggctcagagcggcaccggtcaaactatgcaggttatgcagcagattattacaaacacaggggaaattcagcagatccctgtgcaactaaatgctggccaactccagtacatcaggctggcccagccggtgtccggcactcaggttgtgcaaggccagattcaaactctggctacgaacgcccagcagatcacccaaaccgaagttcagcaggggcagcaacagttcagccaatttacggacggacaacagctctatcaaatacaacaagtcacaatgccagcaggccaggatctggcccaacctatgtttatccagtcagccaaccagccatccgacggccaggcccctcaggtcacaggcgactag

SEQ ID NO: 127027 - DNA, 702 bp, synthetic construct
  misc_feature 1..702: note = Description of Artificial Sequence: Synthetic coding sequence
  source 1..702: mol_type = other DNA
atggctatcactaaattcgatcagttcgacttcctgatcgatattgtgcctagggacgaattgaagccaccaaaacgccaggaggaagtgcgccaaagcgtgaccccagctgaacccgtgcaatattatttcactctggctcagcaacccaccgctgtgcaagtgcagggccagcaacagggacagcagaccacttcttcaaccacgacaatccagcctggtcagatcattattgcgcagcctcagcagggacagaccacccctgtcacaatgcaggtcggagagggccagcaagtgcagattgtgcaggcacagccacagggtcaggcacagcaggcgcagtcggggaccggccagactatgcaggtgatgcagcagataataacaaacacaggagagatacagcagattcccgtgcagttaaatgctggccagcttcaatatatcaggcttgcccaacccgttagtggaacgcaagtagtccaggggcaaatccagaccttggcaaccaacgctcaacagatcacccagactgaggtgcaacaaggtcaacagcaattttctcagtttacagatggacaacagctgtatcagatacagcaggttactatgcgcgctagaaccagcccctcaccttgctccagctctcaacccacatctcctcctacgggacctcccggagacaggcggcttcgtgcctag

SEQ ID NO: 127028 - DNA, 606 bp, synthetic construct
  misc_feature 1..606: note = Description of Artificial Sequence: Synthetic coding sequence
  source 1..606: mol_type = other DNA
atggcaataacaaaattcgatcagtttgatttccttatcgacatcgtccctcgagacgagctgaagcccccaaagaggcaggaggaggtcaggcagtctgtcactccagctgaacctgtacagtactatttcactcttgcccagcagccaacagccgtgcaagtgcagggacagcagcaggggcagcagactacatctagcactaccacgattcaacccggacagattatcattgctcagccgcagcaagggcagacaacgcctgtgacaatgcaggtgggagagggccagcaggtacagatcgttcaggcccagccccaaggtcaggcccagcaggcccagagcggcacaggccagaccatgcaggtgatgcagcagattataacgaatactggtgagatacagcagatcccggtgcagctgaatgccggtcagttgcagtatatacgtctggcgcagcctgtgagtggtacccaggtggtgcaggggcagattcaaacccaggcgatggaaaccttcttcgcttttaagaggcagatctactctctttggagggtgggaggattcatcgccacgctgttcagtccacgggaccccgggaactag

SEQ ID NO: 127029 - DNA, 942 bp, synthetic construct
  misc_feature 1..942: note = Description of Artificial Sequence: Synthetic coding sequence
  source 1..942: mol_type = other DNA
atgtcaactgaaggtgggtttggtgggacttcgtcaagcgacgcacaacaaagcctgcagtccttctggccccgtgtgatggaggagatccggaatctgacagtgaaagattttagggtccaggaactgccactggcccggatcaagaagattatgaagttggacgaagatgtcaagatgatttctgccgaagcccctgttctcttcgccaaggccgcgcagattttcatcactgaacttactttaagagcatggatacataccgaggacaacaagcggaggacactacaaagaaatgatatcgcgatggccattaccaagttcgatcagtttgacttcctgattgacatcgtccccagggacgagcttaaacccccgaaacggcaggaggaagtccggcagtctgtgacccccgccgaaccagtgcaatattactttacgttagcccagcagcctaccgccgtacaggttcaggggcaacaacagggacagcaaactacgagcagcaccacaaccatccagccaggccagattattatcgctcagcctcagcagggccagactacccctgtgacaatgcaggtgggcgaaggacagcaggtgcagattgttcaggctcagcctcagggtcaagctcagcaggctcagagcgggaccggacagaccatgcaggtcatgcagcaaattatcacaaataccggagagattcagcagattccagagacaggcctggcggtgtcgctacggctcatgaaatgcagcggcttgatttccgcacactgttcatttcgattgcccggaagctcagactcacccgcgtccgcttccagagtcgctggaatcataggagcggcagagtgtcgccctgccgccgtatatccactgagcccagcatgcatccgtcatagcagctgtgccggcaccgaccctgacacttgctag

SEQ ID NO: 127030 - DNA, 543 bp, synthetic construct
  misc_feature 1..543: note = Description of Artificial Sequence: Synthetic coding sequence
  source 1..543: mol_type = other DNA
atgtccaccgagggaggattcgggggaaccagcagctctgacgcgcagcagtccctgcagagtttttggccaagggtgatggaagagattcgcaatcttacggtgaaggattttcgggtgcaagaattgcctctggctagaattaaaaaaatcatgaagctcgacgaggatgtaaagatgatttcagccgaggcccccgtgctttttgctaaagcggctcagatcttcatcaccgagcttacactacgggcctggatacatacagaggacaataagagacgcaccttgcaagaagaggtgcgtcaaagtgtgactcccgcagagccagtccagtactactttacacttgctcagcaaccaacggccgtccaggtgcaaggtcaacagcaggggcagcaaaccaccagcagtactacgacaatccagcccggccagattataatcgcacagccgcagcagggtcagacaacacctgtcaccatgcaggtgggagaaggacagcaggtgcagatcgttcaggctcagccacagggccaggcctag

SEQ ID NO: 127031 - DNA, 1065 bp, synthetic construct
  misc_feature 1..1065: note = Description of Artificial Sequence: Synthetic coding sequence
  source 1..1065: mol_type = other DNA
atgtccactgagggaggttttggcggcacgagttcctcggatgcccagcaatcactgcagagcttttggccacgggtgatggaggaaattagaaacctgaccgtcaaagactttcgagtacaggagctgcctttggcccgaataaagaaaattatgaagctggatgaggatgtcaaaatgatttccgccgaagcccccgtcctgttcgccaaagccgcccagatctttattacagaactaaccctcagagcctggattcataccgaggacaataagagacgcacactccagcggaacgacatagccatggccatcacaaaatttgaccagtttgatttcttgatcgacattgtgccacgtgacgaactgaagccacctaagaggcaggaggaggttagacagtccgtgacgccagctgaaccagtgcaatactacttcaccctggcccagcaaccgaccgctgtccaagtccagggacagcagcagggccagcagacgacctcctccactaccacaatacagcctggccagatcatcatcgctcagccgcagcaggggcagaccaccccagtaaccatgcaggtcggtgagggccaacaagtccagattgtgcaggcccagccccaagggcaggctcagcaggctcagtcaggcacgggccagaccatgcaagtgatgcagcagatcattaccaataccggggagattcagcaaatacccgtgcagttaaacgctggtcagctccagtatattaggctcgcccaacctgtgagcgggacacaagtggtgcaaggccagattcagacccttgctacaaacgcccagcaaggacagcgtaacgcgagccagggtaaaccacggcgatgcctgaaggaaacactccagattacacagactgaggttcagcaaggccagcaacagttctctcagtttaccgacgggcagcagctgtatcaaatacagcaggtcaccatgcccgcgggacaggacctggcccagccaatgttcatacagagcgctaaccagccttctgacgggcaggctccccaggttacaggtgactag

SEQ ID NO: 127032 - DNA, 894 bp, synthetic construct
  misc_feature 1..894: note = Description of Artificial Sequence: Synthetic coding sequence
  source 1..894: mol_type = other DNA
atgtctactgaggggggattcggtggcacaagtagctccgacgcccagcagagcctacagagcttctggccaagggtgatggaggagattagaaatctcacagtgaaggattttcgagtccaggagctccctctagccagaataaagaagattatgaagctcgatgaagacgtcaaacgcaacgatatagccatggcaattacaaagtttgaccagttcgactttctcatagacattgtgcctagggacgaactaaaacccccaaaaaggcaggaggaggttcgacagagcgtcacccccgccgagcctgtgcagtactatttcacgcttgcacagcagcctactgctgtccaggtgcaaggccagcagcagggacagcaaacaactagctctactacaacaattcaacctggccagatcatcattgcgcagccacaacagggacagactacaccggtgaccatgcaggttggcgaaggccagcaagtccagattgtgcaggcccaaccacagggacaagcccaacaagctcagtcaggcaccggacaaaccatgcaagtgatgcagcagatcatcacgaacaccggcgaaatacagcaaatcccggtccaacttaacgctggtcagctgcagtacatccggctggctcaaccagtgtctggcacacaggtggtgcagggacagatccagactctagcgaccaatgcccagcagattacacagaccgaggtccaacaaggccagcagcagttctcccagttcacagatggccagcaactgtaccagattcagcaggtgacgatgccggcaggacaggatttggcccagccaatgttcattcaatcagctaatcagcctagcgacggacaggccccacaggtaactggagattag

SEQ ID NO: 127033 - DNA, 1008 bp, synthetic construct
  misc_feature 1..1008: note = Description of Artificial Sequence: Synthetic coding sequence
  source 1..1008: mol_type = other DNA
atgagtacagaaggaggattcggtggcacgtcaagcagcgatgcccagcagtcactacagagcttttggccccgcgtcatggaggaaatcaggaatctcacggtcaaggatttccgggtgcaggagttgccgctggctcggattaagaagatcatgaaattagacgaggacgtgaaaatgattagcgcggaggcgcccgtactgtttgcaaaggcggcccagatattcatcacagagttaaccctgcgggcgtggattcatacggaggacaataagaggagaactctgcagcggaacgacattgccatggctattactaagtttgatcagttcgactttctgattgatattgtgccgcgcgatgaactaaagcctcctaaacggcaagaggaggtgcgacagagtgtaacaccagcagaacccgtgcagtactattttaccttagcgcaacagccaacggccgtgcaagtgcaggggcaacagcaaggccaacagacaacttctagtaccaccacaattcagcctggtcagatcatcattgcgcaaccccagcaagggcaaaccacccccgtcacaatgcaagtcggcgaaggacagcaggtacagatcgtccaggctcaaccccagggacaagctcagcaggctcagagtgggactgggcaaacaatgcaggtgatgcagcagatcattacgaatacaggggaaatccagcagatccctgtccagctgaatgccggacaattgcagtacatcaggctcgctcagccagtctccggaactcaggtggtgcagggtcaaattcagacactcgccacaaatgcccagcagatcactcagaccgaagtgcaacagggacaacagcaattttctcagttcactgacggccagcagttgtaccagatacagcaggtcaccatgccggcaggccaagatttggctcagcctatgttcatccaaagcgcaaatcagccctcggacggccaggccccccaggtgaccggagattag

SEQ ID NO: 127034 - DNA, 1008 bp, synthetic construct
  misc_feature 1..1008: note = Description of Artificial Sequence: Synthetic coding sequence
  source 1..1008: mol_type = other DNA
atgtccacagaaggcgggttcggaggcacttcatcgtccgacgcacagcaaagcttgcaatctttttggcccagggtgatggaagagatacgtaacttaaccgtaaaagacttcagagtacaggaattacctctcgcgagaatcaaaaagatcatgaagttggacgaggacgttaaaatgatctccgccgaggctcctgttctgttcgcaaaggccgctcagatcttcatcactgaattgaccctacgggcctggatccataccgaggacaataagaggcgtaccctccagcgcaatgatatagcaatggctataacaaagttcgatcaatttgatttcttgattgatatcgtgccacgcgatgagctgaagccacccaagcgacaggaagaagtacgccaatcggtgacacctgcagagcctgttcaatactacttcaccctcgctcagcagccgactgccgtgcaggtccaggggcagcagcagggccagcaaacaaccagcagtactaccacaatccaaccaggtcagatcatcatcgcacaacctcagcaagggcaaactacccccgttacgatgcaggtgggggagggccaacaggttcagatcgtacaggcccaaccccagggccaggcccagcaggcccagagcggtaccggacagaccatgcaggttatgcagcaaataattaccaacactggcgagatccagcagatccccgttcagcttaacgctggccagctccagtacatacggctggctcagccagtgtcgggaactcaggtcgtacaaggacagattcagacactggccacaaacgcacagcagatcacgcagaccgaggtacagcagggccagcaacagttcagccagtttactgatggccagcagctgtatcagatccagcaggtcaccatgcctgctgggcaggatctggcacagcctatgttcattcagtccgcaaaccaaccatcagacgggcaggccccacaggtgacaggggactag

SEQ ID NO: 127035 - DNA, 390 bp, synthetic construct
  misc_feature 1..390: note = Description of Artificial Sequence: Synthetic coding sequence
  source 1..390: mol_type = other DNA
atgagcactgaaggcgggttcggaggaacttcctcctcggacgcccagcagagtttgcagtccttctggccgcgagtgatggaagaaatccgaaacttaaccgttaaagacttccgcgtgcaggagttacccctggctcgcattaagaagatcatgaaactcgacgaggatgttaaaatgataagcgctgaggcacctgtcctcttcgcaaaggctgcccagatcttcataacagagcttacccttagggcatggatacatacggaggataacaagagaagaaccctgcaaaggaatgatattgctatggcaattactaaattcgatcagttcgatttcctcattgacatcgtgccgagagatgaattgaaaccacccaaacggcaatag

SEQ ID NO: 127036 - DNA, 1005 bp, synthetic construct
  misc_feature 1..1005: note = Description of Artificial Sequence: Synthetic coding sequence
  source 1..1005: mol_type = other DNA
atgagcactgaaggtggctttggtgggacatcgtccagcgatgctcaacagtcactgcagtccttctggcctcgtgttatggaagagattaggaatctcaccgtgaaagactttcgtgtgcaagaactgcccctggccaggattaagaagattatgaagctcgatgaagatgtcaagatgatatctgcagaggctcccgtacttttcgccaaagctgcacagatcttcataaccgagcttacactgcgggcgtggatccacaccgaggataacaagagacgaactcttcagagaaacgacattgcaatggccattaccaaatttgaccagttcgacttcctgatagacattgtgccaagggatgagctgaagcctcccaaacgccaggaggaagtgagacagagcgttactcctgcagaacccgtgcagtattactttacacttgctcagcagccaaccgcagttcaagtccagggacagcaacagggccagcagaccaccagtagtactactaccatccagccaggacagatcatcattgcccagcctcagcaaggacagacaactcccgtgactatgcaagtcggcgaaggacaacaggtgcaaatcgtccaggcccagccccagggccaggctcagcaagctcagtccgggaccggacaaaccatgcaggtgatgcagcagatcatcactaacaccggcgagatccaacaaattcccgtccagctgaatgccggccaactgcagtatattcgcctggcccagccagtgtctgggacccaggtcgtccagggccaaattcagacactggcgacaaatgcccaacagattactcagacggaggtccagcagggtcaacaacagttctctcagttcacagacggacaactgtatcagatccaacaggtgactatgccagcaggacaagacttagctcagcctatgttcatacagtccgcaaaccagccttcggatgggcaggctccacaggtcacgggtgattag

SEQ ID NO: 127037 - DNA, 426 bp, synthetic construct
  misc_feature 1..426: note = Description of Artificial Sequence: Synthetic coding sequence
  source 1..426: mol_type = other DNA
atgagcacagaaggcggatttggaggaacgtcgagttctgatgcccagcagtcattgcaatcattctggccaagggtaatggaggaaatcagaaatttaaccgtgaaggatttccgcgtccaagagctcccattggctcgtatcaagaaaatcatgaagctggatgaggacgtgaaaatgatttcggccgaggccccagttctgttcgcaaaagcggctcagatcttcatcactgaattgacgctgagggcttggatacacacagaagacaataagagacgcaccctgcagcggaatgatatagccatggctattacaaagttcgaccagttcgattttctgatcgacatagtgccaagggacgagctgaaaccccccaaacgccaagaggtacgacagagcgtcactcctgcagagccagtatag

SEQ ID NO: 127038 - DNA, 288 bp, synthetic construct
  misc_feature 1..288: note = Description of Artificial Sequence: Synthetic coding sequence
  source 1..288: mol_type = other DNA
atgagcaccgagggcggctttggtggcacaagctcatctgatgcccaacaatccctgcagagcttctggccaagggtgatggaagaaatcaggaatctgacggtgatgatctctgccgaggcgccagtcctattcgccaaggcagcacagatctttatcacggaactgacgctgagagcctggatacataccgaggataataaacgcagaaccctgcagcgtaatgacattgcgatggctattaccaaattcgaccagtttgacttcctcatcgacatcgtgccctag

SEQ ID NO: 127039 - DNA, 183 bp, synthetic construct
  misc_feature 1..183: note = Description of Artificial Sequence: Synthetic coding sequence
  source 1..183: mol_type = other DNA
atgtctacagaaggcgggttcggggggacttcttcctctgatgcccagcaaagcctgcagtccttttggccccgtgtgatggaggaaataagaaatctgacagtcaaagacttccgcgtgcaagaactgcctctggctaggataaaaaaaataatgaaactagacgaggatgtgaaaatgtag

SEQ ID NO: 127040 - DNA, 159 bp, synthetic construct
  misc_feature 1..159: note = Description of Artificial Sequence: Synthetic coding sequence
  source 1..159: mol_type = other DNA
atgtctaccgaggggggtttcggtgggacatccagctccgacgcccaacagtcattgcagtctttttggcctagagttatggaagaaatcagaaacctgacagtgaaagattttcgggtgcaggagctacccctcgcacggatcaagaagattatgtag

SEQ ID NO: 127041 - DNA, 555 bp, synthetic construct
  misc_feature 1..555: note = Description of Artificial Sequence: Synthetic coding sequence
  source 1..555: mol_type = other DNA
atggcaagatctctcgtccatgatacagtgttctattgcctgagcgtctaccaggtgaaaatctcacccacccctcagctaggcgcggcaagcagtgctgaagggcacgtagggcagggcgcacccggtctgatgggcaatatgaacccagagggaggtgttaatcacgaaaacgggatgaaccgggatggaggaatgatcccagagggcggaggggggaatcaggagccacgacagcagccacagccacctcctgaggaacccgcccaggccgcaatggaggggccccagcctgagaatatgcagccaagaacccgcaggacaaagttcacactgttgcaagtcgaagagttggagagcgtttttcgacacacccaatatcccgacgtccccacacgaagggaattggccgaaaacctgggcgtaaccgaagacaaagtgcgcgtgtggttcaaaaacaagcgtgctcgctgccggcggcaccagcgggagttgatgctggcaaatgaactgagagccgatccggatgactgcgtctacatcgtcgttgactag

SEQ ID NO: 127042 - DNA, 345 bp, synthetic construct
  misc_feature 1..345: note = Description of Artificial Sequence: Synthetic coding sequence
  source 1..345: mol_type = other DNA
atggataagaggcgcagagcactgacgagactgtacttagacaaagcaaccctaatttggaatggcaacgctgtgtcgggcttggatgcattgaataatttctttgacactctgccctccagtgaattccaggttaatatgctcgactgccagcccgtgcatgagcaagccacacagtctcagaccacggtgctggttgtaacttcagggaccgtcaaatttgacggcaataagcagcattttttcaaccagaattttcttttgacagcccaaagtacaccaaacaacaccgtctggaaaatcgctagtgattgcttcagattccaggattggtccagctcgtag

SEQ ID NO: 127043 - DNA, 429 bp, synthetic construct
  misc_feature 1..429: note = Description of Artificial Sequence: Synthetic coding sequence
  source 1..429: mol_type = other DNA
atggctacctctcttgactttaagacatacgtggatcaagcgtgccgcgccgcagaagagttcgtcaatatctactatgaaaccatggataagcgccgccgcgccctgactagattgtacctggataaggctacactgatatggaacggaaacgctgtttccggactcgatgccttaaataacttcttcgacacactgcctagttccgaattccaagtgaacatgctggactgccaaccagtgcacgagcaggccacgcagtcccagaccactgtgctggttgttacgtctggaacagttaagttcgatggcaataaacaacatttctttaaccagaacttcctgttaacagcccagagcacccccaacaatacagtgtggaaaatagcctcagattgctttaggtttcaggactggagctctagttag

SEQ ID NO: 127044 - DNA, 345 bp, synthetic construct
  misc_feature 1..345: note = Description of Artificial Sequence: Synthetic coding sequence
  source 1..345: mol_type = other DNA
atggacaaacgccgccgcgctctcacacggttgtacttagataaagccactcttatttggaatgggaacgccgtaagtgggctggacgcactgaataactttttcgatacactgccaagctcagaattccaggtgaatatgctggattgccagcctgttcacgagcaggccacccagtctcagacgaccgtgctggtggtaacctcaggaactgtcaagttcgacggtaataagcaacatttctttaaccagaactttctgctgactgcacagagtactcctaataacacggtatggaagatagcttctgattgttttcgattccaggactggtctagcagctag

SEQ ID NO: 127045 - DNA, 882 bp, synthetic construct
  misc_feature 1..882: note = Description of Artificial Sequence: Synthetic coding sequence
  source 1..882: mol_type = other DNA
atgaccggactttatgaacttgtctggcgcgtcctgcacgcattactctgccttcatcggacccttacttcatggctgagggtgagatttgggacatggaattggatctggcgacggtgctgcagagcagcatcagcagcggtactggctccactcggcttcacactgaggaagccgccagcagtgggaaggaatcgcagacaccatcgacatccccggggcggctcctgcctggcagccgcccatcaccgaatgcgctggcgtgcagacggccggagcctcgagaagctacccgtccacatggggctcgtaattactgaggtcgagcaggaaccatctttctcggatatagcctctctggttgtttggtgcatggcagtcgggattagctacatatcagtctacgatcaccagggaatcttcaaaagaaacaactcccgactcatggacgagattcttaaacaacagcaggaacttctgggactggattgcagcaagtattcccctgaattcgccaactctaatgataaagacgaccaggtgctaaactgccatttggccgtgaaagtgttgtcaccagaggacggcaaagcggatatcgtgcgagctgcccaggacttctgccaactggtggctcaaaagcagaaacggccaactgacttggacgtcgataccctcgcaagcctactgtctagcaatgggtgtcccgacccagacctagtcctcaaattcggccctgtggacagcacactgggattccttccatggcacataagactgacagaaatagtgagccttccctcacacctcaacattagctacgaggatttcttctccgcactgagacaatatgctgcctgcgagcagcggttaggcaagtag

SEQ ID NO: 127046 - DNA, 2571 bp, synthetic construct
  misc_feature 1..2571: note = Description of Artificial Sequence: Synthetic coding sequence
  source 1..2571: mol_type = other DNA
atgaagccccgcccagccggttttgtggacaacaagctcaaacagagagtaatccagtatttgacctccaacaaatgcggcaagtatgtggatatcggcgtcctggctagtgacctgcaaagggtttatagtatagattacgggaggcgcaagagaaacgcattccgtatccaggttgagaaagtgttttctatcatctcctcagaaaaggagcttaagaacctgactgaattggaggacgaacacttggctaagcgggcccggcagggcgaggaggacaacgaatacaccgaatcctattccgatgacgactctagcatggaggactatcccgatccccagtctgccaatcacatgaacagctctctgctttcgctgtatcgtaaaggcaaccccgattctgttagcaacactcctgaaatggagcagcgtgagaccacgtctagcactccgagaatctctagcaagacgggttcaatacccctcaagacacccgcgaaggacagtgaggggggatggttcattgataaaacgccgtcagtcaaaaaagattccttctttcttgacttgtcttgtgaaaagtccaaccctaaaaagcccattaccgagatccaagactccaaggattctagccttctggaatccgatatgaaacggaaaggaaaacttaaaaataagggctcaaaacgcaagaaagaggaccttcaggaggttgacggggagatcgaggccgtcctgcagaagaaagcgaaagctcgaggcctcgagttccagatctccaatgtgaaatttgaggacgtaggcgggaatgacatgacgctgaaggaagtgtgcaaaatgctgatccatatgcggcaccccgaggtctaccaccacctgggggtcgtcccacctcgaggggtcctcctacatggcccaccagggtgcggaaagacattgttggctcacgccatagctggggagctcgatctcccgatcctgaaagtcgcggctccggagatcgtgtctggggtgtcaggcgaatctgaacagaagctccgagaactttttgagcaagccgtttcaaatgcaccatgcattatcttcatcgacgaaatcgatgcgattacccccaaacgagaagttgcctccaaggacatggagagacgcattgtggctcagctgctcacctgtatggatgacctgaacaacgtagccgctacagcacgagtattggtcataggtgctacgaacaggccggatagtctggacccagcactccgccgagctgggaggttcgatcgggagatttgcctggggatcccggacgaagcctcgcgggaaagaatcctgcaaaccctttgtagaaagctgcggctgccccaggctttcgacttttgccacctggcccacctcacccctggattcgtgggagcagatctcatggctctgtgtcgggaggccgctatgtgtgctgttaacagagtgctgatgaagcttcaagagcagcaaaaaaaaaatcctgagatggaagatctgccctcgaagggtgtccaagaagagcgattgggtactgaacctacaagcgagactcaggatgagttgcagcggctgctgggactgctgcgggatcaggacccgctgtccgaagagcagatgcaggggctgtgcattgagctgaacgattttattgtcgccctgagctccgttcagcctagcgccaagcgcgaaggttttgttacagttccaaatgtgacctgggccgacattggcgccctggaggacatcagggaggagttgactatggcaatcctggctcctgtgcgcaatcctgaccagtttaaggccctggggctggtcacgccagccggggtactgttggccggtcctcccggatgcggaaagaccctgctcgccaaggcagtggcgaacgagagcggtttgaacttcattagcgtgaaaggaccagagctgctgaacatgtacgtcggggagtctgaaagggccgtgcgccaagttttccagcgggcgaaaaacagtgccccctgcgtcatcttctttgatgaggtggatgccttatgtccgcgccgcagcgatagggagacaggggccagcgttcgcgtggtcaaccaactactcacagagatggacggactggaggcaagacagcaggtgtttatcatggctgcgacaaatcgtcccgacatcatagaccccgcaatcctgagacctggacgcctagataaaactttgtttgttggactgcctccccccgctgatcgcctagcgattttaaaaaccattacaaaaaacggcactaaaccccccctggatgctgatgtgaatctcgaggccattgccggggacctacgttgcgattgctataccggcgcggacctttccgctctggtccgcgaggcaagcatctgtgcgctccggcaggagatggcccgacagaaatctgggaacgaaaaaggagagcttaaggtctcacacaagcacttcgaggaggcctttaaaaaggtgcggtcttccatttcaaaaaaagaccagattatgtacgagcgtcttcaggagagtttgtctcgatag

SEQ ID NO: 127047 - DNA, 2004 bp, synthetic construct
  misc_feature 1..2004: note = Description of Artificial Sequence: Synthetic coding sequence
  source 1..2004: mol_type = other DNA
atgaagaggaaaggtaagctgaagaacaaggggagcaaacgtaaaaaagaggacctgcaggaagtggacggcgagatcgaagccgtgctgcagaaaaaagctaaggccagagggctggagttccagataagtaacgtgaagttcgaggatgtggggggtaatgacatgaccctgaaggaagtgtgcaagatgctgattcatatgaggcatcctgaggtgtaccatcatctaggggtggtccctccccgcggtgtgttgctgcatgggccccccggctgtggtaagaccctcttagctcatgctatagcgggcgcagaatgttccggcatgataacggcccattgttcattcgatttcagcggcagcaatgacccacctgcctccgccagccaagagcttgacctgccaatcctgaaggtagctgcaccggagatagtttccggagttagcggcgagtcagaacagaagcttagggagctcttcgagcaggccgtgtccaacgccccttgcattattttcatcgacgagattgatgccatcactcctaaacgcgaagtggcatctaaggacatggaacgccgtatcgtagcccaactcctgacctgcatggacgatctaaataatgtggcagctacagctcgcgtgctggtgatcggcgcgaccaatagacccgattcactggaccccgccttgagaagggccgggagattcgatcgagagatttgcctgggaatcccagacgaagcgagtcgcgaacgcatcctacagacactgtgccggaaactgcggttaccccaggccttcgacttctgtcatctggcccacctaacccctggctttgtgggagccgacctcatggccttgtgccgcgaggcggccatgtgcgcggtgaatcgcgtcctgatgaagctgcaggaacagcaaaaaaagaatcctgagatggaggacctcccttccaagggggtacaggaggagaggcttggaaccgagcccacctctgaaactcaggatgagcttcagcggctattgggcctgctgagagaccaggacccactgagcgaggagcagatgcagggcctgtgcattgagctgaacgactttattgtggctctgtcaagcgtccagcctagcgctaaacgagaaggtttcgtcacagtacctaatgtcacatgggccgatatcggcgccttagaggatatcagagaagaactcacaatggccatactggcgccagtcaggaatcccgatcagttcaaagccctcggccttgttacacctgccggggttctgctggctggcccccctgggtgtgggaagactctgcttgccaaggctgttgctaatgagtcaggtctcaatttcattagcgtaaaaggccccgaacttttgaacatgtacgtcggggaatctgaaagggcggttcggcaggtctttcagcgggccaagaactctgccccttgcgtgatcttcttcgatgaagtcgacgctctctgccccaggcgatccgatcgagagacaggcgcctctgtgagagtcgtgaaccagctgctcacagaaatggacggcctggaagcacgtcagcaagttttcattatggccgcaaccaaccgtcctgacattatagacccagccattctcagacctggaagacttgacaaaacgctgtttgtcggactgccgccccctgccgatcgccttgccattttgaaaactatcaccaagaatggaacaaaaccaccactagacgccgatgtaaatctggaagcaattgccggggaccttaggtgcgactgttacaccggagccgacctgtctgcactagtgcgtgaggcatcaatctgtgctttgagacaggaaatggcgcggcaaaagagcggcaacgaaaagggggaattgaaagtaagccataaacatttcgaagaggcatttaagaaggtgcggtccagcatctccaaaaaagaccagatcatgtacgaacgcctgcaagaaagtcttagccgctag

SEQ ID NO: 127048 - DNA, 1770 bp, synthetic construct
  misc_feature 1..1770: note = Description of Artificial Sequence: Synthetic coding sequence
  source 1..1770: mol_type = other DNA
atggaagattatcccgacccccagagcgctaaccacatgaatagctcccttctcagcttatatagaaaaggaaaccccgactctgtgagcaatacaccggaaatggagcagcgagagacaacatcctccaccccaagaatatcaagtaaaacgggatcaatccccctgaaaacacccgccaaggactccgagggaggatggtttatcgacaagactccctccgtcaaaaaagattcattctttcttgatctctcctgtgagaagtccaaccctaaaaagcccatcaccgagatacaagactccaaggacagctccttattggagagtgacatgaaaagaaaagggaagctaaagaacaaaggtagcaagcggaagaaggaagatcttcaggaggtggacggtgaaatcgaggcagtgctgcaaaagaaggctaaggcccgcggcctcgaatttcagatttcgaacgttaaattcgaggacgttggtggaaacgatatgacactcaaggaggtttgcaagatgctgatccacatgaggcatcctgaagtgtatcatcaccttggcgttgtaccaccccgcggggtgctgcttcacggtccacccggctgtggcaaaacacttctggctcacgcaattgctggtgaactggacctaccaatcttaaaagtcgccgccccagagattgtcagtggagtttccggagagtcagagcagaagctgcgcgagctcttcgaacaagctgtgagcaatgcgccttgcatcatctttatagatgagatcgatgcaatcaccccgaagcgtgaggtcgccagcaaagacatggaacgtaggattgtggctcaactgctcacctgcatggacgacttgaataatgtggccgctacagcccgcgtgttagtgataggagctacgaacaggccagactcattagatcccgcactgaggcgcgctggtcgcttcgatcgggaaatttgcttaggaatacccgacgaggcgagccgcgaacgtattctccaaaccctgtgtcggaaattgagactgccgcaggcttttgatttctgccatctcgcacacctaacccccggcttcgtgggcgcggacctgatggcactctgtcgcgaggccgccatgtgcgctgtaaatagagtgctgatgaagctccaggaacagcaaaaaaaaaaccccgagatggaagacctgccctcgaaaggtgttcaagaggagcgcctgggcacagagccaactagcgagacccaggacgaactccagagactcctgggtttgcttcgtgatcaggacccactgagcgaggaacaaatgcagggcctatgcatcgaactcaacgactttatagtggctctctccagtgtgcagccctctgccaagagagaggggtttgtgacggtgcctaatgtcacttgggccgacatcggcgcattggaggatatccgggaggaactcacgatggcgatactcgcacccgtccggaacccagaccagtttaaggctttagggcttgtgactccagccggcgtgctccttgccggccctcctggctgcggtaagacattactcgccaaggccgtcgccaacgagtctggactgaatttcatcagtgtgaaggggcccgagctgctgaacatgtacgtgggggaatccgaaagagctgtcaggcaggtatttcagcgagccaaaaattcagcaccttgtgttatcttttttgacgaggtcgatgctctgtgccccaggagatctgatagggaaatctag

SEQ ID NO: 127049 - DNA, 2253 bp, synthetic construct
  misc_feature 1..2253: note = Description of Artificial Sequence: Synthetic coding sequence
  source 1..2253: mol_type = other DNA
atggaagactaccccgatcctcagtccgctaatcatatgaattcctcattactaagtctttaccgcaaaggtaacccagacagcgtgtccaacacacctgaaatggagcagcgagagacaacatcatcaactccccgcatttcatctaagaccggtagtattcctttaaaaaccccagcaaaggattcagaggggggctggttcatcgacaaaactccctcagtcaagaaggatagcttctttctggacctgtcctgcgagaagagtaaccccaagaaacccataactgaaatccaggattcaaaggactcttcccttctggagtccgacatgaagagaaaggggaaactgaaaaataaaggcagtaagcgcaagaaagaggatcttcaggaggtggatggtgaaattgaggcagtacttcaaaagaaagcaaaagccagaggtctcgaatttcagatcagtaatgttaagttcgaagatgtgggcggaaatgatatgacccttaaagaggtgtgtaaaatgcttatccatatgagacaccctgaagtttaccaccacctgggcgttgttccaccgcgaggagtgttattacatggtccccctggatgcggcaaaaccctcctcgcacacgccattgcaggagagctcgatctgccgatactgaaagtagccgcccccgaaattgtctctggtgtcagtggggagtctgagcagaagctcagagaactctttgagcaggccgtgtctaatgcgccctgtatcatattcatcgacgagattgatgccataactcccaagagggaagtcgcctcaaaggacatggaacgccgaattgtggcgcaactccttacctgtatggacgatcttaataatgtcgctgcaaccgcaagggtacttgtcattggagcaaccaaccgcccagattctctggatccagcgctgagaagggctgggcgcttcgaccgcgagatctgccttggcatccccgacgaagccagccgcgagagaatattacagacactgtgtcggaaactacgcttaccccaggcctttgatttttgccacctcgctcacctgacacctgggtttgtgggagctgatctgatggctttatgtcgagaggccgctatgtgcgccgtaaatcgcgtgctcatgaagctccaagaacagcaaaagaaaaatcctgaaatggaggacttgccaagcaaaggggtgcaggaagaaagattgggtacagagccgacgtctgagacccaggacgaactgcagcggctgttgggattactgcgcgaccaggatcccctgagtgaggaacagatgcagggcttgtgcattgaactgaatgatttcatagtagctctaagctccgtgcaaccatctgccaagcgtgagggcttcgtgactgtccctaacgtgacctgggcagacattggggccctggaggatatccgggaagagctcacgatggccattttagctcccgtacgcaatccagaccaattcaaagctttgggactcgtaacgcccgctggtgtcttactcgctggccctcctggctgtggaaaaactctgctggcgaaggccgttgcaaatgagtcaggcctcaactttatctccgtgaagggccctgaactcctgaatatgtacgttggcgaatccgaaagagcagtgagacaagtgttccaacgtgccaagaactcagccccttgcgtgatcttcttcgacgaggtggatgccctttgtccaaggagatccgacagggagactggagcttcggtgcgcgtggtaaaccagctgctcactgaaatggatggtcttgaagcccgacagcaagtgtttatcatggcagcaaccaacaggccagatataattgatcccgcaattctccgcccagggcgccttgacaagacgctgtttgtggggcttccaccacctgcggacagactggccatactcaagaccatcacaaagaacgggaccaagcccccgctagatgccgacgttaacctggaggccatcgctggcgatctcaggtgcgattgttatactggcgctgacctgtcagccttagtgcgggaggcatccatctgtgccctccgccaggagatggcccgccagaagagcggaaacgaaaaaggggagctcaaagtgagtcataagcactttgaggaagcctttaagaaagtgaggtcatccatttctaagaaggaccaaattatgtatgagcgtctccaggagagtctgtctcggtag

SEQ ID NO: 127050 - DNA, 2298 bp, synthetic construct
  misc_feature 1..2298: note = Description of Artificial Sequence: Synthetic coding sequence
  source 1..2298: mol_type = other DNA
atgaagcctagaccagccggtttcgtggacaacaaactgaaacagcgcgttatccaatatttaacctccaataagtgcggtaaatacgttgatattggtgtgttggcttctgatctgcagcgcgtttactcgatcgactacggtaggcgtaagcgcaacgccttccgcatccaggtggagaaggttttttctatcatttctagcgaaaaagagttaaagaatttgacggaactcgaggacgaacatctggctaagagggcaaggcagggcgaagaggataacgaatacacagaatcatatagcgacgatgactcgtccatggaagattatccagatccccaagacagcaaagactcaagcctgctggagtccgacatgaagaggaagggaaaactgaaaaataaggggtctaagcgtaaaaaagaagacctccaggaggtcgatggagaaatcgaagcagtcctgcagaagaaggctaaggcaagaggcctggaatttcagatttcaaatgttaagttcgaggacgtgggaggcaacgacatgaccctgaaagaagtgtgcaagatgctcattcacatgagacaccccgaggtctaccatcacttgggggtggttcccccaagaggggtgctgctgcacggtccacctgggtgtggcaagactcttctcgctcatgccatcgcaggagagcttgacctaccgattctgaaggtggcggcccctgagatagtgtctggagtgagcggtgagagcgagcagaaattgcgagagcttttcgagcaggcagtgagcaacgccccttgtatcatttttattgacgaaatcgacgctattaccccaaaacgggaagtggctagcaaagacatggagcggcgtatcgtcgcacagctcttgacttgcatggacgacctgaacaatgttgctgccacggcccgtgtattagtgatcggcgccaccaatagaccagattctctggacccggctctcagaagagccgggcgctttgacagagaaatttgccttggtattcctgacgaggcctcccgcgaacgaatcctgcagactttatgcagaaaactgagactgccccaggcatttgacttctgccacctcgcacacttaacacctggattcgtcggcgccgacctcatggcactgtgtcgcgaggctgccatgtgtgccgtgaatcgagtgctcatgaaacttcaggaacagcagaagaaaaacccagagatggaggatctgccatcaaaaggtgtacaggaagagcgcctgggcaccgaaccaacgagcgagacccaggatgagttgcagcgcttattggggctgctgagggatcaggacccactgtccgaggagcagatgcagggactatgtattgagctaaatgatttcatcgtagcactctcctctgtccaaccgagcgccaaacgagaaggcttcgttacagttccaaacgtcacctgggccgatattggcgctttggaggacataagagaggagctgaccatggcaatcttggccccggtcagaaaccccgatcagtttaaagcactgggcctcgtaacgcctgctggcgtactcctggccgggccccccgggtgcggcaaaacactcctggccaaagctgtagccaatgagtctgggcttaactttatcagcgttaaggggccggagcttttgaatatgtacgtgggcgaatccgagcgcgcggtccgccaggttttccagcgggcaaaaaattctgctccttgcgtgattttcttcgacgaagtcgacgccctttgccctcggcgatctgaccgagaaaccggcgcctcggtgcgggtggttaatcaacttctcactgagatggacggtctagaggcaaggcagcaggtctttataatggccgccacaaaccgccctgacatcattgaccccgcaatcctgcggccaggacgcttagataaaacgctcttcgtcgggctgcccccgcccgctgatcggctggccatactgaaaactatcacaaaaaatggaacaaaaccacccctggacgccgacgtgaatttagaggcaattgccggcgatctgcgatgtgactgttacaccggggccgatctctcagctctcgtgcgagaggcgagcatttgcgccttgcgccaagaaatggctcggcagaagagtggcaacgaaaagggcgaattgaaggtttcccacaagcactttgaggaagctttcaagaaggtccggtcatcgatcagcaaaaaagatcagatcatgtacgaacgccttcaagaaagcctgtcaaggtag

SEQ ID NO: 127051 - DNA, 1386 bp, synthetic construct
  misc_feature 1..1386: note = Description of Artificial Sequence: Synthetic coding sequence
  source 1..1386: mol_type = other DNA
atgccaccttcagggccccgtggaacccttctcttactgcctctcctcttgctcctgctgctccgggctgtcctggcagtcccactggagagaggggcccctaataaagaggaaacaccagcaacggaatctcccgatactggactgtattaccacagatatttgcaggaagtaatcgacgtgctggagaccgacggccacttcagggagaagctgcaggctgccaacgcggaggacattaaatccggcaagctgagtagagagctggacttcgtctcccatcatgtgcggacgaagctggacgagttgaaacggcaggaggtgagcaggctccgcatgctactgaaagccaaaatggatgcggaacaggatcccaatgtgcaggtagaccacctcaacctcctgaaacaattcgaacatctcgatcctcagaaccagcacacctttgaagcgcgcgacctggaactcctcattcaaacggccacacgcgatctagcccagtatgacgccgcccatcatgaggagtttaagagatatgaaatgcttaaagagcatgaacggaggaggtacctggagtcccttggtgaggaacagaggaaggaagccgaacggaagctggaggaacaacagcgtcgccaccgtgaacatcccaaggtaaatgtgccaggcagccaggcccagctgaaagaagtgtgggaagagctcgatggactcgacccaaacagatttaatccaaagactttctttatcctacacgatataaattccgatggcgtcctggacgaacaggagctggaggctctattcacaaaagagttagagaaggtgtatgatcctaaaaacgaggaagacgatatgagagagatggaggaggaacgactgcgtatgcgagagcatgttatgaaaaacgttgatactaatcaggacaggctcgtgacactcgaggagtttctcgcctccacgcaacgcaaagaatttggggatacaggcgaagggtgggaaactgtggagatgcaccctgcctataccgaggaagagttgcgccggtttgaggaggagctggccgcgagggaagctgaactgaacgctaaggcacagcgactctcacaagaaaccgaggctcttggaagatcccaggggagactggaggcgcagaaaagggaactccagcaggctgtcctccatatggaacaaaggaaacagcagcagcaacagcagcagggccacaaggctcccgccgcccaccctgaaggacagcttaaattccaccctgacaccgatgatgtgccagtgccagcaccggccggcgatcagaaagaagtggacaccagcgagaagaagctgttggagaggctgcccgaggtggaggtgccacagcacttgtag

SEQ ID NO: 127052 - DNA, 1386 bp, synthetic construct
  misc_feature 1..1386: note = Description of Artificial Sequence: Synthetic coding sequence
  source 1..1386: mol_type = other DNA
atgcctcccagtgggccacgcggaaccctcctccttctcccgctgctgcttcttctgctcctgcgtgcagtccttgctgttcctctggaaaggggcgcgcccaacaaggaggagacacccgccacagagagtccggatactggcctgtattaccaccgctacttgcaagaagtcatagatgtgctagaaactgatggtcactttcgtgagaaactccaggccgcaaacgccgaggacataaagtctgggaaactgagtcgcgagctcgactttgtgagccaccatgtgcgtacaaaactcgatgaacttaagagacaggaagttagcaggctaaggatgctgctgaaggcaaaaatggacgcagagcaagaccccaacgtacaggttgaccatctgaacctcctcaagcagttcgagcacctagaccctcaaaaccagcatacatttgaggcacgtgatctggaacttcttatacaaacagctactcgtgatctggcccaatacgacgccgctcaccacgaggagttcaaaaggtatgagatgctgaaggagcatgaacgcagaagatatttggaatctctgggggaagagcagagaaaagaggccgagcgtaaactggaggaacagcagaggagacaccgagagcaccctaaagtcaacgttcccgggtcccaagcccagctcaaagaagtttgggaggaactggatggcctggatccgaatcggttcaatccaaagacattctttattttgcacgatatcaactccgacggtgtactggacgagcaggagctagaagccctgttcaccaaagagttagaaaaagtttatgatcccaagaatgaagaagatgatatgcgggagatggaagaggaacggctcagaatgagagagcacgttatgaagaatgtggatactaaccaagaccggttagttactctagaagaatttctggcctcgactcaacggaaggaattcggcgacaccggggaaggatgggagaccgtcgagatgcatcccgcctataccgaggaggagctccgaagatttgaggaggagcttgcagcgcgagaggccgagctgaatgccaaggcgcagcgcttgtctcaggagacagaggcactcgggcgctctcaggggcggctggaggctcagaagcgcgaactgcagcaagcagtcctgcacatggagcagcgaaagcagcagcagcagcagcaacaaggacacaaggcccccgctgcccatcccgaggggcagctgaagtttcatcctgacaccgatgacgtgcccgtgcctgcccccgcaggtgaccaaaaggaggtggacacgtcagagaagaagctccttgagcgcttgcctgaagttgaagttccccagcatctatag

SEQ ID NO: 127053 - DNA, 1386 bp, synthetic construct
  misc_feature 1..1386: note = Description of Artificial Sequence: Synthetic coding sequence
  source 1..1386: mol_type = other DNA
atgccaccctccgggccgagaggcactttgctgctgctcccactcttgttactgctcctcttacgggcggttctcgcagtgccactggaacgaggggcccctaataaagaggagaccccggccaccgagtcacccgacaccggactgtactatcatcgctacttacaagaggttattgacgtgctggaaactgacggacattttagagagaagctgcaagcagcaaatgcagaagatatcaagtctgggaagctcagtcgtgagctagacttcgtttcacatcacgtccggacaaaactggacgaattaaagcgtcaagaagtgagtagattgcgcatgctcctgaaggcgaagatggacgctgagcaggatccaaatgtgcaggtcgaccacctgaacctgctcaaacaattcgaacaccttgaccctcaaaaccaacacacttttgaggctcgggatcttgaactccttatacagacagcaacacgcgacctggcccagtacgacgctgcacatcacgaggagttcaagcggtacgagatgctgaaagagcatgaacggcgacggtacttggaaagtctcggtgaagagcagcgcaaagaggcagagcgcaagttagaggaacaacaacgaaggcacagggagcatcccaaagtgaatgttcctgggagccaagctcaactgaaagaggtgtgggaggagctcgacggtttggaccctaatagattcaatccaaagactttcttcatactgcatgacatcaattctgacggggtgctagatgagcaggagctggaggccctcttcactaaagagttggaaaaggtttacgatcctaagaacgaggaggacgacatgagggagatggaggaggaaagactgcgcatgagagagcatgtgatgaagaacgtcgacacaaaccaggaccgcttggtgactttggaagagtttctcgcaagtacacaacgtaaggaattcggggatactggcgaagggtgggagactgttgagatgcatcccgcctacacagaagaggagctgagacgtttcgaggaggaactcgcagctcgtgaggcagaattgaacgctaaagcccagagactctcccaagagactgaagctctgggtcggagccaggggcgacttgaggcacaaaaaagagaactccagcaggccgtcttacacatggaacagcggaaacagcagcagcagcaacagcagggccataaagcgcctgcggcccatccggagggacagcttaagtttcatcccgatacagatgatgttccggtgcctgcccccgccggggatcagaaagaggttgacacatccgagaagaagctccttgaacgtctccctgaagttgaagtcccacagcatctctag

SEQ ID NO: 127054 - DNA, 375 bp, synthetic construct
  misc_feature 1..375: note = Description of Artificial Sequence: Synthetic coding sequence
  source 1..375: mol_type = other DNA
atgcccccgtctggccctagaggtactctcctgcttctgccactactgcttctgctgttacttcgggccgtcctggccgtacccctggaaaggggtgctcccaacaaggaagaaacacctgcaaccgagtcacctgatacaggactttattaccatcgctacctgcaggaggttatcgacgtgctcgagaccgacgggcactttagagaaaaacttcaggccgctaacgccgaggatataaaatctggcaagctctctcgagaattagatttcgtttcccaccatgttcggaccaaattggatgaattgaaacgccaggaggtctccaggctgagaatgctgctgaaggcaaaaatggacgcggagcaggactag

SEQ ID NO: 127055 - DNA, 336 bp, synthetic construct
  misc_feature 1..336: note = Description of Artificial Sequence: Synthetic coding sequence
  source 1..336: mol_type = other DNA
atgcctccatcaggccctcggggcacactgttgttactccccctgctgcttctcctacttttgcgagccgttctggccgtgcctctagaacggggagccccgaataaagaggaaaccccggccaccgagtcccctgacacaggcctgtattatcaccgctacctgcaggaggtaatcgacgttctcgagacagatggccacttccgcgaaaagctgcaggccgccaacgcagaagatattaagtcaggaaagctgtcacgcgagttagatttcgtttcgcaccatgtacggaccaagctcgatgaactgaaaaggcaagaagtgtcaaggctgtag

SEQ ID NO: 127056 - DNA, 1263 bp, synthetic construct
  misc_feature 1..1263: note = Description of Artificial Sequence: Synthetic coding sequence
  source 1..1263: mol_type = other DNA
atgagatggagaactatcctcttacaatattgtttcttgctaataacttgcctgctcactgctctcgaggcagtgcctattgacatcgataaaacaaaggtgcagaatattcacccagtggagagtgccaaaattgagcccccagatactggtctctactacgacgaatatctgaagcaagtcattgacgttttggagaccgataagcattttcgggaaaaactgcaaaaggccgatatcgaggagataaagagcggacgtctgtcaaaggagctagacctggtgtcgcaccatgtgcggaccaagctagatgaactaaagcgccaagaggtgggtcggctgcggatgctgataaaggcaaagcttgatagcctacaggatatagggatggatcaccaggctttgctcaaacagttcgaccaccttaatcacctcaatcctgataaattcgagtccactgaccttgacatgttgattaaggctgccactagtgaccttgagcattacgacaagacaaggcacgaggaattcaagaaatatgaaatgatgaaagagcacgaacggcgggagtatttgaagacccttaatgaagagaagaggaaggaagaggagtccaagtttgaggagatgaagaagaaacacgagaaccatccaaaggtgaatcatccagggtcaaaggatcagttgaaggaggtatgggaagagacagacggacttgatcccaacgatttcgatccaaagactttttttaagctccatgacgtgaattcagacggattcttagatgaacaggagctcgaggccctgttcaccaaggaattagagaaggtctatgacccaaagaacgaagaagacgatatggtagagatggaagaagaacgactgaggatgcgcgagcatgtcatgagcgaggttgataccaataaggataggctcgttactcttgaggagttcttgaaggctacggagaagaaagaattcctggagccagacagttgggagaccttagaccaacagcagttttttactgaggaggaactgaaggaatacgagaacatcatcgcactgcaagagaatgaactgaaaaaaaaagcggacgagctgcaaaagcagaaagaggaacttcagcggcagcatgaccagctggaggcacagaaattggagtaccatcaggtcattcaacagatggagcagaaaaagctgcaacaaggaattcctccttctgggcccgcgggcgagctgaagttcgagccgcgcgtgtag

SEQ ID NO: 127057 - DNA, 1173 bp, synthetic construct
  misc_feature 1..1173: note = Description of Artificial Sequence: Synthetic coding sequence
  source 1..1173: mol_type = other DNA
atgagatggcgcacaatcctgctccagtattgttttcttttgatcacctgcttgctgaccgctttggaagccgtccccatcgacatagacaagactaaagttcagaacatccaccctgtggaatcagctaaaatagagcctcctgacacaggcctctactacgacgaatacctgaagcaggtgattgatgtcctggaaacagacaagcattttcgagaaaagcttcagaaggctgacatagaggagatcaaaagcggcaggctctccaaggagcttgacctggtctcccaccacgtacggacaaagctagacgagctgaaacgtcaggaggtcgggcgcctgaggatgctgatcaaggcaaagctggattcccttcaggacatcggaatggaccaccaagccttgctcaaacagtttgatcacctgaatcacctgaacccagacaagtttgaatcaactgacctggatatgctgattaaggcggcaacctccgacttggagcactatgataagactcgccacgaagagtttaagaagtatgagatgatgaaggagcacgaacggagagaatatcttaaaactctgaacgaagagaaaaggaaggaagaggaaagcaagttcgaggaaatgaagaaaaaacatgagaatcaccccaaagtaaaccacccggggtcaaaggaccaattgaaggaggtgtgggaggagaccgacggactggatcccaacgattttgatccaaaaactttctttaagcttcacgacgtgaactcggacggcttccttgacgaacaggagttggaggctttgttcaccaaggagctcgagaaagtgtacgatcccaagaacgaagaagacgacatggtggagatggaagaagagaggttgcggatgcgggaacacgttatgagtgaaaccctcgatcagcagcagttttttaccgaggaggaactgaaggaatacgagaacattattgctcttcaggaaaacgaactgaagaaaaaagctgatgagctgcaaaagcagaaagaggagttgcagaggcagcatgatcagctagaagcccagaaattagagtaccatcaagtgatccagcagatggagcagaagaagctccagcagggcatccctccttccgggccggctggggaacttaagttcgaaccccacatttag

SEQ ID NO: 127058 - DNA, 210 bp, synthetic construct
  misc_feature 1..210: note = Description of Artificial Sequence: Synthetic coding sequence
  source 1..210: mol_type = other DNA
atgcggtggagaaccatccttctccagtactgtttccttctaattacatgcctattaacagccctggaggccgtgccgattgacattgacaaaaccaaggtccagaatatacaccctgttgaatcagccaaaatcgagccacccgataccggcttatactacgacgaatatctgaagcaggtgattgatgtgttggaaacggacaaatag

SEQ ID NO: 127059 - DNA, 105 bp, synthetic construct
  misc_feature 1..105: note = Description of Artificial Sequence: Synthetic coding sequence
  source 1..105: mol_type = other DNA
atgcgctggagaactatcctcctacagtattgcttcttgctgatcacctgtctgcttactgctctcgaggccgttcccatagacattgacaaaaccaaagtttag

SEQ ID NO: 127060 - DNA, 1263 bp, synthetic construct
  misc_feature 1..1263: note = Description of Artificial Sequence: Synthetic coding sequence
  source 1..1263: mol_type = other DNA
atgcgctggcgtaccattctgcttcaatactgcttcctgctgataacctgcctattgacagccctggaagcagtgcctatcgatattgataagaccaaggtgcagaacatccaccccgtagagtccgccaaaatcgaaccccccgatacggggttgtattatgatgaatacctaaaacaggtgatcgatgtccttgagaccgacaagcacttcagggagaagctgcagaaagcagacatcgaggaaattaagagtggcaggctgagcaaagagctggatctggtcagtcatcatgtgaggaccaagctcgacgaactaaagcggcaggaagtgggaaggctaagaatgcttataaaggcgaagctcgattcgttacaggatatcgggatggatcaccaagctctgcttaagcagtttgatcatctgaatcacctaaatccagataagtttgagagcactgaccttgacatgttgattaaggcagcaaccagcgacctcgagcattacgataagacgaggcatgaagagttcaagaaatatgaaatgatgaaagagcacgagcgccgggagtacttaaaaacgctcaatgaagagaagaggaaggaggaggagtctaaattcgaagagatgaagaagaaacacgaaaatcatcctaaggtgaaccacccaggcagtaaggatcaactgaaggaggtgtgggaggagacagacggcctggaccctaacgatttcgacccaaagaccttcttcaagctgcacgatgtgaatagcgatgggtttctggacgagcaggagctggaggcactgttcaccaaagagcttgaaaaggtatacgatcctaagaacgaggaggatgacatggtcgagatggaagaggagcgactaaggatgagggaacacgtgatgtcagaggttgataccaacaaggaccgtttggtcaccctggaagagttcctgaaggccaccgagaagaaggaattcctcgagccagactcatgggagacactggatcagcagcagtttttcacagaggaggaactaaaagagtatgagaacataatcgcattgcaagagaatgagctcaaaaagaaggcggatgagcttcagaagcagaaagaagaactccagcgacaacacgatcaactcgaggcccaaaagctggagtatcatcaggtgatacaacagatggaacaaaagaaattgcagcaaggcataccaccctccggccccgcgggtgagcttaaattcgagcctcacatctag

SEQ ID NO: 127061 - DNA, 588 bp, synthetic construct
  misc_feature 1..588: note = Description of Artificial Sequence: Synthetic coding sequence
  source 1..588: mol_type = other DNA
atgaggtggcgcaccatcctcctgcaatattgttttctcctcatcacctgtctgctgactgctcttgaggccgtgcctatcgatattgataaaactaaagtacagaatatccaccccgtggagtcagctaagatcgagccacccgatactgggctatactatgacgagtatcttaaacaggtgattgatgtgctcgagactgataagcacttcagagaaaaacttcagaaggccgacattgaagaaatcaagagcgggcggctgtccaaggagcttgaccttgttagtcaccacgtccgaaccaagttggatgagctgaagcggcaagaggttgggcgtttgaggatgcttattaaggccaaattggattccctgcaggatatcgggatggaccatcaggcgctactgaaacagttcgatcacctaaatcacctcaaccctgacaagtttgaaagcacagacctggacatgctgattaaagccgccacctcagatctggaacattatgacaagactcggcatgaagaatttaagaagtatgagatgatgaaggagcacgagagaagagaatacctgaaaacactctag

SEQ ID NO: 127062 - DNA, 597 bp, synthetic construct
  misc_feature 1..597: note = Description of Artificial Sequence: Synthetic coding sequence
  source 1..597: mol_type = other DNA
atgcggtggcgtaccatattgctacaatactgtttcttgctgatcacgtgcttgttgacagctctggaagctgttccgatcgatattgataagacaaaagtccagaatatccaccctgtcgagtcagcaaaaatcgagccccctgacactggactgtattatgacgagtacctaaagcaggtcatcgatgtcctggaaaccgataaacactttcgggagaagcttcaaaaggccgatatcgaagaaataaaaagtggacggctgagcaaggaactggatctcgtcagtcatcacgtgcgaacaaagcttgatgagctgaagagacaggaggtaggaagactgcgaatgctgatcaaagcgaagctagactctctgcaagacataggtatggatcaccaggccctgctgaagcagtttgaccacctgaaccatctgaatccagacaagtttgagtctacagacttggacatgttgatcaaggcggccacatctgatttggaacattacgacaaaacccgccacgaagaatttaagaaatacgaaatgatgaaagagcacgaacgcagggaatatttgaagacccttaatgaagagtag

SEQ ID NO: 127063 - DNA, 105 bp, synthetic construct
  misc_feature 1..105: note = Description of Artificial Sequence: Synthetic coding sequence
  source 1..105: mol_type = other DNA
atgagatggaggacaatcctgctacagtattgctttctactcattacctgcctgttaactgcactggaagccgtcccaatcgacatcgacaaaacgaaagtctag

SEQ ID NO: 127064 - DNA, 120 bp, synthetic construct
  misc_feature 1..120: note = Description of Artificial Sequence: Synthetic coding sequence
  source 1..120: mol_type = other DNA
atgaggtggaggaccatactcctgcagtactgttttcttctcattacctgcctactgacagccctggaggccgttcctattgacatcgataagactaaggtgcagaatattcacccctag

SEQ ID NO: 127065 - DNA, 210 bp, synthetic construct
  misc_feature 1..210: note = Description of Artificial Sequence: Synthetic coding sequence
  source 1..210: mol_type = other DNA
atgcggtggcgcactatcttgctacagtattgcttccttttaattacctgcctgttgaccgccttggaagccgtaccaattgacatcgacaagacaaaggtccagaacatacaccccgttgaatcggccaagattgaaccccccgatacaggattgtattacgacgagtacctcaagcaggtgatcgatgtgcttgaaacagacaagtag

SEQ ID NO: 127066 - DNA, 273 bp, synthetic construct
  misc_feature 1..273: note = Description of Artificial Sequence: Synthetic coding sequence
  source 1..273: mol_type = other DNA
atgcgctggcgtaccattttgctccagtattgcttcctcctgattacctgtctactgacggctctggaagctgtgcccatcgacattgacaagacgaaagtccaaaacatccatcctgtagagtccgcgaaaatcgagcccccagataccggcctttactatgatgagtatctgaaacaagttatagacgtacttgaaactgataagcatttccgggaaaaactccagaaagctgatatcgaagagatcaaaagcgggcggctgtcaaaatag

SEQ ID NO: 127067 - DNA, 1323 bp, synthetic construct
  misc_feature 1..1323: note = Description of Artificial Sequence: Synthetic coding sequence
  source 1..1323: mol_type = other DNA
atgattatcccatctttggaagagctcgacagcctgaagtactctgatctacagaacttggctaaatcgctcggactgagggctaacttgcgtgcaaccaagttattgaaggctctcaaaggatacatcaagcatgaagcaagaaaagggaacgagaatcaggatgagtcccagactagcgcttctagttgtgatgaaaccgagattcagattagcaaccaggaggaagcggagcgccagcctctaggccatgttaccaaaacgcggcgaaggtgtaaaaccgtgcgggtggatcccgatagtcaacagaaccacagcgaaattaagatatccaaccctacagaatttcagaaccacgagaaacaggagtcccaggatctgagggctactgcgaaagtgcctagcccgccagatgaacaccaggaggcagagaatgctgtgagctccggaaaccgtgactccaaagtaccctccgaaggaaagaaaagcctatatacagacgagagctctaagcccggcaaaaacaaacgcaccgccatcaccacaccaaattttaagaagttgcatgaggcgcactttaaagaaatggagagcatcgaccagtatattgaaagaaagaaaaagcacttcgaagagcacaactctatgaatgaattaaaacagcctataaataagggaggcgtgaggacaccggtcccaccccgggggagactgtctgtcgcctcgacccctattagtcagaggcgcagccagggaagaagctgcggaccagcctcacagtcaacactcggcctgaagggctccctgaagcggagcgccatcagcgcggctaagaccggcgtgcggtttagcgcagccactaaggacaacgaacacaagcggagcctgacgaaaacccctgcgcgcaaaagcgcacacgtgaccgtgagtggcgggacccccaagggagaggccgtactgggaacacacaagttgaaaaccattaccggaaatagcgcagcggtcattacaccattcaagctgaccactgaggcgacccagactcctgtgagcaacaaaaagcctgtgtttgacctgaaagcctcactctcccgcccgctgaactatgaaccacataaaggaaagctcaagccttgggggcaatccaaagaaaacaactaccttaatcagcacgtcaaccgaattaatttttacaagaagacctataagcagccgcacttgcagactaaggaagaacagagaaagaaaagagaacaggaacggaaagaaaaaaaggccaaagtactcggcatgcgccgcggcctgatattagcagaagactag

SEQ ID NO: 127068 - DNA, 1209 bp, synthetic construct
  misc_feature 1..1209: note = Description of Artificial Sequence: Synthetic coding sequence
  source 1..1209: mol_type = other DNA
atgatcattccttcgctggaggaactggattcactcaagtattccgacctccagaatctcgctaaaagcctcggactcagagccaatttaagagccacaaaactcttgaaggcactgaaggggtacatcaaacacgaggcgagaaaggggaatgaaaatcaggatgagtctcagacttccgcttcatcatgcgacgaaaccgaaatacaaatctcaaaccaggaggaggccgagagacagcctctggggcacgtgacaaaaactaggcgcaggtgcaagaccgtgagggtggacccagactcccagcagaaccattcagaaattaaaatcagcaaccccaccgagttccaaaatcacgaaaaacaggagtctcaggaccttcgggcgaccgccaaggtgccttccccccccgatgagcatcaagaagctgagaacgccgtgagtagcggaaacagggacagcaaggtacccagcgaaggtaaaaaatcactctacaccgatgaaagttctaaacccggcaagaataagaggaccgcgatcactacacctaactttaaaaaattgcacgaggcacacttcaaagagatggaatcaatagaccaatacatcgagaggaagaagaagcacttcgaggagcataattccatgaatgaactcaaacagcagccaattaacaagggtggcgttagaacacccgtccctcctcgaggtagactgagtgtcgcctctactccaatctcacagagacgcagccagggccggtcctgtggccctgcctctcagtcaaccctaggcctgaaggggtccctgaaaaggtcagccatttctgccgccaagacaggggtgaggttctccgccgccacaaaagataacgagcataagcgctcgctgacgaagacaccagcgcggaaatccgctcacgtgactgtcagtgggggtacacccaaaggggaagcagtcctagggactcacaagctcaagactatcacaggtaactcggctgctggcaagttgaagccttggggccagagtaaagagaataattatcttaaccagcacgtcaatcggattaacttctacaagaagacttataagcagccgcacctgcaaaccaaggaggagcagaggaaaaagagggagcaagagaggaaggaaaaaaaagctaaggttctgggcatgcgcagagggctaatattggcagaggactag

SEQ ID NO: 127069 - DNA, 1326 bp, synthetic construct
  misc_feature 1..1326: note = Description of Artificial Sequence: Synthetic coding sequence
  source 1..1326: mol_type = other DNA
atgattataccatcactcgaagagttggacagcctgaagtactccgatttgcagaatttagctaagtccctaggtcttagggctaatctgagggccacaaaattactcaaggcattgaagggttatattaagcatgaagcgagaaaagggaatgagaaccaggatgagtcccagacctcggcctcatcgtgtgacgaaaccgagattcagatttctaatcaagaagaggccgagagacagccgctcggccatgtaacgaaaaccagaagacggtgtaagaccgtgagggtggatccggatagtcagcagaatcactctgagatcaagatcagcaaccctacagagtttcagaaccacgagaagcaggaaagtcaggatctacgggccaccgctaaggtaccatctcctcctgacgaacaccaggaggccgagaacgcagttagcagcggaaacagagactcgaaagtgccttctgaggggaagaagtcgctgtatactgatgagagttcgaagccaggcaaaaacaagcgcaccgctatcacaactcccaacttcaaaaagctacatgaggcccatttcaaggagatggagtccatagatcagtatatagaacggaaaaagaagcacttcgaagaacacaactctatgaacgagctaaaacaacaacctatcaacaagggtggtgtgagaaccccggtaccaccccggggacggctcagtgtcgccagcacccccattagtcagagaaggtctcagggaaggagttgtggacctgcctctcagagtaccctgggactaaaaggaagcctcaagagaagcgcaatttctgctgcaaaaaccggagtccgctttagcgccgcgaccaaagacaacgagcacaagaggtcccttactaagacaccagctagaaagtctgcccatgttacagtgagtggtgggacccccaagggcgaagcagtgttgggaacacataagctgaaaaccatcacaggaaactcggcagccgtgattacaccttttaaactgactaccgaggccactcagacccccgtgtccaataagaagcctgtctttgacctaaaagcctccttgtcacgcccgctgaattacgagccgcataaagggaaattaaagccctggggacagagcaaggagaataattacctaaaccagcacgtgaaccggatcaacttctataagaagacttataagcaaccccatctccagactaaggaggaacagaggaaaaaaagggagcaggagcgaaaggaaaagaaagcgaaggttctgggtatgaggcggggccttatcctggcagaagactag

SEQ ID NO: 127070 - DNA, 1323 bp, synthetic construct
  misc_feature 1..1323: note = Description of Artificial Sequence: Synthetic coding sequence
  source 1..1323: mol_type = other DNA
atgataattccaagcctggaggagctcgacagcttgaagtactccgaccttcagaaccttgctaaatcgctgggcctgagggctaacttgagagccacaaagcttctgaaggcacttaagggatatattaagcacgaggcaagaaaaggaaacgaaaaccaggacgagagtcagacatccgcgtctagttgcgatgagacagagatccagatcagcaatcaagaggaagctgagaggcaaccattaggccacgtgacaaaaacaagacgtcggtgcaagaccgtaagagtggatccagacagccagaatcactcagaaatcaaaatatccaaccctacggaattccaaaaccacgagaagcaggaatcccaggatctccgtgctactgcaaaagttccatctccaccagacgaacatcaggaggcggagaatgcggtctcctctggaaaccgggattctaaggtcccatctgagggcaaaaagtcgttatacacagatgagagttctaaaccagggaagaataaacgcacggccatcaccacccccaacttcaagaaactgcacgaagcacacttcaaagaaatggaatccattgatcagtacattgaaaggaagaagaaacactttgaagaacacaacagcatgaacgagctaaagcaacagcctataaataaaggaggcgtacgaacaccggttccgccacgagggagactgtcagtggccagcaccccaatttcacagcgccggagccagggccgcagctgcggtcccgcatcccaatccactttaggattaaaaggctctctgaagcgatccgcaatctccgctgcaaagacaggagtgcgcttttctgcggccaccaaggacaatgagcataagaggtcccttaccaagacacctgcccgcaaaagcgcgcatgtgactgtgagtggcgggacgcctaagggtgaggcagtgctgggaacccataaacttaagactatcaccggcaacagtgccgccgtgatcacgccattcaaacttaccacagaagctactcagacgccagtgtccaataaaaaacctgtcttcgatttgaaggccagtctgtccaggcctctaaattatgaacctcataaagggaagctcaagccgtggggacagagtaaggagaataactatctgaaccaacacgtgaaccggatcaatttttacaagaagacctacaaacagccacatctgcaaaccaaggaagaacaacgaaagaagagagagcaggaacggaaagaaaaaaaagcgaaagtcctggggatgcggcgcggactgatcctggctgaggattag

SEQ ID NO: 127071 - DNA, 1320 bp, synthetic construct
  misc_feature 1..1320: note = Description of Artificial Sequence: Synthetic coding sequence
  source 1..1320: mol_type = other DNA
atgataatcccatcccttgaagaactggatagtttgaaatactccgacctccagaatttggccaagagcctggggttaagagccaaccttcgggctacaaaacttctgaaagctctgaagggttatatcaagcacgaagcgcgaaaagggaatgagaatcaagatgagtcacagacctcggcaagctcttgcgacgagacagagatccaaattagcaatcaggaggaggccgaaaggcaaccactcggacacgtcaccaagacacgccggaggtgcaaaactgtcagagtcgaccctgactctcagaatcattccgagatcaagataagcaatcccactgagtttcaaaatcatgaaaagcaggagtcacaggatctaagggctaccgccaaggtcccttcaccccccgatgagcaccaagaggctgagaacgctgtgtcatccggaaaccgcgactcgaaggttccttccgaggggaaaaaatcactttacaccgatgagagcagtaagccaggcaagaacaagcggacggccatcactactcctaatttcaaaaagttacacgaggcccatttcaaggagatggaaagtatcgatcagtatatagagagaaaaaagaaacacttcgaagagcacaacagcatgaatgagcttaaacaacccatcaacaaagggggggttaggacaccagtgcccccacgcgggaggctctccgtggcatctaccccaatctcccagcgccgcagccagggacgatcatgtggcccagctagtcagagtaccttgggcttaaaggggagcttgaagagatctgcaatctctgccgccaagactggagtgcgtttctcagccgcaactaaggacaatgagcataaacggtccctgacaaagacgcctgcgcggaagagcgcgcatgtaacagtgtctgggggcactcccaaaggagaagctgtcttgggcacgcataaactgaagacaattaccggcaattcggcagctgtcatcactcctttcaagcttacgaccgaagccacccaaacccctgtgtccaacaagaagcctgtgtttgacctaaaagcgagcctatcccgcccattaaactacgagcctcataaaggaaagctgaaaccatgggggcagtccaaagagaacaactacctgaaccaacacgtaaatcgcattaacttctacaagaagacatataaacagccacacctgcagacaaaggaagaacagagaaagaaacgggagcaggagcgcaaggaaaagaaggcaaaagtgctaggcatgcggaggggcctgatcctggcggaagactag

SEQ ID NO: 127072 - DNA, 1281 bp, synthetic construct
  misc_feature 1..1281: note = Description of Artificial Sequence: Synthetic coding sequence
  source 1..1281: mol_type = other DNA
atgatcattccttccctggaggaactcgattctttaaagtacagtgacctccagaacttagcaaagagcctcggtttgcgagctaacctgcgagccacgaagctgcttaaggccctgaagggctacattaagcatgaagctcgaaagggtaatgaaaatcaagacgagagtcagactagtgcttcttcatgcgatgaaaccgagatccagatatccaatcaggaggaggcagagcgccagcctctgggccatgtgacaaagacgaggaggcggtgtaaaacagttcgggtggacccggactcccagaatcacgaaaaacaggagtctcaggatcttcgggcaaccgccaaagtgccttcccctccagacgagcaccaagaggctgagaacgccgtgtcatccggaaatcgcgactccaaagtgccttctgagggaaagaaatcactgtataccgatgaatcctcaaaacccggtaagaacaaacgtactgcaatcaccacacctaatttcaagaaactccatgaagcccatttcaaagaaatggagagcatcgatcagtatatagagaggaagaagaagcatttcgaagagcacaatagcatgaacgaactgaaacagcagccaattaacaaaggcggggtgcgcacgcccgtaccaccgcgaggccggttgtctgtggctagcacacccatcagtcaacggaggtcgcagggacggtcgtgcggtcctgcttcccagtcaactctcgggctgaaaggcagtctgaaaagaagcgcaataagtgccgctaaaaccggtgtgcgattttccgccgctacgaaggacaacgaacacaagcggtcactcactaagactccagctagaaagtccgctcacgtaacagtgtccggtggcacccctaagggtgaggcggttctcggcacacacaagttgaaaaccattactgggaactcggcggccgtgatcacccctttcaagctgaccactgaagccacacagacaccagtcagtaacaagaagcctgtctttgacctcaaagcctccctgtccagacccctgaactacgaaccccacaagggtaagctgaaaccctgggggcagtccaaagagaacaactatctgaaccagcacgtcaataggatcaatttctataaaaagacttacaagcagcctcaccttcagaccaaggaggagcagcgcaaaaaaagagaacaggagcggaaggagaagaaagccaaagtgctggggatgaggagagggctgatcctggccgaggattag

SEQ ID NO: 127073 - DNA, 2250 bp, synthetic construct
  misc_feature 1..2250: note = Description of Artificial Sequence: Synthetic coding sequence
  source 1..2250: mol_type = other DNA
atggccgccgccggttcccgcaagcgtcgcctcgctgagctaacagtcgacgagtttttggcttctgggtttgattcagaatcggaatctgagagcgagaacagcccacaggcagagaccagagaggcacgcgaggctgcgcgctctcctgataaacccggcggatccccatcagcctcacggagaaagggaagagcctcagagcacaaagaccagcttagcagactgaaagatagggatcctgagttttataagttcttgcaagagaacgatcagagcctgctgaacttctcagactctgactcttcagaggaggaggaagggcccttccactccctgcccgatgtccttgaagaagcatctgaagaggaagacggagccgaagaaggagaagatggcgacagagtgccgagggggctcaaggggaaaaaaaactctgtccccgtcacagtcgctatggtggaaaggtggaagcaggccgccaagcagaggttgactcctaaactgttccatgaggtggtgcaggcttttcgcgcagcagtcgctaccactcgcggggatcaagaatctgcagaggccaataagttccaggttactgactctgcagcatttaacgccttggtgactttctgtatcagggacctaataggctgtttgcaaaagctgttattcgggaaagtggccaaggacagctctcggatgcttcagccgtctagcagtcctctgtggggtaaactgcgggtggatataaaggcgtacctcggctctgccatccaactagtgtcatgcttgtcggagactacggtgctggccgccgtgctcagacacataagtgttttggtgccttgctttcttacctttcctaaacagtgccgtatgctccttaagagaatggtgatcgtttggtccacgggggaggaatctctcagagtgctcgccttcctggtattgtctcgcgtgtgccgtcacaagaaggatacatttctcggacctgtgctgaagcagatgtacattacgtacgtgagaaactgcaaattcacctctcccggcgctcttccttttatatctttcatgcagtggacacttaccgagttgcttgcactcgagcctggagtagcctatcagcacgctttcttatacattcgccagctggctattcacctgagaaatgcgatgactactcgtaaaaaagaaacatatcagtccgtctataattggcaatacgtgcactgcctttttttgtggtgtcgcgttctgtcaacggctggcccgtctgaggctctgcagccactggtttaccccctcgcgcaagtgatcattgggtgcataaaattgatacctactgcccgattttacccactcaggatgcactgtatccgcgccctgacactgctgagtggcagctccggggcatttatccctgttctaccatttatccttgaaatgtttcagcaggtggacttcaaccggaaaccaggacgtatgtcctctaaaccgatcaacttctcagtgatactaaagttaagtaacgtgaatctgcaagaaaaggcgtaccgggacggtctggtagaacagttgtacgatctcactcttgaatacttgcacagccaagcacattgcattgggtttccagagctggtgctgcctgtggtgcttcagttgaaatcctttttaagagagtgcaaggttgctaactactgtcgtcaagtccagcagctcctcggtaaggtgcaagagaattctgcgtatatctgtagtagacggcaacgcgtctctttcggcgtttccgagcagcaggccgtggaggcatgggagaagcttactagagaagaagggacgcctcttacactctactactcacactggcgcaaattgcgagatcgcgagatccagctggaaatttcgggaaaggagaggctcgaggacctgaatttccccgaaatcaagagacgaaaaatggctgacaggaaagacgaagatcgaaagcagttcaaggacctatttgatctaaacagtagcgaagaagatgataccgaaggcttcagtgagcgtggcatattgcgacctttaagcaccaggcacggtgtggaggacgatgaagaagacgaggaggaaggagaggaggactcgtccaactccgaagacggggaccccgacgcggaggcagggttagcccccggggagcttcagcagctcgcacagggccccgaggacgagctggaggacctacaattatctgaagatgactag

SEQ ID NO: 127074 - DNA, 2403 bp, synthetic construct
  misc_feature 1..2403: note = Description of Artificial Sequence: Synthetic coding sequence
  source 1..2403: mol_type = other DNA
atgaaattccgacggaacaagaagcaaattccttctttcaggaagctaattaagacatccaaggtcaagctggagaacaaactgaaaaacaaacagttcaagcagcagagcacattgaagaaatacagaaaggagcagcgaaaactgcgtcaggctgtgaaagatgccgtgtctaagaagccaatcccgctcgaaaacccaaaagaaaaaagacccgggaagaggattgaaagggaagaggaggaggaggaggaggcgcttcccctggacatgatggacgaagacgatttgcagttgatgaaggaccttggccagagagtgtcatttctgacccgagacctgtccagcagcgagccagtccacgccaagaagagaaagcacgaacggatcatcgacaaatatgagaagatacctcgcacacttcagacggctcctgagaaggaacttattcacctgttgcccatcaaagacaagtcagggatcataccccagactcgcgaaaaacctgtgaccgattcaaataaggacgaggaggatcaagaggaggagcgcgagttagaggaggagataattgaggatcctattcaggaacttactattgaggaacacctgatcgagaggaaaaaaaagcttcaggagaagaaaatgcatatcgctgcgctggctagcgccatcctgtctgaccccgagaacaatattaaaaaattgaaggagttgcgctcaatgcttatggaacaggatccagacgtggccgttacagtgcgcaagttagtgatagtatcccttatggaactctttaaagatatcacaccatcatataagatccgccccctcaccgaagccgagaaatctaccaagactcgcaaagagacccaaaaactgagagagttcgaggaaggtttagtaagtcagtataaattctacttagaaaatctagagcaaatggtgaaagattggaaacagaggaagctgaagaagagcaacgttgtatcattaaaggcctacaaaggactcgccgaggtggctgtaaaatctctgtgcgagcttctggtcgccctaccccacttcaatttccataataatatcatcgtgctcattgtccctttgatgaatgacatgagcaaactcatttccgaaatgtgctgcgaggcggtaaaaaagctgttcaaacaagataagctgggccaggctagtctgggcgtcataaaagttatatccggcttcgtgaagggacgtaactatgaagtgaggcccgaaatgctgaagacttttctttgcttaaggattaaggaggttgaagtgaaaaaggacacggaggatatcaacaagcccaaaaagtttatgaccttcaaagagaagcggaaatctcttagccgaatgcagaggaagtggaagaaagccgaggagaagctcgagcgggaacttcgggaagcagaagcaagtgagagtactgagaagaagctgaaactgcatacagagacattgaacatcgtcttcgtgacatacttccgcattctaaaaaaagctcagcggagccctttgctgcctgccgtcctggaagggctggcaaagtttgcgcaccttatcaatgtggagtttttcgatgatctgctagtcgttctgcacacattaattgagagcggagatctctcctatcaggaatccctgcactgtgtccagaccgcatttcatatactgagtggacaaggagacgtcctaaatattgacccacttaaattttacacacatctatataagaccttgttcaagctgcacgcaggagctactaatgagggagtagaaattgtgctgcagtgcctagacgtgatgctgaccaaaagacggaaacaggtcagccagcaacgagctcttgcatttatcaaaagactttgtactctggccttacatgttttacccaatagtagcattgggatcctcgcaaccactagaatactgatgcatacttttcctaagacagacctgctcttggatagcgaatcccagggcagcggggtgttcctgccagaattagacgaacccgagtattgcaacgctcagaatactgctctatgggagctccatgccctgagacgtcattatcaccctattgtgcagagattcgccgctcatctgatcgctggcgccccttccgaaggcagcggggcacttaagcctgaactctcgaggcggagcgcaactgagcttttcgaagcctatagtatggcagaaatgacttttaacccccctgttgagagtagtaatccgaagatcaaaggcaagtttctgcagggggatagcttcttaaacgaggaccttaaccaactcatcaaacgctactcttcagaggtggccactgagtctcctctggacttcaccaagtatctcaagaccagcctacattag

SEQ ID NO: 127075 - DNA, 2403 bp, synthetic construct
  misc_feature 1..2403: note = Description of Artificial Sequence: Synthetic coding sequence
  source 1..2403: mol_type = other DNA
atgaaggcaaggcgcaataagaaacagataccttcctttcggaagctgatcaagacatctaaggtgaagctcgaaaacaagctgaaaaacaaacagttcaaacagcagagcacgctgaagaagtacagaaaggaacagaggaagctgagacaggctgtcaaagatgccgtgagtaagaaaccgatcccattagaaaaccctaaggaaaagcggcccggaaagcggatcgagcgtgaagaagaggaagaggaggaggctctgccactcgacatgatggacgaggacgacctgcagctcatgaaggacctcggccagagagttagcttcttgactagggatctgtcctctagcgaacccgttcatgccaagaagagaaagcacgaacggatcattgacaagtacgagaagatccccagaacactacagacagcgccagagaaagagctgatccatctgctccccatcaaggacaagagtgggattatcccgcagacacgagaaaaacccgtgacggacagtaacaaggacgaggaagaccaggaagaggagagggagctggaagaagaaatcattgaggatcccatacaggagctgactattgaggaacacctcatagagcggaagaagaagctgcaagagaagaagatgcatatcgctgcgcttgcgtccgctatcctgtctgaccctgagaataatattaagaagcttaaggaactgaggtctatgctgatggagcaagatccagatgtggcagtgaccgtaaggaagctggtgatcgtttcgctgatggagcttttcaaagatattacaccctcgtacaagatcagacccctgactgaggccgagaaatcaactaagacgaggaaagagactcagaagctccgtgagtttgaggagggcctggtgtcgcagtataagttttacctggaaaatctggagcagatggtgaaggattggaagcagcgcaaactgaagaagtccaacgtggtaagcctgaaagcctataaaggtctcgcagaggtggccgttaagtccctgtgcgagctcctggtggccttgccacatttcaactttcacaacaatattatagtattgatcgtccctctgatgaatgatatgtccaagcttatcagtgaaatgtgttgcgaggctgtgaagaagctgtttaagcaggataaactggggcaggccagcctcggagtaatcaaggtcatctccggtttcgtgaaggggaggaattatgaggtgagaccagagatgctgaaaaccttcctgtgtcttagaatcaaagaggtggaagtgaagaaggatacagaagatatcaacaagcccaagaagtttatgaccttcaaagagaagaggaaaagtctgagtcggatgcagcgtaagtggaaaaaagcagaggagaaactagaaagagagctgcgggaagccgaggcctctgagagcaccgagaaaaagcttaagctgcacaccgagactttgaatatagtgtttgtgacatactttagaattctaaaaaaagctcagcgctctccgctcctgccagccgttctggagggtctagctaagtttgcccatttgattaatgtcgaatttttcgacgatctgcttgtcgtgttgcatacccttatcgaaagtggggacctctcctaccaggagagcttacattgcgtccaaaccgctttccatatcctttcgggccagggcgacgtactcaatattgacccactcaaattctatactcacctgtacaagacattgttcaaactgcatgccggggccactaatgagggcgtcgagatcgttctccagtgtttagatgtgatgctgacgaagcgaagaaaacaggtgtcgcagcaacgagccctcgctttcattaagaggctttgcactctcgccctgcatgtgctgccgaactctagcattgggatcctggctactacgcggattttgatgcacacatttcccaaaaccgaccttttgctagatagtgagtctcagggaagcggtgttttcctgcccgaactggacgagccggaatattgtaatgctcagaacactgcactgtgggaactgcacgccctccgtcggcactaccatccaatcgttcagaggttcgcggcacatctgatagccggcgccccttccgaaggcagcggagccctgaagcctgagttgagcaggaggtcagcaaccgaactgtttgaagcttactccatggccgagatgacgtttaatccacccgtggaaagttcaaatcccaaaattaagggaaagtttctgcagggcgactcgtttctgaacgaagatttaaaccagctcataaagcgctattcatccgaggttgctacagagtcaccattagacttcaccaaataccttaagacatcactccattag

SEQ ID NO: 127076 - DNA, 1506 bp, synthetic construct
  misc_feature 1..1506: note = Description of Artificial Sequence: Synthetic coding sequence
  source 1..1506: mol_type = other DNA
atggaattatttaaggatataactccctcatataaaattcgacccttgaccgaagcagagaagtctaccaaaacacggaaggaaacacagaaactcagagaattcgaggagggactggtctctcaatataagttttaccttgagaacttggagcagatggttaaggactggaaacaaaggaaactgaagaaatccaatgttgtaagcctgaaagcctacaagggattggccgaagtggccgttaagtccctctgcgaattactagtagccctgcctcacttcaacttccacaacaacatcatcgtgctcatcgtgccgctgatgaatgatatgtcaaaactgatctctgagatgtgctgtgaagctgtgaagaagctgttcaaacaggacaaactgggccaggcctcacttggggtgattaaggtcattagtggattcgtgaagggacggaactacgaggtacgacccgaaatgctgaagacatttctctgtctgcggattaaggaggtggaggtgaagaaagataccgaggatatcaacaagccaaagaaatttatgactttcaaagagaaaaggaaaagtttgagtcgcatgcaacggaaatggaagaaggctgaagagaaactggagagagagctgagggaagcagaggcatcggaatccacagaaaagaagctgaaattgcatacagagactttgaatatagtgttcgtgacgtattttaggatactgaagaaggctcagcggtccccgttactgcctgcagttctggagggactggcaaaattcgctcacctgatcaacgttgaattcttcgacgatctgctggttgtcttacacactctcattgaaagcggcgacctgagctaccaagaatctctccactgcgtgcaaaccgctttccacattctctcgggccagggggatgtcctgaacatcgacccgctgaaattctatacacacctctacaaaaccttgtttaagcttcacgctggggccactaacgagggggtggaaatcgtattacagtgccttgatgtgatgcttacaaagaggagaaagcaggttagccaacaacgcgccttagcctttatcaagcggctctgcacgctggccctacacgtgctgcctaattcaagcattggcatccttgccacaacacggattctgatgcacacctttcccaaaaccgacttactcctggactctgaatcccagggtagcggggtgtttctgcccgagctggatgagccggagtactgtaatgcccaaaataccgctctgtgggagctgcacgcacttagaagacactaccatccaattgtgcagagattcgccgctcacctgatagccggggcacctagcgaaggtagtggcgcactaaagcccgagctgtcaaggagatctgccacggagttatttgaagcctatagtatggcggaaatgacctttaacccaccagttgagtcttccaatccaaagatcaaggtaacaacgaagggatag

SEQ ID NO: 127077 - DNA, 1551 bp, synthetic construct
  misc_feature 1..1551: note = Description of Artificial Sequence: Synthetic coding sequence
  source 1..1551: mol_type = other DNA
atggaaagagaaccaggcgccgcgggcgtccgcagagccctggggaggcgcctggaggccgttttagcgtccaggagcgaagccaacgctgtatttgacatcctggccgttttgcaatctgaggatcaggaagaaattcaggaagctgtacgaacttgtagcaggctgttcggtgcactgctcgaacggggcgagctgttcgtcggccagctgccatcagaggaaatggtcatgacgggcagccagggagcaacccggaagtacaaggtatggatgaggcaccggtatcattcctgttgcaatcggcttggcgagctgctggggcatccatcatttcaggttaaggaacttgcgctttccgccctactgaaatttgtccagcttgagggcgcacacccccttgaaaagagtaagtgggaaggtaattatctattcccacgcgaactgttcaagcttgttgtgggagggctattaagccccgaggaagaccaaagcctactcttgagtcaattccgagagtatctcgactacgacgatacacggtaccacacgatgcaagccgccgtcgacgcagtggctagggtgaccgggcaacatccagaggtcccacccgccttttggaataacgcttttaccctcttgagtgcagtcagcctgccgaggagagaacccaccgtgagtagtttctatgtcaaacgggccgaactgtgggacacctggaaagttgctcacctaaaggagcatcgaagggtctttcaggctatgtggctctcctttcttaaacacaaattacctctgtccttatacaagaaggttctgttaatagtccatgatgcaatcctcccccagctggcccagccaaccctaatgatcgattttctgaccagagcctgcgacctcggcggggcactatccttgctcgccctgaatggccttttcatattaattcataagcacaacctcgagtacccggacttctacagaaaactgtatggtttactcgatccttccgtgttccacgtgaagtacagagcacgtttttttcatctcgccgatctatttttgagttcttcccacctgccagcctatttggttgctgccttcgccaaaagactggccaggctcgctctcaccgctccaccggaggcactgctcatggtactaccgtttatttgtaatttactgagaaggcacccagcatgccgcgtcctggtgcaccgcccccatggtcccgagctggatgcagacccatacgacccgggtgaagaggatccagcacaatcccgggccctcgaatctagtctctgggaactccaggccctgcaacgacactaccatcctgaggtcagcaaggcggcgtccgtgatcaatcaggcattgtccatgccagaagtttccatcgcgccgctcctggaattaaccgcctatgaaatttttgagcgcgatctcaaaaaaaaaggccctgaaccggtccccctggagtttatccccgcccaggggcttcttggccgcccaggcgaactctgcgcccagcactttactttgagctag

SEQ ID NO: 127078 - DNA, 252 bp, synthetic construct
  misc_feature 1..252: note = Description of Artificial Sequence: Synthetic coding sequence
  source 1..252: mol_type = other DNA
tagccggaggagctgacgttcgcttctgctcaggccgaggcgagagaagaggagaggcgtgtaagagaaaccgtgaggagagataaaaccctgctcaaagaaaagcgcaaacgccgagaggagctcttcatcgaacagaagaaaaggaaactgctccctgatacaattctggagaaactgacaaccgcttcccagacgaatattaaaaaaagccccggtaaagtcaaggagggtatgactattttgatctag

SEQ ID NO: 127079 - DNA, 774 bp, synthetic construct
  misc_feature 1..774: note = Description of Artificial Sequence: Synthetic coding sequence
  source 1..774: mol_type = other DNA
atggtgcaactgaggccccgagcctctcgcgcccccgcctcagccgaggctatggtcgatgaggggcagttagcgagtgaggaggaagaggcagagcatgggctcctcctgggacagccctccagcggagccgccgctgagccactcgaggaggacgaagagggggatgacgagtttgatgatgaagcccccgaagagctcactttcgcttcggcgcaggccgaagctagggaggaagagcgtcgtgtgcgggaaaccgtgcgacgggataaaactctcctgaaagagaagaggaagcggcgcgaagagttgtttatcgagcaaaaaaagcggaaactgttaccagataccatcctcgaaaaactgacgactgcatcgcagaccaacatcaagaagtcaccgggaaaagtgaaggaggtgaatctgcagaagaagaatgaagattgtgagaagggtaacgactcgaagaaggtaaaggttcagaaggtgcaaagtgtgtcccagaacaagagttacctggcggttcgacttaaggaccaagacctccgggacagccgtcaacaagccgcccaggcctttatacacaatagtctgtacggcccagggacaaatagaacgacagtgaataagtttcttagcctggccaataaaagactgccagtgaagcgcgccgccgtgcagttcctgaacaacgcatgggggattcaaaaaaagcaaaacgcgaagaggtttaagcggcggtggatggtcaggaagatgaagactaaaaaatag

SEQ ID NO: 127080 - DNA, 3300 bp, synthetic construct
  misc_feature 1..3300: note = Description of Artificial Sequence: Synthetic coding sequence
  source 1..3300: mol_type = other DNA
atgagcgtattgaataaaaccaaatggaagggaggaacccttcagattcagcttgccaaggagtccttcctgcatagacttgcccaggagcgagaagctgccaaagccaagaaagaggagtcaacgacagggaatgccaacctgctggagaagaccggcggcgtcgattttcatatgaaagccgtccctggcactgaagtccccggtcacaagaattgggtcgtgtctaagtttggccgcgtattacccgtgttacacctcaagaaccaacataagcggaaaatcattaaatatgacccgtccaagtactgtcataatttgaagaaaattggagaggacttcagtaacaccattcctatctcctccttaacttgggagctagaaggggggaatgatccaatgtccaagaaacggcgtggtgaattttccgattttcacggaccacccaagaagattatcaaggttcagaaggacgagagcagcactggctcattggccatgagtacacggccacgtagagttatagagcgcccccccttaactcagcagcaagcagcacagaagcgcacatgcgactcaattaccccctctaagtccagtcctgtgcccgtcagcgatacccaaaaactgaaaaacctgccgtttaagacaagcggactggagaccgcaaagaaacggaacagtatctccgatgatgacacggactctgaggacgagcttcgaatgatgattgccaaagaagagaacctgcagcgcacaacacagccaagtattaatgaatctgaaagtgatccattcgaagtcgtacgggacgacttcaaaagtggcgtgcataaacttcatagcctcatcggactggggattaaaaatcgagtctcctgtcatgactctgacgatgacattatgaggaacgatagagagtacgacagcggggatacggatgagatcatagctatgaaaaagaacgtagcgaaagtgaagaactccactgaattctcacaaatggagaagtccactaagaagacatcatttaagaaccgcgaaaattgcgagctttctgaccactgcattaaactccagaaaagaaaaagcaatgtcgagtccgcactttctcacggacttaagagcctcaatcgcaaatcaccctcccactcatccagctccgaagacgccgacagtgctagcgagctggcggattccgaaggcggagaagagtataacgccatgatgaagaactgccttagagtcaatcttactttggctgacctggaacagctggcgggttccgacttaaaagtcccgaatgaggataccaagagcgatggcccagaaacaaccactcagtgtaaattcgacagaggctccaagtcgccgaagacaccaaccggcctgcggagaggccgtcagtgtattcggcccgctgagatagtggctagtctactcgagggggaggaaaatacctgtggcaagcagaagcctaaggaaaataacctgaaaccaaaatttcaggcattcaagggggttgggtgcctctatgagaaggaatctatgaaaaagtctctgaaagattcggtcgcttcgaataacaaggaccagaattctatgaagcatgaagatccttctattatctcaatggaggacggatctccttacgtcaatgggtccctcggagaagtcactccatgtcagcacgcaaagaaagcaaatggcccaaactacatccagccccaaaaacgtcagaccactttcgaatcacaggacaggaaggccgtgtccccatcatccagcgaaaagaggagcaagaaccccatctcacgtcctctggagggcaaaaaaagcctcagcctgagcgccaaaacgcacaacatcggatttgataaggactcttgccatagtacaaccaagactgaggcatcccaggaagagcggtcagatagtagtggattaacctccttgaaaaaatccccgaaagtcagcagcaaggacacacgagaaattaaaaccgatttctcattaagcatcagcaactcttcagacgtgagcgctaaggataaacacgctgaggacaatgagaaacgcctcgccgccctagaggcccgacagaaggccaaagaggtgcagaaaaaactagtccataatgctttagccaacctcgacggtcaccctgaagataagcccacacatattattttcggtagcgacagcgagtgcgaaaccgaggaaacatccacgcaggaacagtctcacccgggtgaggagtgggtgaaagaatctatgggcaagacttctgggaagctgttcgactctagcgatgatgacgagtccgattctgaggacgatagcaacaggttcaagatcaagccacagtttgaaggacgggcaggccagaagcttatggacctgcaaagccattttggcactgacgacagatttaggatggactcaagattcctcgagaccgattctgaggaggagcaagaagaggttaacgagaagaagacagcagaagaggaggaattagccgaggaaaaaaagaaagcacttaacgttgtgcaatctgtgctgcaaattaatctatccaatagcaccaatagagggagtgtggcagccaagaagttcaaggacatcatccactatgaccccacaaagcaggatcatgccacatacgaaaggaagagagatgataaaccaaaagagagcaaagcaaagcggaagaagaaaagggaagaggccgaaaaactgccggaggtatctaaagaaatgtattataacatagccatggacctaaaggaaatcttccagactactaaatataccagtgagaaagaggaaggcaccccatggaatgaggactgtggcaaagagaagcccgaggagattcaggacccagcagccctgacttctgatgccgagcagcctagcggcttcacttttagcttttttgattccgatacgaaggacataaaagaagaaacataccgcgttgaaaccgtgaagcccggtaaaattgtctggcaggaagacccaagactgcaggactctagctccgaggaagaagatgtcacggaagagactgaccatcggaactctagcccaggtgaggctagtctgcttgaaaaggaaacaacccgattttttttcttctccaagaatgacgagcgactgcaaggcagtgacctgttttggcgcggagtgggcagtaatatgtctcgcaattcatgggaggcacgaaccacgaacctccgaatggattgtcggaagaaacataaagacgccaaacgcaagatgaaacctaagtag

SEQ ID NO: 127081 - DNA, 3396 bp, synthetic construct
  misc_feature 1..3396: note = Description of Artificial Sequence: Synthetic coding sequence
  source 1..3396: mol_type = other DNA
atgaaagtgaatcgagagacgaagagactttacgtgggtgggctatctcaggacatctctgaagccgacctgcagaaccaatttagccgctttggagaagtatcggatgtggagattatcactagaaaggacgatcagggaaacccccaaaaagtcttcgcatatatcaacataagcgtcgcggaagcagacctaaaaaagtgcatgtccgtcctgaacaaaactaagtggaaggggggcaccttgcagatccagctggcgaaagagtctttcctgcacagactggcacaggaaagagaggctgctaaagcaaagaaagaggagagtacaaccggaaacgccaatctactggagaaaactggcggagtggacttccatatgaaagctgtcccaggaacagaagtgccaggacacaaaaactgggtcgtgtccaagtttggaagagttctccctgtccttcatctcaagaatcagcataagcatctccgaaatatcatcaaatacgacccttctaaatattgtcataatctaaaaaagattggtgaggatttttcaaatacaatcccaatatcaagcctgacctgggaactggagggaggaaacgatccaatgtccaagaagcggcgcggcgagttctctgatttccacggcccccccaagaagattataaaagtgcaaaaagacgaaagcagcactgggagcctggcaatgagcacccgacctaggagagtcatcgagaggccacccctcacacaacagcaggctgcacagaagcgaacttgcgactcaattactccatctaagtccagccctgtacccgtcagtgatacccagaagctcaaaaacctgccctttaaaacatcaggcttggagacggcaaagaaaagaaactccatttcagatgacgacaccgattctgaagatgagctccgtatgatgatcgcaaaggaggagaacctgcagcgcactacccagccgtcaatcaacgagtcagagtccgaccccttcgaggttgtgagagacgattttaagtccggagttcacaagctgcactccttgatcgggttgggcatcaagaacagggtgagctgtcacgattccgatgacgacattatgaggaatgaccgggagtatgatagcggggataccgatgaaattattgccatgaagaagaacgtggcgaaggtcaaaaactccaccgagttcagtcagatggagaaatctacaaagaagacctcctttaaaaatcgcgagaattgcgagctctcagaccattgcatcaaattgcaaaagcgaaagagcaacgtcgaatccgcgctgtcccatgggctgaagtctttgaaccgtaagagccctagccacagctctagctccgaggacgcagattctgcatcggaactggctgactctgaaggcggcgaagagtacaacgccatgatgaaaaattgccttagggtcaatctgaccctggctgaccttgaacagctggcgggatccgaccttaaagtgcccaatgaagacacaaaatccgatgggcctgaaaccacaacgcagtgcaagttcgaccggggcagtaaatcaccaaaaactcctactggtcttcggcgcggacggcagtgcatccggccagccgagattgtggcatcgctgcttgaaggcgaagaaaatacatgcggaaagcagaagccaaaagaaaataacctaaaaccaaaattccaggctttcaagggagttgggtgcctgtatgaaaaggaaagtatgaaaaagtcacttaaagattccgtcgcttccaacaacaaggatcagaactcgatgaagcatgaggaccctagcatcattagcatggaagacggatccccttacgttaatgggtccctcggtgaggtcacaccatgccagcacgctaagaaagctaatgggcctaactacattcaacctcagaagcgccaaaccacatttgagagtcaagatcgcaaagccgtgtcaccctcgtcgtccgagaaacgttctaagaaccctatatctcgccccctggaaggcaagaaaagcttatctctgagtgcgaaaacccacaacatcggatttgataaggattcctgccattcaactacgaagacagaggcttcccaggaagaacgtagcgacagctctgggttgacctctctgaaaaaatctcctaaagttagttctaaagatactagagagatcaaaactgattttagcctgtccatctctaacagctctgacgtgagcgcgaaggataaacatgcggaggataatgagaagagactggctgcattggaggcgaggcagaaggcaaaggaggtgcagaagaaattagtgcataatgcattggcaaacctcgaaagcatgggcaaaacctccggcaagctcttcgacagttctgacgacgatgagtccgactcagaggatgacagtaaccggtttaagataaagccccaattcgagggtagggccggccagaaacttatggacctgcagtctcatttcggtaccgatgatcggttcaggatggacagccgatttctcgaaacagacagcgaggaggagcaggaggaggtcaacgagaagaagacagcagaagaagaagagttggccgaggagaaaaagaaagcattaaatgtggtgcagtctgttctgcagattaacctgtctaacagtactaatcggggttccgttgccgccaaaaaattcaaggatatcatccattacgatcccacaaagcaggaccacgccacgtatgagaggaagagggatgataagccaaaagagtcaaaggctaagagaaaaaagaaacgagaggaggccgagaaactccctgaagtcagcaaagaaatgtactacaacattgcaatggatctgaaggagattttccagaccaccaagtacacgagcgaaaaagaagaaggcaccccttggaatgaggactgcggaaaggagaagccagaggagattcaggatccagccgcccttaccagtgacgcagagcagccttcaggatttaccttttccttcttcgacagtgacaccaaagatattaaggaggagacctacagagtggaaactgtaaaaccaggcaagatcgtgtggcaggaagaccctcggctgcaggattcatccagcgaggaggaggatgtgaccgaagaaacagaccacagaaatagctcacctggcgaggcaagcctgctagagaaagaaactacgcggtttttctttttcagcaagaatgacgagaggctccaggggtcggatttgttctggaggggagtgggatcaaatatgagcaggaatagctgggaagcgaggaccactaacttgaggatggattgccgcaaaaagcacaaggatgccaagagaaaaatgaaacctaagtag

SEQ ID NO: 127082 - DNA, 777 bp, synthetic construct
  misc_feature 1..777: note = Description of Artificial Sequence: Synthetic coding sequence
  source 1..777: mol_type = other DNA
atgaaggtcaacagagagactaaaagactctacgttggcggcttgagccaggacattagcgaggcagatctacaaaaccagttttccaggtttggggaggtgagcgatgtggaaattataacccggaaggatgatcaggggaatcctcagaaagtgtttgcttatataaacatttcagtggccgaggcagatctgaagaagtgcatgagcgtcctgaataagactaagtggaaggggggtactctgcagattcagttagcaaaagagagttttttacatagactggcacaagagcgcgaagctgcgaaggccaaaaaagaggagagtactaccggcaacgctaaccttctggagaagactggaggggtggattttcacatgaaggccgtccctggcacagaggtacccggccacaagaattgggtagttagcaagttcggaagggttctgccagtgctccatttgaaaaaccagcacaagagaaagattattaagtatgatccctccaagtattgtcataacttaaagaagattggggaagatttctctaacacaataccgatatcctcactgacgtgggaactcgagggaggcaacgatccgatgtctaaaaaaagaaggggcgaatttagcgacttccatggcccacccaaaaagataatcaaagtgcagaaggatgaatcatcaacaggctctctcgccatgtctacaaggcccagacgcgtcatcgagcgcccccctctgacacagcagcaagccgcccagaaacggacctag

SEQ ID NO: 127083 - DNA, 2913 bp, synthetic construct
  misc_feature 1..2913: note = Description of Artificial Sequence: Synthetic coding sequence
  source 1..2913: mol_type = other DNA
atgaaagtgaacagggagacaaaacgcctttatgtaggcggcttgtcccaggacatctcagaggctgaccttcaaaaccagtttagcaggttcggcgaggtgagtgatgtagagatcatcacacgtaaagatgatcagggtaatccccaaaaagtgtttgcatatatcaatatctctgtggcggaggccgaccttaagaaatgtatgtccgtgctgaataaaacaaagtggaagggaggaacactccagattcaactcgccaaggagtcctttctgcacagactagctcaggaacgtgaggctgcaaaggccaagaaagaagaatccactaccgggaacgctaacctccttgagaaaacaggcggagtcgactttcacatgaaggcggttcccgggacagaagtccctggtcataagaactgggtggttagcaagttcggacgagtgttgcccgttctgcacctgaaaaatcagcataaaagaaaaattattaagtacgatcctagtaagtactgtcacaacctgaaaaaaatcggggaggatttcagcaataccatccctatttcatcccttacatgggagctcgaggggggaaacgatcctatgtctaagaaacgtagaggagagtttagtgatttccatggtccccccaagaaaataattaaagttcagaaagatgagagtagcactggctcattggcgatgtcaacgaggccacggcgagtgatagaacgacctccactcactcagcagcaggccgctcagaagcgcacatgcgactcgatcacaccgtctaaaagcagtccggtgccagtgtcagatacacagaagctcaaaaatctgcccttcaagaccagtgggctcgagacagccaaaaaaagaaattccatcagcgatgacgacaccgacagtgaggatgagctacggatgatgatcgcgaaagaggaaaacctgcagcggaccacccagcccagcatcaatgaaagcgaatccgaccctttcgaggtcgtccgggacgatttcaaaagcggggtccataaactgcattccctcatcggcctaggcatcaaaaatagggtgagctgccatgactcggacgatgatataatgcgaaatgaccgagagtatgatagcggcgacacggacgagattattgcgatgaagaagaatgtggctaaagtcaaaaactccactgaatttagccagatggagaaaagcacaaagaagactagcttcaaaaatagggaaaattgtgagctgtcggatcactgcatcaaactccagaaacgcaagtcgaatgtcgaaagtgcactcagccacggtctaaagagtctaaatagaaagagccctagccatagctcctcatccgaggacgcagatagcgcatccgaattggctgactccgaagggggcgaagagtataatgcaatgatgaaaaattgtctcagagtcaatctgacattggccgacctggagcagctcgctgggagtgatcttaaggtccccaatgaagacaccaaaagcgacggccctgaaaccacaactcagtgcaagttcgaccgaggttccaaaagccccaaaactcctactggactccgtcgaggccgtcagtgcattagacctgcggagatagtcgccagtcttctggagggtgaggagaacacatgtggtaaacaaaaacccaaggagaacaacttgaagcccaagtttcaggcattcaagggggtcggttgcctctacgaaaaggagagcatgaagaagtccctcaaagattctgtggcttccaacaataaggaccagaattccatgaaacacgaagatccttcaattatcagcatggaggatgggagcccctatgtcaacggaagccttggtgaagtgacgccctgtcaacacgcgaagaaagccaatggcccaaattatatccagccccagaaaaggcagacaacctttgagagtcaggacagaaaagcagtgtccccctctagcagcgagaagagatccaaaaacccaatcagcaggcctcttgaaggtaagaaatcattgagcctgagtgcaaaaacccacaacattggatttgataaggattcatgccacagcacaacaaagaccgaagcatcacaggaagagagatctgatagcagcggtcttacttcactcaagaagagccctaaagttagctcaaaggacacacgtgagattaagactgattttagcctctctatatcaaactcctcagatgtatcagcaaaggacaagcacgccgaagataacgagaagaggcttgcagctctagaagcccggcagaaggcgaaagaagtgcagaaaaagttggtgcataacgccctggccaatctggatggacaccctgaggacaagccaactcatataatattcgggtctgacagtgaatgtgagacagaggagaccagtactcaggaacagagccacccaggagaagaatgggtgaaagaatctatgggtaagactagcggtaagctcttcgattcgagtgacgatgacgagtctgactcggaggatgattctaaccggttcaagatcaagcctcaatttgaggggcgggcaggacagaaacttatggatctccagtcgcattttggtaccgatgaccgctttagaatggacagtagattcctagaaacagactccgaggaggaacaggaagaagttaatgaaaaaaagactgctgaagaggaagagctcgccgaggagaagaagaaagccctcaatgtcgtgcagtccgtgctgcagattaacctatcaaactcgactaatcgcggtagcgtcgccgccaaaaagttcaaagacatcattcactacgatcctaccaagcaggatcacgccacctacgagcggaagagagacgacaagccgaaggagtctaaagcgtag

SEQ ID NO: 127084 - DNA, 1242 bp, synthetic construct
  misc_feature 1..1242: note = Description of Artificial Sequence: Synthetic coding sequence
  source 1..1242: mol_type = other DNA
atgaaagtcaatagggagaccaagcgtctctacgtcggggggttgagtcaggatataagcgaagccgatctgcaaaaccagtttagcaggttcggcgaagtgtctgatgtcgaaattattacacgcaaagacgaccagggaaatccacaaaaagtatttgcgtatattaacatttccgtcgcagaagcagaccttaagaaatgtatgtccgtactgaacaagaccaagtggaagggtggaaccctgcagattcagctggctaaagagtcttttctacatcgtctggcccaagagcgggaggcagccaaagccaagaaagaggagtctacaactggaaacgcaaatctcctggaaaaaacgggaggggtggattttcacatgaaggccgttcctggcaccgaagtaccaggtcacaagaattgggtcgtgagcaaatttggtcgagtgctgcctgtgttgcacttaaaaaatcaacacaagcgtaagatcataaaatacgacccctccaaatactgtcataatctaaagaagattggggaggacttttccaataccatcccaatctccagccttacttgggagctggagggaggcaatgaccccatgtcaaagaagaggcggggcgaattcagcgatttccacggacctcccaagaagatcattaaggtgcagaaggacgagtcatcaacaggatctctggctatgtctactcgacctcgccgcgtaatcgaaagacctccactcacccagcagcaggcagcccagaaacgaacctgtgactctattactccttccaaaagctcacccgttccagtgagtgacacccagaagcttaagaacctcccatttaaaacttcagggcttgagacggcgaagaagcggaacagcattagcgacgatgatacagacagtgaggatgagctacggatgatgatcgccaaggaagagaatctgcagcggacaacacaacctagtataaacgaatcagagtctgacccattcgaggtagttcgggatgactttaagtctggagtgcacaaactccattccctgattggcctggggatcaagaatagagtgtcttgtcatgactcagatgacgatattatgcgtaatgaccgggaatacgattctggcgacaccgacgagataattgccatgaaaaaaaatgttgcaaaagtgaagaatagcacggagttcagccagatggaaaagtcaacgaagaagacatcatttaaatag

SEQ ID NO: 127085 - DNA, 3504 bp, synthetic construct
  misc_feature 1..3504: note = Description of Artificial Sequence: Synthetic coding sequence
  source 1..3504: mol_type = other DNA
atgaaggtcaacagggaaacaaagagactatatgtcgggggcctgtcacaggacatttcagaggccgacctccagaatcaattctctcgattcggagaagtgtccgatgtcgaaataatcacgaggaaagacgaccagggcaatccccagaaggtgtttgcttacattaacatcagcgtggccgaggccgacctaaagaagtgtatgagcgtgctaaacaagaccaaatggaaaggcggtacccttcagatacagctggccaaggaaagttttttacatcgactcgcacaagagcgggaggcagccaaggccaagaaggaggaaagtacaaccggcaatgcaaatctgcttgaaaaaactggcggggtggatttccacatgaaagccgtacccggtacagaggttccgggccataaaaattgggtagtgtccaaatttggtcgcgtgctgccagtgctccacttgaaaaaccagcataagcgaaagataataaagtacgatcctagcaaatactgtcacaacctcaaaaagataggcgaagacttttccaatactattccaatcagcagcctgacttgggaactggagggagggaatgatcccatgagcaagaagcgccggggcgagttctcagatttccatggtccgccaaagaagataatcaaggtgcagaaagacgagtcctctacgggctccctggccatgtccacccgcccacgacgcgtgatcgaacgaccgccgctcactcagcagcaggctgcacagaagcggacctgtgattccattacacccagtaagtcatcacctgttcctgtctcggatacacagaagcttaagaatctgccatttaagacatctggattagaaactgcgaaaaaacgcaattcgattagtgatgatgacaccgattctgaggacgaactacgaatgatgatcgctaaggaggaaaacctgcaacgcaccacgcaaccaagcattaatgagtccgagtccgaccccttcgaagtcgtccgcgacgatttcaaaagcggcgtgcataagctccatagcctaatcggcctcggcatcaagaaccgtgtgagctgtcacgactctgacgatgacataatgcgcaacgacagagaatatgacagtggagatacagacgaaattattgccatgaaaaagaacgtcgctaaggtgaaaaatagcaccgaattttcccagatggagaaaagcacgaaaaagacttcctttaaaaacagagaaaactgcgaactttccgatcactgcatcaaactccagaagcgtaagtctaatgtagagtccgctctttcacacgggctgaaatcactgaataggaaaagtccgagccattcctcatcttctgaggacgccgacagcgcgtccgagctggctgactcagaaggaggcgaggagtataatgctatgatgaagaactgcctgagggtgaatctgaccttggctgatctggaacaattggccggatcagacctgaaggttccaaatgaggataccaagagtgacggcccagagaccaccacccaatgcaagtttgatagaggctcaaaatcccccaaaactcccacggggctgcgacggggaagacagtgcatcagaccagccgagattgtcgcttcattattagagggtgaggaaaacacttgcggtaagcagaaacctaaagaaaacaatttgaaacccaaattccaagcattcaagggagttggttgtttatatgagaaagagtcaatgaaaaagagtttaaaggattccgtagcatctaataacaaagaccagaactccatgaagcatgaagatccatctataatcagcatggaggatggctcgccttacgtgaacggctcgctgggagaggtgacaccctgccagcacgccaaaaaggccaatggccccaactatatccagcctcagaagcgacagaccacttttgagtcccaggaccgtaaggccgttagcccttctagcagtgagaaacggtctaaaaaccctatctctaggcctctagagggaaagaagtccttatccctgagcgctaagacacacaacattggctttgataaagattcctgccactccacgactaagacagaagcttcacaagaagagcgttctgacagctcaggcttgaccagtctgaagaaatcaccaaaggtgtccagcaaggacactagagaaataaaaactgatttctccctgtcaatctccaattcatccgacgtttctgctaaggacaagcatgcggaggataacgaaaagaggctcgcagccctagaagctcgtcagaaagctaaagaggtgcagaaaaagctcgtgcataatgccttggcaaacctcgatggacatcctgaggacaagccaacacacatcatctttgggtccgatagtgagtgcgaaactgaagaaacaagcacacaagaacagtcacatccaggggaagagtgggtcaaggaaagcatgggcaagacctccggcaaactgttcgactcgtcagatgatgatgaaagcgacagcgaagacgattccaatcgctttaaaatcaagccacagttcgagggacgggctggccagaaactgatggacctccaaagccacttcgggaccgacgaccgattccggatggatagccgcttcctcgaaacagacagcgaggaagaacaggaggaagtcaacgagaaaaagacagctgaagaagaagagctggctgaagaaaagaagaaggctttaaacgtagtgcaatctgtgcttcagattaacctctctaactccacaaatcgaggttccgtggctgcaaaaaaatttaaggatatcattcattacgatcccaccaagcaggatcatgctacctacgaacggaaacgggatgataagcctaaggagagcaaagcgaaacgtaagaagaaacgcgaggaggctgaaaagcttccggaagtgtcaaaggagatgtattacaacattgccatggacctgaaagagatttttcagaccacgaaatacacaagcgagaaggaagagggcaccccctggaacgaagactgtgggaaggagaaacccgaggagatccaggaccctgccgccctgacatcagatgccgaacaaccaagcgggtttaccttcagttttttcgactccgataccaaagatataaaagaagaaacatatcgcgtggagactgtgaagccgggcaagattgtttggcaggaagatcccagattacaagatagctcatccgaagaggaagatgtcaccgaggaaacagaccatcgcaatagctctccaggagaggcatctttgttagaaaaagagacaaccagattctttttcttctctaaaaatgacgaacgtctgcagggatctgacttgttctggcgcggtgttggctcgaacatgtccagaaacagctgggaagctagaacgacaaacctcagaatggactgtagaaaaaagcataaagacgcaaaaaggaagatgaaaccaaagtag

SEQ ID NO: 127086 - DNA, 438 bp, synthetic construct
  misc_feature 1..438: note = Description of Artificial Sequence: Synthetic coding sequence
  source 1..438: mol_type = other DNA
atgaaagtgaaccgtgagaccaaacgtctctacgtgggcgggctgtcccaagatatttcagaggcagacttgcaaaatcaattctcaaggtttggcgaggtctccgacgtcgagataatcaccaggaaagatgatcaggggaatccacagaaggtctttgcttatatcaatataagcgtagccgaggcagacttgaagaagtgtatgtcagtgctcaacaagacaaaatggaagggcggaacattacaaattcaactggccaaggaaagctttctgcacagactcgcacaggaaagagaagccgcaaaggccaagaaggaggaaagcactacagggaacgcaaatctgctggagaaaaccgggggagtggacttccatatgaaagcagtaccgggaaccgaggtgcctggtcacaagaactgggtcgtgagcaagtag

SEQ ID NO: 127087 - DNA, 3504 bp, synthetic construct
  misc_feature 1..3504: note = Description of Artificial Sequence: Synthetic coding sequence
  source 1..3504: mol_type = other DNA
atgaaagtgaaccgagaaacaaaacgcctgtatgtgggcggtctttcccaggatatttctgaggccgatctccagaatcaatttagcaggtttggcgaagtgagcgacgtagagatcattactcggaaggacgaccagggaaatcctcaaaaagtctttgcctatattaacatctcagtcgcggaagcagacttgaagaagtgcatgagcgtgctgaataagaccaagtggaaaggcggaactctgcagattcagttagccaaagagagctttctgcaccgactggctcaggaaagggaggccgcaaaagccaagaaagaggagagtacaacaggcaacgctaatctcctagaaaagaccggtggagtagatttccacatgaaagctgtgccgggcacagaggtcccgggccacaaaaactgggtcgttagcaaatttggccgcgttctgcctgtgcttcatctcaagaaccagcacaagagaaagattattaaatatgaccccagcaagtactgccacaatctgaagaagatcggggaggacttttccaacactatccccatcagtagtctgacatgggagcttgaagggggcaacgaccccatgagcaagaaacgacgcggagagttctctgactttcacggtccacctaaaaaaattataaaagtgcaaaaggatgagtcttcaacgggtagcttggctatgagtacgcggccaaggcgtgtgatagaacggccgcctctgacacagcaacaagctgcccagaagcgtacttgtgactcaattaccccttctaagtcctctcccgtccctgtcagcgacacacagaaactcaagaatttaccttttaagaccagcggcctcgaaaccgcgaagaagcgcaacagcatttccgacgatgacaccgattcagaagacgagctgcggatgatgatagccaaagaagaaaatctgcaacgcaccacccaaccatcgattaatgaatccgaatctgatccttttgaggtggtacgtgatgattttaaatctggggtccacaaactgcactccctgattgggctaggcatcaaaaatcgagtcagctgccacgatagtgacgacgatatcatgcggaatgacagggaatacgacagcggcgataccgacgagatcattgcaatgaaaaaaaatgtcgcgaaggtgaagaactccactgagttcagccagatggagaagtctactaaaaagacgagctttaaaaatcgtgagaattgtgagttgtcagatcattgtatcaagttgcagaaacgaaagtccaatgtggagtctgcccttagccatggccttaaatccctgaatagaaagagtcccagccatagctcttcctcagaggatgccgatagcgcctccgaactcgccgactccgagggtggagaggagtataatgccatgatgaagaactgtcttagagtcaatctaaccttagccgacctggagcaactggcaggctctgatctgaaagtacctaacgaagatacgaagtcagacggccccgaaaccacgacacagtgcaagttcgataggggtagtaaaagtcctaaaaccccaacgggtctgcggcgaggccggcaatgtattcgacctgcggagatcgttgcgtctctactggaaggagaagagaacacatgtggcaagcaaaaacccaaagaaaacaatttaaagccaaagttccaagccttcaagggcgtaggttgtctttacgagaaagagtctatgaaaaaatccctgaaagatagcgtcgcctctaacaataaagaccagaattctatgaaacacgaggacccatccattatcagtatggaggacggcagcccatacgtgaatggtagcttgggagaagtcactccctgccagcacgccaagaaggcaaacggtccaaattatattcagccacagaagcggcagaccaccttcgagtctcaagacagaaaagccgtgtcaccctcttcaagtgagaaaagaagcaaaaatccgatctcccggcctttggaagggaagaagtctctgagtctcagcgcaaaaacccataatattgggtttgacaaggatagctgccattcgacaactaagacggaagcttctcaagaggagcgctcggacagctctggtctgacttcgctcaaaaagtctccaaaagtgtcatctaaggatactagagagataaaaaccgatttttcactctcgatttcaaatagcagcgatgtgtccgctaaagataaacacgctgaagataatgagaaacggcttgccgcccttgaggctcggcagaaagccaaggaagtgcaaaagaagcttgtgcacaacgctctggcaaacctggatggccatcccgaggataaaccaactcatatcattttcgggtcggactccgaatgcgaaaccgaggaaacatcgacgcaggagcagagtcaccctggcgaagagtgggtgaaggaatcaatgggcaagacatccgggaaattatttgatagctctgacgacgacgagtcggactcagaagatgatagcaataggttcaagataaagcctcagttcgaaggcagagctgggcagaaactcatggatttgcagtcccattttgggaccgatgaccggttcaggatggattctcgctttctggagaccgacagcgaggaagagcaggaagaggtgaacgagaaaaaaaccgcggaagaagaggagctcgcggaagaaaaaaagaaggctctgaacgttgtacagtcagtcctccaaattaacttgtcaaactccactaaccgcgggagcgtggctgcaaaaaaattcaaggatattatccactacgatccaaccaagcaagaccacgccacatatgaaagaaaaagagatgataagccaaaggagagtaaggccaagaggaaaaagaagcgggaggaggctgagaagctccctgaggtcagcaaggaaatgtattacaacatagccatggatctgaaggaaatttttcaaacaacgaagtacacatccgaaaaagaggagggaactccgtggaacgaggactgtgggaaggagaagcccgaggagatccaggatccggccgctctgacatctgacgctgagcagcctagtgggttcacattttccttcttcgattccgacaccaaagacattaaggaagaaacctatcgtgtggaaacagtgaagcctggcaaaatcgtttggcaggaagatccacgcttacaggattcatcttctgaagaggaggacgtaacggaagaaaccgaccaccgcaactcctctcccggcgaagcaagcctgttagagaaggagaccaccagattcttctttttctccaaaaatgatgaacgactccaaggatcagaccttttctggcgcggagtcggaagcaatatgagtagaaattcctgggaagcccgcaccacgaatttaagaatggactgccggaaaaaacataaagacgcaaaacgcaagatgaagccaaaatag

SEQ ID NO: 127088 - DNA, 261 bp, synthetic construct
  misc_feature 1..261: note = Description of Artificial Sequence: Synthetic coding sequence
  source 1..261: mol_type = other DNA
atgaaggtcaatcgggagaccaagcgactgtacgtgggagggctgtcccaggatatttctgaggctgatcttcagaatcagttctcccggttcggagaggtgtccgacgtggaaattattactaggaaagacgaccagggcaacccccagaaagtgtttgcctatatcaacatttctgtggccgaggcggatcttaaaaagtcaattttccacgttattcagcgggattcttcggacgaagaaaactcatctattgtctag

SEQ ID NO: 127089 - DNA, 3441 bp, synthetic construct
  misc_feature 1..3441: note = Description of Artificial Sequence: Synthetic coding sequence
  source 1..3441: mol_type = other DNA
atggggccggcgcctgcaggagaacagctgaggggcgctactggagagccggaagtgatggagcccgcccttgagggaactggaaaagaaggaaaaaaggcttcatcacggaaaaggacattggctgaaccccccgccaaggggctgctgcagcctgtgaagctgtcccgggctgagctttataaagagcccacgaatgaagagttaaatcgcctccgcgaaactgaaatactgttccactcttcacttctgcgtctacaggtcgaagaattgctcaaggaggtaaggctatctgaaaagaaaaaagatcgaatcgacgctttcctccgagaggtgaatcaaagggtagtgcgagtgcctagcgtccctgaaacagagcttactgatcaggcctggttgccagccggcgtccgggtcccactgcatcaggtgccttacgccgtgaagggctgctttcgtttcctgcctcccgctcaggtgacggtggtggggagttacctactgggtacctgtatcagacccgacatcaatgttgatgttgctcttacaatgcctcgggagatactccaggataaagatgggttgaaccagagatactttcgaaagcgtgccctctatctcgcccacctagcacaccacctggctcaggacccactttttggctccgtgtgttttagctatactaatggatgccatttgaagccaagcctattactccgcccccgtggcaaggacgaacgcctggtgaccgtgagattgcatccctgcccgcctcccgacttcttcaggccatgtcgacttctgcctacaaagaataatgtcagaagcgcttggtatcgcggtcagtcaccagccggagacggctcccctgagccaccaactccgcgctataacacatgggttctccaggacacagttctcgaaagccacctgcaactcttatccactatcctcagcagcgcacaggggctgaaggatggcgttgcccttttgaaggtctggcttagacaacgggaactggataaaggccagggtggatttacgggattccttgtgagcatgcttgtggtgtttctggtgtctactcgcaagattcacactacaatgtctggctatcaggtgttgcgttccgtactccagttcctggctaccaccgatctgactgtgaacggtatatcactgtgcttgtctagtgacccaagtctccccgcactggccgatttccatcaagccttctccgtggtcttcttggactcatctgggcacctgaatctgtgtgcagatgtgacagcgagcacctatcatcaggtgcaacacgaagcacgtctgtcaatgatgctgttagattctcgggcggatgacgggtttcatctgctgctcatgacccccaagcctatgatccgagcattcgaccatgtgctccacctgcggcctctcagccgactccaggcagcttgtcacaggcttaaactttggccggaattgcaagataacggtggcgactacgtgtcggctgccctcggacccctgaccacactcctggaacaaggtctcggcgctagactcaatctgttggctcacagccggccccctgtacccgagtgggacatttcacaggaccctcctaagcacaaggatagcggaaccctgacactggggctgctattgaggccagaaggactcacaagtgtgcttgagctggggccagaggccgaccagcctgaggccgccaaattcaggcagttttgggggagcagaagcgagcttaggcgattccaggatggggccattagggaggccgtggtgtgggaggcagcttctatgagccaaaaaaggctgatcccacaccaggtagtgactcatctcctggctttgcacgcggatatccctgagacctgtgtgcactatgtcggagggcctctcgacgccctgattcaaggtctgaaggagacatctagcactggagaggaagctttggtggctgctgtgaggtgttatgacgatctgagcaggctcctctggggcctcgagggtttacctctgacagtctccgccgtccagggcgcacaccccgtcttacgctacaccgaggtgttcccgccaactccagtgcgccccgcttttagcttctacgagacactccgcgaaaggagtagcctcctgcccaggcttgacaagccctgccctgcatacgtggaacctatgaccgtggtttgccatcttgaggggagtggtcagtggccccaggatgccgaggccgtacagcgtgtccgagcagccttccaactccgcctggccgaattgcttactcagcaacacggactccagtgccgggcaacagccacgcacactgacgtgttgaaggacggcttcgtcttcagaatcagagtggcctaccagagagagccacagatcttgaaggaagttcagagccccgaaggtatgatatcccttagggatactgctgcatctctccgtctcgaaagagacacacggcaactccccctgctgacttcggctctgcacggtctgcagcagcagcatcccgcattttcaggagtcgcccggctggcaaagaggtgggtacgagctcagctgctaggggaagggtttgccgacgaaagcctcgatctggtcgccgctgcccttttccttcatcctgagccatttacgcctccgtctagcccccaagtggggtttctgcgttttctgtttctggtctccactttcgactggaagaacaatcctctgtttgttaacttaaataacgagctgactgtggaggagcaggtcgagattagatccggcttcctggctgctagggcacaattgcccgtcatggtgattgtcaccccgcaggaccgcaagaacagcgtctggacccaggatggtccctcggcacaaattcttcagcaactggtggtacttgccgctgaagccctgccaatgctggagaagcagctgatggatcctaggggaccgggggatataaggacagtctttcgtcctcccctggacatttatgatgtgctgattagattaagtccgcgtcatatcccacgccacagacaagcggtcgatagccctgctgcatcattctgccggggactgctgtcccagccaggaccctcatccctcatgcctgtgctggggtacgaccctccccaactctacctcacccagctgagagaagctttcggcgatttagctctgtttttctacgaccagcacggcggagaggttattggagtcttgtggaagcctacttcttttcagccccaaccttttaaggctagtagtacaaagggccgaatggtgatgagtaggggaggcgagctggtaatggtcccaaatgtggaagctatcctcgaggattttgcagtcctcggggagggcctggtgcagacagttgaggcccgctcagagcgatggaccgtgtag

SEQ ID NO: 127090 - DNA, 3024 bp, synthetic construct
  misc_feature 1..3024: note = Description of Artificial Sequence: Synthetic coding sequence
  source 1..3024: mol_type = other DNA
atgggcccagcaccagcaggtgaacaactgcgtggagccaccggggagcctgaggtcatggagccggcactagagggtacaggcaaggaaggtaaaaaagccagctcccgaaaacgcactcttgccgaaccaccagcgaagggtctgctccagccggtgaaactgtcacgtgccgaactgtacaaagagcctactaacgaagaattaaatcgcctgcgcgagaccgagattctgtttcactcgagcctactgaggcttcaggtagaggaactcctcaaggaagtccgactgtctgagaaaaagaaggataggatcgatgccttcctacgggaggtaaaccagcgggttgttagagtgccatctgttcccgaaaccgaattgacggaccaggcttggctgccagctggagttcgcgtaccactccatcaggtgccttatgccgtgaaggggtgctttaggttcctcccacctgctcaagtcacagtggtggggtcatacctcctcggtacctgcattagaccagatattaatgtagatgtggccttgaccatgccgcgggagatcttgcaggataaggacggactcaaccagagatactttagaaagcgggcactctacctggcacatctcgcccatcatctcgctcaggatcctctctttggctcagtgtgtttcagttacactaacggttgtcatctgaagccatctcttcttctgcgcccacggggaaaagacgagcgccttgtgacagtgaggctgcatccctgccccccaccagacttcttccggccttgtcgcttgctgcctacaaagaataatgtccggtccgcttggtacaggggccagagccccgctggtgacgggtctcccgaacctcctactccccgctacaatacctgggttctgcaggatacggtactcgaaagtcacctgcaacttcttagtaccatcctcagttcagcccagggcctgaaggacggcgtcgccctgttaaaagtgtggctgcgtcaaagagaacttgacaagggacagggtggctttacgggatttctggtgagcatgttagtggtcttcctggttagtactaggaaaatccacacaactatgtcaggttaccaagtgttgagaagcgtcctccagttcctggccaccaccgatttgacagtaaacggcatctccttgtgcctttctagcgacccaagtctgccggccttagctgattttcatcaggcattttccgtcgtattccttgacagctccggccacttgaacctgtgcgccgacgtaactgcttccacctatcaccaagtgcagcacgaagccaggctcagcatgatgctgctggatagcagagcggatgatggattccacttactcctgatgaccccaaaacccatgataagagccttcgaccatgtattacacctgcggcctctatctcgtcttcaggctgcttgccacaggcttaagttgtggccagaacttcaggacaatgggggcgattacgtttcagccgccctgggccctctaacgaccctgctagaacaaggcctgggcgcaagactgaatctcttagctcacagccgacctcctgtacccgaatgggacatttcgcaggacccgcctaagcacaaggactccggaacccttacactaggccttctcctgaggccagaaggtttaacatctgtcctcgagttgggaccggaggccgatcagcccgaggctgccaaatttagacagttctggggatctcggagcgagctgcgccgctttcaggatggtgccattagggaagcagtggtgtgggaggctgcctccatgagccaaaagagactgatcccgcatcaggtggtgactcaccttctggctctgcatgcagacattccagagacctgcgttcactacgttggcgggccgttggatgccctaatccaaggtctgaaggagacatcatcaactggagaggaagctctcgttgctgctgtgaggtgctatgatgatctgagtcgactcctgtgggggctggagggattgcctctgaccgtgtctgccgtacagggcgcccatcctgtccttcgttacaccgaggtgttccccccaactcctgtgaggcccgctttttctttttacgagactttgagagaaagatcctctctacttccaagactggataagccatgtcccgcctatgtagaaccaatgacagtggtgtgtcatttggaagggtctggacagtggccccaggacgctgaggctgttcagagagtcagagcggcatttcagctccggctggccgagctgctcacgcaacagcacggtctgcagtgcagggcaacagctacacatactgatgtgctgaaagatggattcgtgttcagaatacgagtcgcgtatcagcgggaacctcagatcctgaaagaagtccaatcacccgagggcatgattagccttcgggataccgcagcctcacttcgtctcgagagagacactagacagcttcctttgttgaccagcgctctccatggcctccagcagcagcatcctgctttcagcggagtcgctagactcgctaagagatgggtgcgcgctcagcttctgggagagggctttgccgatgagtccctggacctggtcgcagccgctctttttctgcacccggagccctttacgcctccatcaagcccccaggtgggtttcttgaggtttctgtttctggttagcacctttgactggaagaataaccccctcttcgtaaacctgaataatgagcttaccgttgaggaacaagtagagattcgcagcggattccttgctgctcgggcacagctgcccgtcatggtcattgtcacacctcaggacagaaagaacagtgtgtggacccaagatggcccatccgcccagatattgcagcagctggtcgtgctggccgccgaagctctgcccatgctggagaagcaactgatggatccacggggacccggagatattagatgggatcccgcgaagatgtggcccttctag

SEQ ID NO: 127091 - DNA, 2100 bp, synthetic construct
  misc_feature 1..2100: note = Description of Artificial Sequence: Synthetic coding sequence
  source 1..2100: mol_type = other DNA
atgggtcccgccccggcgggcgaacagctgcgaggcgccaccggggagccagaagtaatggaacccgctctcgagggtactggaaaggaagggaaaaaggctagtagcaggaagaggaccctagccgagccacctgcaaagggtctgttgcagccagtgaaactctctcgagcggagctgtataaggagccaacaaatgaggagttgaaccgcctgagagaaaccgaaattttgttccattcgtccttgcttcgtttgcaggtagaggaactcttgaaggaagtgcgcctgagtgagaagaaaaaagacaggatcgatgcctttctgagggaggtcaaccaaagggtggtgcgcgtcccatctgtcccagagactgaattgaccgatcaagcttggctgcctgccggcgtgcgggtaccattacatcaagtaccatatgccgtcaaaggctgcttcagatttctgccaccagctcaagtgaccgtggtcggctcctaccttctaggaacgtgcatcaggcccgatataaacgtggacgtggccttgaccatgcctagggagatccttcaggataaagacgggctgaaccaaagatattttcgaaaacgtgctctttacttagcccatttggcacatcacttggcccaggaccccctcttcgggtccgtgtgcttcagttataccaacgggtgtcacctcaagccgagcttactgctgcggcctcgagggaaggatgaaaggctagtgacagtccggttacacccttgtcccccacccgacttctttaggccatgtaggctgctgccaaccaagaataacgttcgctcggcatggtaccgggggcagtcccctgctggagacggttcccctgagcctcctactcctagatataatacgtgggtccttcaggatactgtgttggaaagccacctgcagttgctaagtactatactgagcagtgctcagggactaaaggacggcgtggcgctgcttaaggtctggctccgccagcgcgagctggacaagggacagggcggttttaccggcttccttgtctccatgctggtggtttttctggtctctacgcgcaaaatccatactaccatgtccggctatcaggtactccgctccgtgctgcagttcttagcaaccacagacttgaccgtgaacggaatttccctttgtctttctagtgacccatccctgcctgccctagccgactttcatcaagccttctctgtcgttttccttgatagttcagggcacctcaacttgtgtgctgacgtgacagcttccacataccaccaggtacagcatgaggctagactatcaatgatgttgcttgacagccgggctgacgatgggtttcaccttctgttaatgacaccaaaaccaatgattcgggctttcgaccacgtgctgcacttaaggccactgagcagactgcaagcggcctgtcataggttaaaactttggccagaacttcaagacaacggtggggattacgtcagcgccgccctgggaccactgaccactctgctcgagcagggcctaggcgctcgcctcaatctcttagcacactctcggcctcctgtgcctgaatgggacatttcccaagaccctccgaaacataaagattcaggcacccttacgcttgggctactgctcagaccagagggtctgacaagcgtgttggagctaggtcctgaggcggaccagccagaggctgcgaaatttaggcagttttggggtagccgctcggagctgaggcgtttccaagacggcgccattagagaggctgtagtctgggaagcggcctctatgtcccaaaagagattgatcccacaccaagtcgtcacgcacctgctggctctccatgcagacatacctgaaacctgcgtgcactatgtgggcggtcccctggatgccctgattcagggcctgaaggaagccagctcaaccaaaggtaggatggttatgtctcggggcggcgaactggtgatggtcccgaacgtcgaggccatcctagaggacttcgccgttcttggcgagggtctggttcagactgttgaagcccgttcagaacggtggactgtctag

SEQ ID NO: 127092 - DNA, 603 bp, synthetic construct
  misc_feature 1..603: note = Description of Artificial Sequence: Synthetic coding sequence
  source 1..603: mol_type = other DNA
atggtgattgtcacaccacaagaccgtaagaactcggtatggacgcaggatggccctagcgctcaaattctccagcaacttgtcgttctggcagccgaagctcttcccatgctggagaagcagctaatggatccccgaggaccaggggacatcagaaccgtgttccgtccgccgttagatatctacgatgtcctgattaggttatcgcctagacacatccccaggcacaggcaagccgtggacagccctgccgcctccttttgcagaggacttctgagtcagcccggcccgagctctctcatgccggtgctcggctatgaccccccccagctttacctgacacagcttagagaagcttttggcgatttggcactgttcttttatgaccagcacggtggggaagttattggtgtcctttggaaacccacaagcttccagcctcaaccgtttaaagcttcctccaccaagggacgtatggtgatgtccaggggtggcgaactcgtcatggtgccaaatgtggaagctatcctcgaggacttcgctgtgctaggagagggcctggtccagactgtcgaagcccgctccgagaggtggactgtgtag

SEQ ID NO: 127093 - DNA, 3072 bp, synthetic construct
  misc_feature 1..3072: note = Description of Artificial Sequence: Synthetic coding sequence
  source 1..3072: mol_type = other DNA
atggggccagcaccggcaggtgaacaactgagaggagctacaggcgagcccgaggtcatggagcccgccctggaaggaacaggcaaggaaggaaaaaaagcatcaagcaggaagagaacactggctgaacctcccgccaagggtctgctgcaacccgtgaagctatctagagcagagctgtataaggagccgaccaacgaagagctgaataggctgagagaaacagaaatcctgtttcactctagtttattgcgcttgcaagtggaagaactcctcaaagaagtgcggctgtcagaaaaaaagaaggatcggatcgacgcttttctgcgggaggtgaaccagcgggtcgtgagagtgccatctgtgcctgagacggagctcaccgaccaagcatggctccccgcgggagtgcgcgtcccgctccaccaagttccatatgccgtcaaggggtgtttccggtttcttcctcctgcccaagtcacagtggttggctcatacctgctgggcacctgtatacgacctgacataaacgtcgatgtcgccctgacaatgcctcgggaaattcttcaggataaggatggcctgaatcagcgatactttagaaaacgagctttatacctggcccacctcgctcaccatctcgcccaggaccctctattcggcagcgtctgcttttcttacaccaatggctgtcacctcaagccttccctgctgctgagaccacgtgggaaggatgaacggctggtcacagtccgcctgcatccatgcccaccacccgacttcttccgaccctgtcgactgctgcctaccaagaacaatgtgcggtctgcttggtaccggggtcagagtcccgctggtgacggatcgccagagcctccaacccctcggtataatacgtgggtcctgcaggacactgtgttagagagtcacttgcagttgctgtctaccatcctcagctcagcgcagggtcttaaagatggagtggcactactgaaggtgtggctcaggcagagggagctagacaaagggcagggcggtttcactggctttcttgtgtctatgttggtagttttcttagtgagcactcgtaagattcacaccacgatgtcgggctatcaggttctgaggtcggttctgcagttcctcgcaacaactgacctgactgtgaatggcatcagcctttgcttaagctccgatccttcgctcccagccttggccgatttccaccaggcattcagcgttgtgttcctggacagctctgggcacctcaacctttgcgccgacgttactgcctctacctaccaccaggtgcagcacgaagctcggctttcgatgatgctcctggacagtcgggctgacgacgggtttcatctcctgctgatgacccccaagcccatgatccgggcctttgaccatgtgttacatcttaggcccctgtcaagactgcaggccgcgtgccacaggctgaaactttggcctgagctccaggacaacggcggggactatgtgtctgcagccctgggcccgttgactaccctgttggagcaaggccttggtgcccgcctgaacctcctggcacatagccgtccacctgttcctgagtgggatattagtcaggaccctccaaaacataaggactccggaactctcaccctgggcctcctcctgagacccgaaggactcactagcgtgctcgagctcggccccgaagctgatcaacctgaagccgccaaatttaggcagttttggggatcacgctccgagttaagacggttccaggatggcgcaatcagggaggcagttgtgtgggaagcagcctcgatgtcgcagaagcgcttaattcctcaccaagtggttactcacctcctcgccctgcatgcagatatccctgagacttgtgtgcattacgtcggcggtccgttggacgctctgatccaaggcctgaaagaaacatcctcaactggagaggaagcactcgtagctgccgtaaggtgttacgacgacctcagccggctgctgtggggcctcgaagggcttcctctgaccgtgagtgccgtgcagggtgctcacccagtgctgaggtacacagaggttttcccccccaccccagtgcgtccagctttctctttttacgagaccctgcgggaacggagcagcttgctcccaaggttggataaaccttgcccagcatatgtggagcccatgaccgtggtctgccatctggagggaagtggccaatggccacaggatgcggaggccgtacagcgcgtgcgggctgcatttcaattacgacttgccgaattgcttacccagcaacatgggcttcagtgtcgggctactgccacccacaccgacgtgctcaaagatggtttcgtgttcagaatcagggtcgcctaccaaagagaacctcagatccttaaggaggtgcaatcacccgaagggatgatttctctcagggacaccgctgctagtttgcgccttgagagagatacgagacagttgcccttgttaacgagcgctttgcacggcctgcagcagcagcaccccgcattctccggcgttgctcgactcgccaaaaggtgggtgcgtgcacagctactgggcgagggcttcgccgatgagagtctggacctggtagcagctgcactctttctgcacccagagccattcacccccccatcctcaccccaggtgggcttcctgcgcttcctctttttagtgtctaccttcgactggaagaataacccactgttcgtaaatcttaataacgagctgactgtcgaggagcaggtcgaaatacgcagtgggtttctggccgcccgtgcccagctgccggtgatggtgatcgtcacgcctcaggacagaaaaaactccgtgtggactcaggatggaccgagtgctcaaatcctgcaacagctcgtagtcttggcagccgaggcccttcctatgctcgaaaagcagttgatggatccacgcggaccaggggacattcggatgggcccctccgagaacgtggcgctccttagccacataacggataccgagcaatggaaaggggctatctgcgtgtag

SEQ ID NO: 127094 - DNA, 3285 bp, synthetic construct
  misc_feature 1..3285: note = Description of Artificial Sequence: Synthetic coding sequence
  source 1..3285: mol_type = other DNA
atgggaccagcacccgcgggggagcagctgcgtggagcgacaggtgaacccgaggtgatggagcctgccctcgaaggcaccggaaaggaagggaagaaggctagttcccgcaagcgcaccctcgctgagccgccggccaagggacttcttcagccagtgaaactcagtagagcagagttgtacaaggaacccactaacgaagaactcaatcgcttacgcgagacagaaatcctgttccattctagcttgctgagactgcaagtcgaggaactgctgaaagaagtgcgtttgtctgagaaaaagaaagaccgcatagatgcattcctgcgggaggtgaaccaacgggtggtgcgtgtgccgtccgttcccgaaaccgaggagatcctgcaggacaaggatggacttaaccaaagatactttcgcaagcgggcactgtatctcgcccacttagcacaccatctggcccaggaccctctgtttggctctgtttgcttttcctatactaacggttgtcacttgaaacccagcctgttactccggccacgcgggaaagacgaaaggctagtaaccgtgagattgcacccctgtccgccccctgatttcttcagaccatgccggttactgcctactaagaacaacgtgcggagcgcctggtatagagggcaatcacccgcgggggacggaagtccggagccacccactccccgatacaatacctgggtgctgcaagacacagtgctggagtcacatctgcagctgttaagcacgatcttatcgagtgcccaaggattgaaggacggagtggcactgctgaaggtttggctgaggcaaagggagttagacaaagggcagggaggtttcacaggatttcttgtcagcatgctcgtggtgttcctcgtctcaacacggaagatacacacgacaatgtcggggtaccaggtgctgcgctctgtactccagttcttggccacgacagaccttaccgttaatggtattagtctctgtctcagcagtgatccttctcttccagccctggctgatttccaccaggcattcagcgtcgtctttctggattcttctggtcatttgaatttgtgtgctgacgtgaccgcctcaacctaccatcaggggtggagccttctgtggttgcaagtccagcacgaggctcgcttgagcatgatgctcctagattcaagagccgatgacggttttcacctgctgctgatgacaccaaagccaatgattagggcttttgaccatgtgctgcaccttcgtccattatcaaggctgcaagccgcttgtcacaggctgaaactctggcctgagttgcaggataatggcggggattacgtcagtgctgcactggggccgcttacaaccctgctcgaacagggcctgggggctcggttgaacttgttagctcactcccgcccgccagtccctgagtgggatatctcacaggaccctcctaaacacaaagatagtggaacccttacgctaggcctgcttctacggccggagggtctgacaagtgttctggaactgggacctgaagctgatcagccggaagcggctaagttcagacagttctggggctccaggtcagagcttagaagatttcaagatggggcaatcagggaggcagtagtgtgggaggcagcatcaatgtcccagaaacgtcttatcccccatcaagtcgtgacccacttactggcgcttcatgcagatattcctgagacctgtgtgcactatgtcggtgggcctctcgacgctctcattcagggattaaaagagactagttccaccggagaagaggctttggtggccgccgtcaggtgctacgacgatttgtcccgcctcctttggggcctggaagggttacctcttaccgtgtccgccgtgcaaggcgctcatcctgtgctgagatataccgaagtgttccctccgaccccagtgagaccagccttctctttttacgaaaccctgcgggaacggtcctctctcctgccaagactcgacaagccttgtcctgcatatgtagagcctatgacagtcgtttgtcatctcgagggaagtggccagtggccccaggacgccgaagccgttcagcgggttcgagcagctttccagttgagattagccgagctgctgacacagcagcacgggctgcagtgccgagcaactgccactcatacggacgttcttaaggacggcttcgtgttccgcatccgtgttgcctatcaaagagagccacagatcctgaaggaagtccaatcgccagaaggaatgatctcgttaagggatacagcggcttctttgagactagagagagataccagacagctgccgctgttaactagcgctctccacggccttcagcaacagcatcccgcattttctggggtcgcgcgcctggcaaaaagatgggtgagagcccaacttttgggagaagggtttgcagacgagagtctggacctcgtcgccgctgccctgttcttacaccccgagccatttacaccaccttcaagcccccaggtgggattcctcagattcctcttcctggttagtacctttgattggaagaacaatccactgtttgtgaacctgaataatgagctcacggttgaggagcaagtcgaaatccgctcaggatttttggccgccagagcgcagcttcctgtcatggtgatcgtgactccacaggatcggaaaaactctgtgtggacgcaggatgggccctcagcccaaatacttcagcagttggttgttctcgctgcagaggctctgccaatgcttgagaagcagctgatggatcccagagggcccggagatattagaacagtgtttcgtcctccactagatatttacgatgttctgatccgactgtcaccgcgtcacatccctcgacaccggcaggctgtggacagtccagctgccagcttttgtcgaggactgttgtcccagcccggacctagctcactgatgccagtgttgggctacgacccaccccaattgtacctgacccaactgagggaagccttcggagatctcgcccttttcttttacgatcagcatggtggtgaagtgatcggagttctgtggaagcctacctcttttcagcctcagcccttcaaggcttcttccactaaaggccgcatggtaatgtcccgaggcggcgaacttgttatggttcctaatgtggaggctatactggaagacttcgctgtcctcggagaggggctggttcagacagtggaagcaagaagcgagcggtggacggtatag

SEQ ID NO: 127095 - DNA, 2109 bp, synthetic construct
  misc_feature 1..2109: note = Description of Artificial Sequence: Synthetic coding sequence
  source 1..2109: mol_type = other DNA
atgatgctactagatagccgcgctgatgatggattccacttgttgctcatgactccgaaaccgatgattagggcctttgatcatgtgttgcacctgcgcccattatcccggttgcaggctgcgtgccataggctgaaattgtggcctgagctgcaggacaatggaggagactatgtgagcgccgcgcttgggcctctcaccaccttgctggaacagggcctgggcgctcggctcaatctcctcgcccactcccgcccccctgtgccagagtgggatatctcccaggacccacccaagcataaagacagcggcactctgacattaggcttgcttctaaggcctgagggccttacatccgttctcgaactgggcccagaggccgaccagccagaagcagctaaattcagacagttctggggaagccggtccgagctcaggcggttccaggatggggccattcgagaagctgtggtctgggaagccgccagcatgtctcagaaaaggctgattccacaccaggtggttacacacctgctggctttgcacgctgatatccccgaaacatgtgtgcactacgttggaggcccactagatgcgctaatacaggggctgaaggagacttcttctacaggagaggaggcactagtggctgccgtgcgctgttacgacgacctttcacggttgctttggggactagaggggctgcccctcaccgtgtccgctgttcaaggggcccatccagtgctgcgctacactgaggtgttcccacccaccccagtacggccagcgttttctttttacgagaccctgagggagcgctcctccttgctgccccggcttgataagccttgccctgcatacgtagaacccatgaccgtcgtgtgtcatctggaggggtccggacagtggcctcaagacgcggaagccgtgcagcgtgtgcgcgccgcctttcagctgcggctggcggagttactcacacaacaacacggattgcaatgccgggcgaccgcaactcacaccgatgtgctgaaagacgggttcgtgttcaggatcagagtagcctaccagcgggagccccaaatactcaaagaggtgcagagcccggaggggatgatttcgcttcgcgataccgccgcaagcctccggctcgagagggacactcggcagttaccactgctgacttccgccctccatggtctccagcagcaacatcccgcttttagcggtgttgcccgcctcgctaagcgctgggtgagagctcagctgctcggcgagggcttcgctgatgaatcactcgatctagttgcggctgcattgttcttgcacccagaacctttcacacctcctagcagtccacaggtaggctttttaaggtttctttttttagtctctacattcgattggaaaaataaccccttgttcgtgaacttaaacaatgagctgaccgtggaggaacaggtggaaatcagatcaggcttcctggctgctcgagcacagctgcccgtgatggtcatagtcacaccccaggataggaaaaactccgtgtggacccaggacgggccatccgcgcagatcctgcagcaactggtggtgctggccgcagaagcattacctatgcttgagaaacagctcatggatcccagaggacctggagacatccggaccgttttcagaccaccactcgatatatatgatgtgctcattcggctgtccccacgacacattccacgccacaggcaggccgtagactctcccgccgcctccttctgccggggattactgtcacagccaggtccttcctccttgatgccggtcttaggatacgatcccccccagctatatttgacgcaactgagggaggcgttcggtgatctcgcgctttttttctatgaccagcacgggggtgaggtcattggtgtgctgtggaaaccgacatcttttcaaccgcagccattcaaggcctcctcaactaaagggagaatggtgatgtctcgcgggggagaacttgtcatggttcctaacgtggaggccattcttgaggactttgcagtgctgggcgaaggtttggtccagaccgtggaggctcggagcgaacgatggaccgtgtag

SEQ ID NO: 127096 - DNA, 645 bp, synthetic construct
  misc_feature 1..645: note = Description of Artificial Sequence: Synthetic coding sequence
  source 1..645: mol_type = other DNA
atgaatctgtcatccgcttcctccaccgaagagaaggcagttaccacagtgctgtggggctgtgagttaagccaagagcgaaggacttggacattcagaccccagctagagggtaagcagtcatgtcgcctcttactacacactatctgcctgggggagaaggcaaaagaggaaatgcacagggtcgaaatcctgccgcctgctaaccaggaagacaaaaagatgcagcccgtgaccattgccagcctccaggcctccgttctgcctatggtgtccatggtgggagtccagctttctccccctgtaacattccagctaagagccggatctggacccgtcttcttgagcggccaggaaaggtatgaggcttccgatcttacgtgggaggaggaggaggaagaagagggcgaggaggaggaggaggaggaggaggacgatgaagatgaggacgccgacatcagcctcgaggaacagtcgcccgtgaaacaggtcaagaggctagtacctcaaaagcaggcctctgtggcaaagaaaaagaagttagagaaggaagaggaggaaatccgggcaagtgtccgggataagtcacctgtgaagaaagcaaaggctactgctagggctaaaaagccaggatttaagaaatag

SEQ ID NO: 127097 - DNA, 411 bp, synthetic construct
  misc_feature 1..411: note = Description of Artificial Sequence: Synthetic coding sequence
  source 1..411: mol_type = other DNA
atgaatctgtcgagcgccagcagtacggaagagaaggctgtaacaaccgtactctggggatgcgaactgtcacaagagcgcagaacgtggacattcagaccccagcttgagggcaaacaaagctgccgcctacttctacacactatttgtctaggcgagaaggctaaagaggaaatgcatcgcgtcgagattttgccccccgccaaccaggaagataaaaagatgcagcccgtcacaattgcctccctacaggcatctgtccttcctatggtgtcaatggtgggagtacagttatctcctcctgtgacgttccaacttagggctggaagcgggcctgtttttttgagcggacaagaacgctacgaaaaaaaagcagggaagcgaaggcgtggtaacaagagtcagagatag

SEQ ID NO: 127098 - DNA, 645 bp, synthetic construct
  misc_feature 1..645: note = Description of Artificial Sequence: Synthetic coding sequence
  source 1..645: mol_type = other DNA
atgaatctctcatctgcttcttcaaccgaggagaaggccgtgactaccgtgctttggggctgtgaactcagccaggaacgaagaacgtggacatttcgacctcaactggaggggaagcagtcttgtcgcttgctcctgcacaccatttgtctgggggaaaaagcgaaggaggagatgcacagggtggaaattctccctcctgcaaaccaggaagacaagaaaatgcagccagttacaatcgcctccctgcaggccagtgttctgcctatggtgagcatggtgggtgtgcagctctctcctcctgtgaccttccagctacgggcaggtagcgggcccgtttttctctcaggacaagaaaggtatgaggctagcgacctcacatgggaggaagaggaggaggaggaaggcgaggaggaagaagaggaggaggaggatgacgaggatgaagatgccgatatatccctggaggagcagagtcccgtgaaacaagtgaaacgcctagtaccacagaagcaggcctctgtcgccaagaaaaagaaactggaaaaggaggaggaggagatcagagctagtgtgagagataaatctcctgtcaaaaaggccaaggccactgcaagggccaagaagccaggatttaaaaaatag

SEQ ID NO: 127099 - DNA, 645 bp, synthetic construct
  misc_feature 1..645: note = Description of Artificial Sequence: Synthetic coding sequence
  source 1..645: mol_type = other DNA
atgaacctgtcttcagcatcttctaccgaagagaaggccgtgaccacagttctgtgggggtgcgaattgtctcaggaacgtcggacatggacgtttcgcccccagctcgagggaaagcaatcctgtcgactcctcctgcacaccatttgcttgggggaaaaggcaaaagaagaaatgcaccgagttgagatcttgcccccagctaatcaggaggacaagaaaatgcaacctgtgaccatcgccagccttcaggccagtgtgctgcctatggtctccatggtaggcgtccaactgtcgccccctgttactttccagctcagagcagggagtggccccgtctttctgagcggccaagagaggtacgaagcaagtgacctcacctgggaagaggaggaagaggaggagggggaggaagaagaggaggaagaagaggacgacgaagatgaagacgcagacatttcgctggaggagcaaagccccgtgaagcaggtcaagcggctcgtgcctcagaaacaagcatctgtcgcgaagaaaaagaagctcgaaaaagaagaggaagagattcgcgcctcggtgcgagacaagtctcccgttaaaaaagccaaggccacagcccgagcaaagaaaccaggatttaaaaaatag

SEQ ID NO: 127100 - DNA, 645 bp, synthetic construct
  misc_feature 1..645: note = Description of Artificial Sequence: Synthetic coding sequence
  source 1..645: mol_type = other DNA
atgaacctgtctagcgcgtccagtacagaggaaaaggccgtaacaacggttctctggggatgtgagctgtcacaggagaggcgcacgtggacgtttagaccacagctggaaggcaagcagagctgccgattgctactacacacaatttgccttggcgagaaggcaaaggaggagatgcaccgagtggagatacttccaccagctaaccaggaggataaaaagatgcagccagtgactattgcctccttacaggctagcgtgctccccatggtaagtatggttggtgtgcaactgtcgcctccagtgacctttcaactgcgcgcgggcagcggaccagtctttctgagcgggcaagagcgatatgaggcttcggatttaacctgggaagaggaagaggaagaagagggtgaagaggaggaagaagaggaagaagacgacgaggacgaagatgcagatatctcgttggaggaacagtcacccgttaagcaagtaaaaagactcgtcccccagaaacaggcttccgtggcaaagaaaaagaagttggaaaaagaagaagaagagatccgagcgagcgttagggataagagccccgtcaaaaaagctaaagctactgcaagggctaaaaagccagggttcaagaaatag

SEQ ID NO: 127101 - DNA, 537 bp, synthetic construct
  misc_feature 1..537: note = Description of Artificial Sequence: Synthetic coding sequence
  source 1..537: mol_type = other DNA
atggcggcggggacggctgctgcactggccttcctgtctcaggagtctcggacaagagcaggtggcgtggggggactgcgggtaccagccccagtaacgatggattcattctttttcgggtgcgaactctccgggcatactcgatctttcacgttcaaggtggaagaggaggatgatgcagaacacgtgctggccctgacaatgctttgtcttacagagggcgctaaagacgagtgtaatgtggtggaggtagtggcccgaaatcacgaccatcaggagatcgccgtcccagtggccaatctgaaactaagttgccagccaatgctaagtctggacgattttcagctacagccaccggtaactttcaggctcaaaagcggttcaggaccggtgcgcatcactgggagacatcagatagttactatgtctaacgatgtgtcagaagaggagagtgaggaggaagaagaggactccgatgaggaggaggtggaactctgccccatcttgcctgccaagaagcaagggggccggccctag

SEQ ID NO: 127102 - DNA, 501 bp, synthetic construct
  misc_feature 1..501: note = Description of Artificial Sequence: Synthetic coding sequence
  source 1..501: mol_type = other DNA
atgaaatatacttcatacatcctggcattccaactctgcatcgttctgggctcattgggctgctattgccaggatccatacgtcaaagaggccgagaatctgaagaaatacttcaacgcaggccactcagatgtggcggataatggaacactgtttctcgggatcctgaaaaattggaaagaggagtcagataggaagatcatgcagagtcagattgtgagtttttacttcaagcttttcaaaaatttcaaggatgatcagtcaattcagaaaagcgtcgaaaccattaaggaagacatgaatgttaagtttttcaattctaataaaaaaaaacgcgatgacttcgagaagctcaccaattattcagtgaccgacttaaatgtgcagagaaaagccatacacgaactcatccaagtgatggccgaacttagcccagcggctaagaccggaaagcgcaaaagatcccagatgctttttcggggtcgccgcgctagccaatag

SEQ ID NO: 127103 - DNA, 2061 bp, synthetic construct
  misc_feature 1..2061: note = Description of Artificial Sequence: Synthetic coding sequence
  source 1..2061: mol_type = other DNA
atgtccatgttctctgacttcctgcagagtttcttgaagcattccagctcgacggtattcgaccttgtggaggaatatgagaatatatgtggaagccaggtaaacatcctcagtaaaattgtgtcgcgagcgacgccaggcctacagaagttctctaagacagcctcaatgctgtggctgcttcagcaggaaatggttacgtggcgcttactagcatctttgtaccgcgaccgcatacaatccgccctggaggaagagtccgtgttcgcagtgactgccgtgaatgcttctgaaaagacagtcgttgaagcgctcttccagcgggacagtctcgtgcgccagagccagttggtggtggactggctggaatctattgccaaggacgagattggagaatttagtgataatattgaattctacgccaaaagcgtctactgggagaatacactgcataccctgaagcaaagacagctgactagctatgtaggcagtgttcgcccactggtcaccgagctggatcccgacgcccccatacgacagaaaatgcccctggatgacttggatcgggaggatgaagtgcggctgctcaagtacttgttcactttgattagagctggtatgacggaggaggcacagaggctctgcaagcgatgcggccaggcctggcgagccgctactctggaaggatggaagctgtaccacgaccctaatgtgaatggaggtaccgagctggaacccgttgaaggaaacccttaccgcaggatttggaaaattagctgttggaggatggcggaagacgagctatttaatcggtacgaacgcgctatctacgcagctctgtccggaaaccttaagcagctcctcccagtgtgcgacacatgggaggatactgtttgggcttatttccgcgtgatggtggattctttggtcgagcaggaaatccagaccagtgtagcaacacttgatgagacagaggagctgccaagggaatacctcggggctaactggaccttggagaaggtctttgaggagctccaggcaaccgacaagaagcgggtgctggaagaaaatcaggagcattaccacattgtccagaaatttctgatactgggggacattgacgggctgatggacgaatttagcaaatggctgtccaagtcgaggaacaaccttccaggccatctcttaaggtttatgacccatctgatcctgtttttcagaacgcttggactgcagacgaaagaagaggtatctattgaggttctgaaaacctatatccaggaagataggctaaagatcgacgtgattgattggttggtcttcgaccctgctcaacgcgctgaggccttgaagcaggggaatgccataatgcgtaagtttttggcttcaaaaaagcatgaagccgccaaggaggtgttcgttaagataccacaggactctatcgctgagatttataatcagtgtgaagaacagggtatggaaagtccacttcccgccgaggacgacaatgcaatccgtgagcacctctgtatccgcgcctacctggaggcgcacgagacctttaatgagtggtttaaacacatgaattccgtccctcagaaaccggcgctgattccgcaaccaacattcaccgagaaagtcgcccacgagcacaaagagaagaaatatgagatggattttggcatatggaagggacacctggacgcgttgaccgcggacgtgaaggagaagatgtacaatgtgttactgttcgtggatgggggctggatggtggatgtccgtgaggatgcaaaggaggaccacgaacgcacacaccagatggtcttgctgcggaaactgtgccttccaatgttgtgtttcctgttacacaccatattacattccaccggtcagtatcaggaatgcctgcaacttgcagacatggttagcagcgagaggcataaactttatttggtttttagtaaagaagagctccgtaagctcctacagaaattgcgggagagcagcctcatgttacttgaccagggtctcgaccctctgggttacgagatacagctgtag

SEQ ID NO: 127104 - DNA, 2691 bp, synthetic construct
  misc_feature 1..2691: note = Description of Artificial Sequence: Synthetic coding sequence
  source 1..2691: mol_type = other DNA
atgaagatactcgtcattctccaccaagaaactaggctgtcgctagagctgctcgcccactttgactcactggtactgagcaccaatctgctcttcatcgtgacaccaacttcaagatcgttgttacgccagccagatatcagctgcatcctaggaacaggtggaaaaagtccaaggttaacccagtcctcaggtttttttggcaacctgtcgatggttacaaatctggatgactctaattgggctgcggcttttagttcccaacgcagcggcttatttacgaatactgagccacactcaataaccgaggatgtgaccatatcggccgtcatgttgagggaggacgaccctggggaggccgcctctatgagcatgtttagcgacttcctgcaatcttttcttaagcacagtagttccaccgtgtttgatctcgtcgaagaatacgagaatatttgcggctcgcaagtgaacattctgtctaagattgtgtcacgcgcgacacccggcctacagaaattctctaaaacagcctccatgctctggctgctgcagcaggaaatggtgacttggagactcttagcctctctgtacagggatagaattcagtccgccttagaggaggagtcagtgttcgccgttacagctgtgaatgcctcagagaagacagtagtagaggcgctcttccagcgtgatagcttagtgcggcagtctcaacttgtagtggattggctagagagcatcgccaaggatgagatcggtgagttctcggataacatcgagttctatgccaagtccgtctattgggaaaataccttgcatactctcaagcagcgacagctgacctcttacgtaggcagtgttcgccccttggtgacagagttggaccctgacgctcctatcaggcagaagatgccactagatgacctggatagagaggacgaggttagactgctgaaatatctgtttaccctgatacgtgcaggtatgacagaagaggcacaacgcctctgcaaacgctgtggtcaggcctggcgggctgctaccctggaaggatggaagctgtatcatgatcccaacgtcaacgggggcaccgaactcgaacccgttgaaggtaacccataccgcaggatctggaagatctcctgttggcggatggccgaggatgaacttttcaaccggtatgaaagagccatctacgcagcactgtcaggtaacctgaaacagttactaccagtgtgtgatacttgggaagatacagtgtgggcatatttccgcgtgatggtggacagcttggtggaacaggagatccagacctccgttgcgaccttggatgagaccgaggaacttccaagagagtacctgggagccaattggacactggaaaaagtcttcgaagagctgcaagccacagacaaaaagcgtgttctggaggaaaatcaagaacactatcatatcgtacagaagtttcttattctcggagatattgatggacttatggacgaattctccaaatggctttctaagtcaaggaataacctccctggacatctgttacgtttcatgacacaccttatcctgttcttccgaacactagggctccagactaaagaagaagtctcaatcgaggtgctgaaaacctatattcagttgctgattcgggagaaacacaccaacctcatcgcattctacacctgtcatcttccgcaagacttggcagtagcccagtacgccctttttctggaatcggttactgaatttgaacaaagacaccactgcctggagcttgcaaaagaagctgacctagatgtcgcaaccataaccaagaccgtggttgaaaacatccgcaaaaaggacaacggcgagtttagtcaccacgacctggcacctgcactggatactggcaccacggaggaggataggctgaaaatagacgtgatcgactggctggtgtttgatccggctcagagggctgaagcccttaaacaagggaacgcaattatgaggaagtttctggcctctaagaaacacgaagctgctaaggaagtctttgttaagataccccaggacagtattgccgagatttacaaccaatgtgaagagcaaggaatggaatcgccactgcctgccgaagatgataacgccattagggaacacttgtgtattagggcatacttagaggcacatgaaacattcaacgagtggttcaaacatatgaatagtgtgccccagaagcccgcccttatcccgcaaccaacgtttacagagaaagtagcccacgaacacaaggaaaagaaatacgaaatggacttcggaatctggaaaggccacctggacgcgctaactgctgatgtcaaagaaaagatgtataacgtactcttatttgttgacggaggatggatggtggacgtgcgagaagacgccaaggaagatcacgagcgcacacaccagatggttctgctgaggaaactttgccttcccatgttatgctttttgttacacactatcctgcactccactggccagtaccaagaatgcttgcagttggctgatatggtctctagcgaacggcacaagctctatctggtcttctctaaagaggaactgcgaaaactcctgcagaagctcagggaatctagtttgatgttgctggatcagggtcttgaccccctgggctacgagatccagttgtag

SEQ ID NO: 127105 - DNA, 3471 bp, synthetic construct
  misc_feature 1..3471: note = Description of Artificial Sequence: Synthetic coding sequence
  source 1..3471: mol_type = other DNA
atgttccctgctgcgccctctccaagaacccccggcacaggtagccgaaggggcccgttggcgggactcggaccaggcagcactcctcgtaccgccagtcggaagggtctccccctcggaagtgcggtgtcctcacctgttttgttttccccagtgggaaggcgcagcagtctctctagtagaggcactcccactcggatgttcccccatcactcaattacagagagcgttaactatgatgttaagaccttcgggagctcgctccctgtcaaggtgatggaggcactcacgctcgccgaggtggatgaccagttgacaattaatatcgacgaggggggctgggcttgcctagtctgtaaggaaaaactcataatttggaaaatagccctgtcaccaatcacaaaactttccgtatgcaaggagctacagctgcctccctcagattttcactggtctgccgatctggtggccctgtcatattctagcccaagcggggaagcccattctacccaagcggtcgccgtcatggtagcaactcgcgagggaagcatccgatactggccctctctggcaggtgaagacacgtatactgaagctttcgtggactccgggggggataaaacttactcgtttctgaccgccgttcaaggtggttcctttatcctcagctctagcggtagccagctgatacgtttgatcccagagagttctgggaaaatccatcagcatattttacctcagggacaaggcatgctctctgggattgggaggaaagtgtcatctttatttggaatactgtccccatcatccgacctgaccctgagcagtgtgctgtgggaccgggaaaggagtagcttttacagtctcacctctagcaatatctccaagtgggaacttgatgattcgagcgagaaacatgcttatagctgggatatcaatagagccttgaaggaaaatattacagatgccatctgggggtctgagtctaattatgaagctatcaaagaaggtgtgaatatccggtatctcgacttgaaacagaattgtgatgggctggtgatcctcgccgccgcttggcactccgccgataatccatgtttgatttactattctctgatcacaatcgaggataacgggtgtcagatgtccgatgctgttaccgtagaggttacccagtataatccaccttttcagagcgaagatctgattctctgccagctgacagttccaaatttctcaaaccagaccgcctacctgtacaatgagagcgctgtttacgtgtgttccactggaacaggtaaattttcgctgccccaggagaaaatcgtctttaacgctcaaggagattcagtgctgggcgctggagcttgcggaggagtgcctataatttttagccgcaacagtggcctcgtcagcattacctccagagaaaatgtgagcattctggccgaggatctcgaagggtctctggcctctagcgtggccggccccaactctgagtctatgattttcgagactaccactaagaacgaaacaatagcgcaggaggacaaaattaagctgcttaaggccgcattcctccaatattgccggaaggatctgggacatgcgcagatggtggttgacgagttgttctcaagccattcggacctggactctgacagtgagctggatcgagctgtgacccagatttctgtggacctgatggacgactaccccgcgagcgaccccaggtgggctgagagtgtccccgaggaggctcccggattctctaatacctctcttataatactacatcagttagaagataagatgaaagctcatagcttcctgatggatttcatacatcaagttgggctgtttggccggctagggtccttccctgtgcggggcaccccaatggctacacgcctgctcctgtgcgaacatgcagaaaagctgtcggccgccatagtgctgaaaaatcatcactcacggttgtcagacctcgtcaacacagcaattctcattgccctgaataaacgggaatacgagattccttcaaatctgacaccggccgatgtattttttcgcgaagtgagccaggttgacacaatctgtgaatgtctgctcgagcacgaggaacaagtgctgagggatgcgcctatggatagcattgaatgggcagaggtagttatcaacgtcaacaacatattgaaggacatgctacaggcagccagccactatcgtcagaaccggaattcactgtatcggcgcgaggaatcactggaaaaggagccagagtatgtgccctggacagcaacctcgggccccgggggtatccgcaccgtgattataagacagcatgaaattgtccttaaggtggcctacccacaggccgactcgaacctgcgaaacatcgtgacagagcagcttgtcgccctaattgattgctttctggacggatatgtgagccagctgaagagcgtggacaagagctccaatagagaaagatatgataatctagagatggagtacctgcaaaagaggtcggatttgctgtcaccattattgtccttaggccaatatttatgggccgccagtctggctgagaagtactgcgatttcgacatcttggttcaaatgtgtgagcaaactgataaccagtcacggctgcagcgctacatgacccaattcgccgatcagaatttcagtgattttctgttccgatggtaccttgagaagggaaagcgcggcaagctgctctcccagcccatcagtcaacatggacagcttgcgaatttcctgcaggcccacgaacaccttagctggttgcatgagataaattcccaggaactggagaaggcacacgccacactactcgggctggcgaacatggaaacacgttacttcgccaaaaaaaaaacgctcctcggtctttccaagcttgctgccctggcctcagacttcagcgaagatatgctacaggaaaagatcgaggagatggctgagcaggagcgctttcttcttcaccaggagactttgccggagcagttgcttgccgaaaaacagctcaatctcagtgccatgcccgtgttgaccgcgccgcagcttatcgggctatacatctgtgaggagaacagaagggccaacgagtatgacttcaagaaagccttggacctcctagagtatatcgacgaagaagaagatattaatatcaatgatttgaaattggaaatcctatgtaaggcgttgcaaagagacaattggtcatcctcggatggtaaggacgaccccattgaagtgagcaaggattcaatcttcgttaagatcttgcaaaagttacttaaggacggaatccagctgagcgaatacttgccggaggtaaaagatctgctgcaggccgatcagttggggtcactcaagagtaatccctacttcgaattcgtgctgaaggctaattacgagtattacgttcaggggcagatttag

SEQ ID NO: 127106 - DNA, 675 bp, synthetic construct
  misc_feature 1..675: note = Description of Artificial Sequence: Synthetic coding sequence
  source 1..675: mol_type = other DNA
atgttcccagcagccccatcgccgaggacccctggcaccgggtctaggcgcgggcccctagccggactggggccaggtagcacaccgcgcaccgcaagccgcaagggccttcctttgggatccgccgtaagtagtcccgttctttttagccccgtgggaaggcgaagcagcctgagcagccggggaacgccgacccggatgtttcctcatcacagcattacagaatctgtgaattacgacgtgaaaacctttggcagtagcctgccagttaaggtaatggaagcgctgacgctcgctgaggtagacgaccagctcaccattaacattgacgaggggggatgggcctgtctggtgtgtaaggaaaaactgatcatttggaagatagccctgagccctataacaaagctcagcgtatgcaaagagctgcagctccccccctccgatttccattggtctgcggacctggtcgcattgagctattcgtcaccctcaggggaagcacacagcacacaggccgtggctgtgatggtcgctacacgcgaaggcagcatcagatattggccctctctggccggggaagatacgtacacagaagcattcgtcgattctgggggagacaaaacctactcatttctgactgctgtacaagtgcacaaggaaacaaaatcaggctag

SEQ ID NO: 127107 - DNA, 3207 bp, synthetic construct
  misc_feature 1..3207: note = Description of Artificial Sequence: Synthetic coding sequence
  source 1..3207: mol_type = other DNA
atgtttcccgccgcgccaagcccacgcacgccaggtacagggtctcgtcgaggaccactagcgggactgggacctggctccactcccaggacggccagcagaaagggactcccgctgggatcagcagtgtctagtccagtgctattctcaccagtgggacgcaggagcagccttagtagcagagggacgcctacgcgcatgtttcctcatcactctatcacagagtctgtgaactacgacgtcaagacgtttggatcaagcttacccgtgaaggttatggaggccctgacactggctgaggtggacgatcaactcacaataaacattgatgaggggggctgggcttgcctggtatgcaaagagaagctgatcatttggaaaatcgccctgagccccatcactaaactgtcagtttgtaaggaacttcaattgcctccctccgactttcactggagtgccgatcttgtggctttatcatattcttctccttctggcgaagcccactcaacacaggctgtcgccgtcatggttgccacccgggagggatcaattaggtattggccaagccttgccggcgaggatacgtacaccgaagctttcgtggacagtgggggcgataagacctattcctttttaaccgcagttcagggtggctcctttattctatccagtagcggttcacagttgattaggctaattccggagagctccgggaaaatccatcagcacatactgccacaaggccaggggatgctgagcggaattggtcgtaaagtgtcatcactgtttgggatattgagcccgagttccgaccttacactaagctctgtgctatgggatcgcgaacggtcaagcttctactctctcaccagctccaacatcagtaagtgggagttggacgacagtagcgagaagcatgcctactcttgggatatcaatcgggctttgaaagagaatatcaccgacgccatctggggcagcgaaagcaattacgaggccattaaggagggcgtcaacattagatatttagatctcaagcagaactgtgacggcctcgtcatccttgctgcggcctggcattccgcggataacccatgcctgatttactattcactcatcactatcgaagacaatgggtgtcaaatgagtgacgctgtgacggtggaggtcacacagtacaatcccccgttccagtccgaggatctgattctttgtcagctcactgtccccaactttagtaaccagactgcctacctttacaacgagtcagccgtttatgtatgcagcactggcacgggaaaatttagtttgccgcaagaaaagatagtattcaatgctcagggggactcagtcctgggtgctggtgcgtgtggcggcgtaccaataatcttttctcgaaatagcggcctcgtgagtatcacatcccgggagaacgtgagcatcctcgccgaggacctggaaggatcacttgcctcttccgtggcaggacctaactcggagtctatgatctttgagacaacaacaaagaacgagacgatcgcacaagaagacaagattaagttgttgaaagcagctttcctccaatattgtcgtaaggatcttggccacgcacagatggtggttgatgaactattcagctctcattccgacctggatagcgactcggaactagatcgagctgtcactcagatctctgtagacctaatggatgactaccctgcctccgaccccaggtgggctgagtccgttcctgaggaggcgcctggcttttcaaataccagcctcattatactgcatcagctggaagacaagatgaaagcacactcattcctaatggatttcattcaccaggtggggctgtttggaaggcttgggtcatttccggtgcgcggcaccccaatggctactagactcctcctgtgtgagcatgcagagaagctatctgccgccattgtactgaaaaaccaccactctcggcttagtgatttagtaaacaccgcgatactcattgcactaaacaagagagaatacgaaattccatccaacctcacacccgcggatgttttttttcgagaggtgtcccaagtggacaccatttgtgaatgcctgttagaacacgaggagcaggtgctgcgggacgctccaatggattctatcgagtgggcagaagtggtcatcaatgtgaacaacatccttaaggatatgctgcaggccgcctcccattatagacaaaatcgcaattcattatacaggcgcgaggagagtttagagaaagagcctgaatatgtcccctggacagcgaccagtggacctgggggaatccgcactgttattatccggcagcatgagattgtattgaaagtggcctatcctcaagcagattcaaacctgagaaacattgtgacggagcagctcgtggctctaatcgactgctttttggatggatatgtgtcccagttaaaatctgtggacaaaagctctaatcgcgaaagatacgataacctagagaaagggaagagggggaagcttttatctcagccgattagccagcacggccagttggccaattttctgcaggcacacgagcatttgagctggttacatgagatcaatagtcaagagctcgaaaaggcacacgccactctactgggcctagcaaatatggaaacaaggtacttcgccaaaaagaagacgctcctgggcctgagtaagctggccgccctggcctctgatttctcagaggatatgctgcaagaaaagattgaagagatggcggagcaggagcgcttccttctgcatcaggagacccttcccgagcagctcctcgctgaaaagcagttaaatctaagtgcaatgcctgtattgactgccccccaattgatcggcttatacatctgcgaggagaatagaagggcaaatgaatacgactttaaaaaagccctcgacctgcttgagtacatcgacgaggaggaagacatcaatattaatgatctgaagcttgagatcctgtgcaaggcccttcaaagagacaactggagtagtagtgatggcaaagatgatcctattgaagtgagtaaggattctatatttgtaaaaatcttgcagaagcttctgaaggacgggattcagttgtccgagtacctccccgaagtgaaggacttgctgcaggcagatcagctcggcagtatcaatgtgaatttctgttag

SEQ ID NO: 127108 - DNA, 3258 bp, synthetic construct
  misc_feature 1..3258: note = Description of Artificial Sequence: Synthetic coding sequence
  source 1..3258: mol_type = other DNA
atgttccccgcggcaccgagtccgagaaccccagggactgggtccaggcgcgggcccctggccggcctggggcctggttccacacctcgcaccgccagcaggaaaggcctaccgctgggtagtgcagtgtctagtccggtacttttttctcccgtgggccgtcgctcttctctaagttcacggggaaccccaacaagaatgttccctcaccactccataacagagtctgttaattatgatgtaaaaacatttggctcttcacttccggtgaaggttatggaagctctaacgctggcagaagtggatgatcagctgacaatcaatatcgatgagggcgggtgggcatgcctagtctgtaaagagaagcttatcatctggaagatagctctctctcccatcaccaaattatcagtgtgtaaagaattacaactacctcccagtgactttcactggagcgcggatctcgtggccctatcatactctagcccgagtggtgaggctcactcgactcaggcggtcgcagtgatggttgctacaagggagggctctatacgatactggccctcactggccggcgaggatacatacactgaagctttcgtggacagcggcggggataagacctactctttccttaccgctgtgcaaggaggatccttcatcttgtcaagcagtggcagccagttgatcaggttgatcccagagtcgtcagggaagattcaccagcatatactgccacaggggcagggaatgcttagcgggatcggacgcaaggtttcatctctgtttggcatactgagccccagtagcgatctgaccttgagctctgtgttatgggaccgggagcgtagcagtttttactcgcttacatccagcaatatttcgaagtgggagctggacgactcatcagaaaagcatgcctactcctgggatatcaacagagcgctcaaggaaaatatcaccgacgccatatggggctctgagagcaattacgaggctatcaaggagggagtgaacatccgttacctagaccttaagcagaattgcgatggtctggttatcctggcagcagcttggcattctgctgataatccttgccttatctactatagcttaattaccattgaggacaacggctgccaaatgtccgacgccgtgactgtggaagtgacccagtataaccccccctttcagtctgaggatctgatcctgtgccaactcacggtgccaaatttctcgaaccaaacagcgtatctttataacgagagcgccgtttacgtgtgctccaccggcactggtaaattctctctaccccaggagaagatcgtgtttaatgcccagggggactccgtactaggcgctggtgcctgcgggggggtgcccattatctttagtcggaactcagggcttgtgtctattacctcccgggaaaatgtttccattctggcggaggatttagagggttccctggcgagttctgtggcgggcccaaacagtgagagtatgatcttcgagaccacgacaaagaacgaaaccattgcacaggaagacaagatcaaattgttaaaagcggccttcctgcagtactgccgtaaggacctaggacacgctcaaatggtggtcgacgagctcttttcctctcactccgatctcgatagtgactctgagctagaccgcgctgtgacacagatctctgtggatctgatggatgattaccccgcatctgaccctcgttgggctgagagtgtgcccgaggaggcacccggcttcagtaatacctctctcataatcctgcatcagcttgaggataaaatgaaggcccacagctttttaatggattttattcatcaagtgggactgttcggccgccttggtagctttcccgtgcggggcaccccaatggcgaccaggctgctcctttgcgaacatgccgaaaaattatctgctgcgattgtcctgaaaaatcatcactcccggctgtcggacctggttaacacagccatactgattgcgctgaacaagagggagtatgagattccttccaatctgactcctgcagatgtgttcttcagagaggtgagtcaagtcgataccatctgtgaatgccttctcgagcatgaggagcaggtccttagagacgcaccgatggactcaatagagtgggccgaagtagtcatcaacgtgaacaacatcctgaaggacatgttgcaggcggcctcccactatagacagaatagaaactctctctatagacgggaggagtccctcgaaaaagagccagaatacgttccgtggacagcaactagtggacccggcgggataaggaccgtgataatcaggcaacacgaaatcgtgctgaaagttgcgtatcctcaggcagatagcaacttacggaatatagtcacagagcagctcgtggccctcattgattgtttcctcgacggctatgtgagccaactcaagtcagtggacaagtctagcaatcgcgagagatatgataatcttgaaaagggaaagcgaggcaaactactctcacaaccaatttcccagcatggacagctggctaattttctccaggcccacgagcatctgagttggctgcacgaaatcaatagccaggagctcgaaaaggctcatgccacattgctgggcttggcgaacatggaaacccgctactttgccaagaaaaaaacgctcctaggcttaagtaagctggccgctcttgcatccgactttagtgaagatatgctccaggagaaaatcgaagagatggcggagcaggaaaggtttctgctgcaccaagagacactgcccgagcaacttttagctgagaaacagctgaatttaagtgcgatgccagttctcactgccccacaactgattggtttatatatctgcgaagaaaacagacgagctaatgagtacgatttcaagaaggccctggatctgctggaatacatcgacgaagaggaggatataaacataaatgatctaaaactcgaaattctttgtaaggccctacagcgcgacaactggtcttcatctgatggcaaggatgatcccattgaggtatcaaaagattccattttcgttaagattctccagaagctgttaaaagacggtatccaactgagtgagtacctgcccgaggtcaaggatctacttcaagcagatcagctgggcagtctgaagagtaatccatatttcgagttcgtgctgaaggctaattacgaatattatgttcaaggccaaatttag

SEQ ID NO: 127109 - DNA, 3423 bp, synthetic construct
  misc_feature 1..3423: note = Description of Artificial Sequence: Synthetic coding sequence
  source 1..3423: mol_type = other DNA
atgggaccactggcaggtctggggccaggttccacacccagaaccgcgtctcgaaaggggctaccactggggtcagcagtgagttcccctgtgctgttctcccctgttgggcggagatcatcgctgagcagcaggggaactccaacacgaatgtttccccatcatagcataaccgagagtgttaactatgatgttaaaacattcgggagctctttaccagtcaaagtcatggaggccttgacgctggctgaggtggatgaccagctgaccatcaacattgacgagggcggatgggcttgcttagtttgcaaggaaaagttgattatctggaagattgctctctctcccattaccaaactcagcgtttgcaaggaacttcagctccctccatctgactttcactggtccgccgatcttgtggccctatcatactcctcacctagtggggaggcgcatagcacgcaagccgtagccgtgatggtggccacccgggaaggctcgattagatattggccctccttagctggagaagacacctacacggaggccttcgtggattctggtggtgataagacatattcatttttaacagccgtacagggaggcagctttattctcagcagctcaggttctcagctcatccggttgattcccgaatcctcaggcaagatacaccagcacatactcccacaaggccagggcatgctgtctggaatcgggcgcaaggtgtctagcctcttcgggatactctcgcctagttccgacctaaccctgagctccgtgctttgggaccgcgagcggagttctttctacagtctgacaagctccaacatcagcaaatgggaactagacgattctagcgaaaagcacgcttacagttgggatatcaacagagccctgaaggagaatataactgacgctatctgggggtccgagagcaactacgaggcaattaaagagggtgttaatattcgctatctggacctgaaacagaattgtgacggactcgtgatcttggctgctgcctggcacagtgctgataatccatgcctcatctactactccctcatcaccatcgaagacaacggatgtcaaatgagcgacgcagtgacagtcgaggttacccagtataatcctccatttcagtctgaggatctcattctctgccagctaacagtaccgaactttagcaatcagacagcttatttgtacaacgagagtgctgtgtacgtctgctctacaggaactggcaagtttagtctcccacaggaaaagatcgtgtttaatgcccagggcgacagtgttctcggcgccggcgcctgtgggggagttcccattatattcagtcgtaattctggattagtgagcatcacatccagagaaaacgtgtcaatcctagctgaggatctggagggctcactcgcctccagtgtagccgggcccaactccgaatctatgattttcgaaactactaccaagaacgagacaatcgcccaagaggacaaaataaaactgctcaaggccgcatttctccagtattgtaggaaggatctcgggcacgcccaaatggtagtggatgaactgttcagttctcacagcgaccttgactctgatagcgagttggaccgcgcggtgactcagattagcgttgatctcatggatgactatccagcatctgacccaaggtgggccgagtcggtgcctgaggaggcgcccggctttagtaatacttccttaatcatcttacaccagctcgaggataaaatgaaggcacattccttccttatggacttcatacaccaagtcggactgtttggtcgcctaggtagttttccggtacggggcactcccatggcgacccgattgctcctgtgtgagcatgcagagaagctgtctgcagcaatcgtgctcaagaaccatcactctcgactgagtgatttagtgaataccgcgatactaatcgcccttaataaaagagaatatgaaatccctagtaatctgacccctgctgacgtgttcttcagggaggtgtctcaggtcgacacaatctgtgaatgcctcctcgaacacgaggaacaggttctgcgcgacgcacctatggactctattgagtgggccgaggtggttatcaacgtaaacaatattctgaaggacatgctgcaagctgcctcccattaccgacagaatcgcaactccctgtacagacgtgaagagagtctggagaaagaacccgaatatgtgccttggacggctacttctggccccggggggattcgcacagtgattattcgacagcacgagatagtgctcaaagttgcctacccgcaagctgactccaatcttcgtaacatcgtgacggaacagttagtagccctgatcgattgctttcttgacgggtacgtgtctcagctgaaaagcgtcgacaaatcatccaatcgggaacgctacgataatttggagatggaatatctgcagaaaagaagcgatctactttcacctctgctgagtctaggacagtatctgtgggccgcttctctggctgaaaaatactgcgactttgacatcctggtccaaatgtgcgagcagaccgacaaccagtcaaggttgcaaaggtacatgacccaatttgctgaccagaatttctccgactttctgtttcggtggtacctcgagaagggtaaacgagggaagctgctcagccagccaatttcccaacacggccaactggctaatttcctgcaagcgcacgagcatctatcttggttgcatgagattaactctcaagaattggagaaggcacacgcaaccctgttagggttggcaaatatggagacaaggtactttgctaaaaaaaagaccctgttgggccttagcaagctcgctgcactggccagtgacttctccgaggatatgctacaggagaaaattgaagaaatggccgaacaggagcgcttcctgcttcaccaggagacactgcccgagcaactattggccgaaaagcaactgaacttgagcgctatgcccgtgctaaccgcacctcagcttatcggcctttacatttgcgaagagaaccggcgagccaacgaatacgacttcaaaaaggctctagacctcctcgagtatatcgacgaggaagaggacatcaatataaatgatctcaagctggagattttgtgcaaggcgctccagcgtgacaactggtctagtagcgacggaaaggatgacccaatagaggtgtctaaagatagcatttttgttaagattttgcaaaagcttctgaaagatggcatccagctgtcagaataccttccagaagttaaggacctcctgcaggcggaccagctggggagtttaaaaagcaacccatactttgaatttgtactcaaagcaaattatgagtattacgtccagggtcagatttag

SEQ ID NO: 127110 - DNA, 4428 bp, synthetic construct
  misc_feature 1..4428: note = Description of Artificial Sequence: Synthetic coding sequence
  source 1..4428: mol_type = other DNA
atggctagtggggcaggaggggtcggaggtgggggaggcggcaaaattagaaccagacggtgccaccagggcccgatcaagccatatcaacagggaagacagcagcaccaaggaattctgagtagggtgaccgagagcgtgaagaatatcgtcccagggtggttgcaacgttattttaataaaaatgaggacgtttgtagttgcagtacagataccagcgaggtaccaaggtggcctgagaacaaagaagatcatctagtatatgccgacgaggagagctcaaatattaccgatggccgtataacaccagaaccagctgtttctaacacagaagagccttctacaaccagtaccgcatccaattatcccgatgtcctcactcgccccagtttgcatagaagccacctgaattttagcatgttagagagccctgcccttcactgtcagccctccaccagtagcgcgttccccattggcagctctgggtttagcttggtgaaagagatcaaggactctaccagccagcatgacgatgacaatatatcaaccaccagcgggttttcaagtagggctagcgacaaggatataactgttagtaagaatacctcactgcctcccctgtggagcccggaggcagagcggtctcattcactctcccaacacaccgctacatcaagcaagaaacctgccttcaatctgagcgccttcggtaccttgagcccctctctgggaaactcctccatactgaaaacctcacaactaggtgatagtcctttttatcctggaaagacaacctatggcggcgccgctgctgccgtcagacagtccaaactgcgcaacacaccatatcaggccccagtgagacgccagatgaaggccaagcagctctcggcgcagtcttacggagtgacatcctctaccgctcggcgcattctccagagtcttgagaagatgtcctcacctttggccgatgccaagagaatcccatcaatcgtcagtagcccattaaatagcccccttgacaggagcgggatagatataaccgattttcaggctaagcgggagaaggtggacagccaatatccccctgtccaacggttgatgactcccaaaccagtgagtatcgccactaaccggtccgtctatttcaagccaagcctgactccaagcggagaatttagaaagacaaatcagcggatcgacaacaagtgttctactggctacgaaaagaatatgaccccggggcagaatagagaacagcgcgaaagtggcttctcttacccgaacttctcacttccggctgcaaacggcctgtcttccggagtaggggggggcggcgggaagatgagacgtgaaaggacccgattcgtcgctagcaagccccttgaagaggaagaaatggaggttccggtgctgcccaaaattagcctgccaataacatccagctctctgccgacattcaattttagctcacctgaaatcactacttctagtccctcacccataaacagcagccaggccctgacgaataaagtgcaaatgaccagcccctcatctaccgggagcccaatgttcaagttttcttctcctattgtgaagagtactgaagccaatgttttgcccccatcttcaattggattcacattcagtgtacccgtcgcaaaaaccgcagaactatccgggtcatcttccactcttgaaccaatcatttcctctagcgctcatcacgtaacaacggtaaatagtactaattgtaaaaaaaccccacccgaagactgtgagggcccctttaggcctgctgaaattttgaaagaaggctccgtattggatattctgaagagtccgggtttcgcatctcctaaaatcgacagcgtggctgctcagcccaccgctaccagcccggtcgtgtacacgaggccagccattagttcattttcgtcctccggtattggcttcggcgagtcactgaaagcgggctcttcctggcagtgtgacacctgcctcctgcagaataaagtcacggacaataagtgcatagcctgtcaggctgccaaactatccccccgagacaccgctaagcagacagggatcgaaacgcccaacaagagcggcaaaaccacattgtccgcatcaggaacaggattcggggataagtttaaaccggtcattggcacgtgggattgtgatacatgtttggtgcaaaataaaccagaagcaatcaagtgtgtagcttgtgagacgccgaaaccaggtacgtgtgttaagcgcgccctgacgttgactgtcgtatctgagagcgctgagaccatgaccgcaagttccagctcatgcaccgtcactaccgggacactcggttttggtgataaattcaaacgccccatcggctcctgggagtgttccgtgtgctgtgtgagtaacaacgctgaggataacaagtgcgtctcttgtatgtctgagaagcctggcagttctgtgcctgcaagtagtagtagtactgtgcccgtgtcattaccatctggggggtccctcgggctcgaaaaattcaagaaaccagagggaagctgggactgtgaattgtgccttgtacagaataaagctgacagcaccaagtgccttgcctgtgagagtgccaagccgggaactaaaagtggatttaaagggttcgataccagtagctcttcctctaattcagctgcaagctcatcatttaagtttggggtcagttcctccagcagtggccctagtcagacactcacaagcactgggaattttaaattcggggatcagggaggcttcaagatcggtgtatcgtcagacagcgggagtataaaccccatgtcagaaggcttcaagtttagcaaacctattggggacttcaagtttggggtgtcctcagagagcaaacctgaggaagtgaagaaggactcgaaaaacgacaattttaagtttggcctgtcctctggactatcaaatcccgtgagtctgacgcccttccagtttggtgtgtctaacctgggccaagaggaaaaaaaggaagaactgcccaaatcctcaagtgcggggttcagcttcgggacaggcgttattaactctactcccgcccccgctaacactatagtgacaagcgaaaacaagagtagcttcaatttgggaactatcgaaactaaatctgccagtgtggcccctttcacatgcaaaacaagtgaggccaaaaaggaagaaatgccagccaccaaaggagggttttcattcggcaatgtggaaccagcgtccctgccctcagccagcgtcttcgttttgggaagaacagaagagaagcaacaggagcccgtgacatctacctccctagttttcgggaaaaaggccgacaacgaagaacccaagtgccaacccgtgtttagctttggtaactcggagcagacgaaagacgaaaattcctcaaaaagtaccttctcttttagcatgactaagccgtccgaaaaagagtccgaacagccagctaaagctacattcgccttcggagcccaaacttcaaccaccgctgaccagggtgccgcgaagccagtcttttcctttctgaataattcttcaagtagcagcagcacacccgccaccagcgcgggaggaggcattttcggcagctccacaagctcttcaaacccacctgttgccaccttcgtcttcggccagagctctaatcccgtgtcttctagcgccttcgggaacacagcggagagcagtacctctcagtctttgttgttcagtcaggacagcaagttggcaacgacttccagcacaggaacagccgtgactccctttgtcttcggccccggtgcctcctccaataatactactaccagcggcttcggcttcggcgccacgacaacaagcagctccgccgggtctagttttgtgttcggcactggcccatcagcacccagcgcctcccccgccttcggggccaatcagacgcccacctttggacagtcacagggcgcatctcagcctaatccacccggtttcggtagcatttctagttcaacagctctatttcccacaggctcacagccagctccccctacctttggcactgttagcagttctagccaaccacctgtgtttggacagcagccaagccagtcagccttcggcagtggcactacaccaaattcctcatctgccttccagttcgggtcctccacaactaatttcaatttcactaataactcgcctagcggcgtgttcacttttggtgcaaattcttctacccctgcggcttcggcccaaccttctggctcaggtgggttcccatttaatcagtcaccggccgccttcactgtcggctctaacgggaaaaacgtattttcatcctccggtacatcgttctctggacggaaaatcaaaactgccgtccgaagacgtaaatag

SEQ ID NO: 127111 - DNA, 4368 bp, synthetic construct
  misc_feature 1..4368: note = Description of Artificial Sequence: Synthetic coding sequence
  source 1..4368: mol_type = other DNA
ggtctcaggttgtgcttgtctcgccccctgactagacctggtgccggctctgggggtgggtccgctatggccagtggcgccgggggggtggggggaggtggaggaggtaagattcgtacaaggaggtgccatcagggacccatcaagccgtatcaacagggccgtcaacagcaccaggggatcctctcccgggtaaccgagagcgtgaagaatattgtacccggctggctgcagagatatttcaacaaaaatgaagacgtctgttcatgttccaccgacacatccgaggtgccccggtggcctgagaacaaggaagatcacttagtctatgccgatgaggagtcaagcaacattacagatggaaggattactcccgagccagccgtcagtaataccgaggaaccaagcaccacaagtacagcatcaaattacccagacgtgctgacccgaccaagcctgcatagatcccaccttaacttcagcatgctcgaatcgcctgcgttgcactgtcagccctcaacatcgtcagccttccctataggaagctccggcttcagcctcgtcaaagagattaaggacagcacctcccagcacgacgatgacaacatctcaaccactagcggcttctcctcgagggccagtgacaaggacatcactgtttccaaaaatacctcacttccccctttatggagtccagaagctgaacgttctcacagtctgagccagcataccgccacttcatcgaagaagcctgcatttaacttgagcgcgttcggcacgctctcccctagcctcggtaacagctccatcctgaaaaccagtcagctgggcgattcacccttctaccccggcaagacaacctacggtggtgcagccgccgcggttagacagagcaagcttaggaatacaccttaccaggctccagtgagaagacagatgaaagcaaaacaattgagtgcacagagttatggagtcacaagcagtactgctcgaagaatcctccagtctttagaaaagatgtcttcgccactggccgatgcaaaacgcatcccatccatcgtgagttcacccctgaacagcccacttgacagaagtggtattgatatcaccgatttccaggccaagagagaaaaggtcgactcccagtatcctccagtccaaaggctcatgacccctaagcccgtgtccatcgccacaaataggtcagtgtatttcaagccgtcactaaccccgagcggggagtttagaaagactaatcaacgtatcgacaataaatgttctaccggttacgagaagaacatgaccccaggccagaatcgggagcagcgggaaagcgggttcagttatcccaatttttcccttcctgctgctaacggattaagcagtggggtgggtggaggcggcgggaagatgaggagagagagaactcgtttcgttgcatccaaacccttggaggaggaggagatggaggtaccagttctgcctaagatctcacttcccattacgtcttctagcctgcctaccttcaatttctcatccccagagattaccactagctcgccatcaccaattaattcaagtcaggctcttacaaacaaggtgcaaatgacaagccccagctctaccggatctcctatgttcaagttcagttcgcccattgtgaagtcgaccgaagccaatgtcctgccccccagcagtattggttttacattcagtgtacctgtggcgaagaccgcagagctctctggatctagcagcaccctggagccaatcataagttcatctggctttgccagcccaaaaattgactcagtggccgcgcagccaactgccactagcccagtcgtttatacaaggcccgcaatatcttctttcagttcttctgggattggttttggggagagccttaaggccgggtcctcctggcagtgtgatacctgtcttctgcagaacaaagtgactgataacaagtgtattgcatgtcaggccgctaagctgtcaccaagggataccgcaaaacagacgggaattgagacccctaacaagtctgggaagacaacccttagtgcaagcgggacaggcttcggagacaaattcaagccagtgataggaacctgggattgtgatacttgtctggtccaaaataagcctgaggctatcaaatgcgtggcatgcgaaactccgaagcctggtacatgtgtcaaaagggccttgaccctaacagtagtaagcgaaagcgcagagacaatgacagcatcttcgtcttcatgtacggtgactacaggcacgcttggattcggagataagtttaagcgccccatcggctcctgggaatgctcagtttgttgtgttagcaacaacgctgaagataataaatgtgtttcctgcatgtcagagaagcccggctcaagtgtcccagcttcatcttcctccactgtcccagtatctctgccctcaggtggctccctaggacttgaaaagtttaaaaagcccgaagggtcctgggactgtgagctgtgcctggttcagaacaaggccgacagcacaaagtgccttgcgtgcgagtccgcgaagccagggactaaatccggcttcaaaggtttcgatactagctcatccagtagcaacagcgccgcatcaagctcctttaaatttggcgtgtcaagtagctccagtgggccctcccagactctaacatctaccggaaacttcaaattcggagatcaggggggttttaaaattggagtttcgtcagacagtggatctatcaatcctatgtccgagggcttcaagtttagcaagcctattggtgatttcaaattcggcgtgagtagcgaatcaaagcccgaggaggtgaagaaggactccaagaatgataattttaagtttggtttaagttctggcctgtctaaccctgtctccctgacgccctttcagttcggagtctcaaacctcgggcaggaggagaaaaaagaagagctgcccaagagttcctcagccggattctccttcggtactggagtgatcaattccacacctgccccggccaatacaatcgtcacgtccgagaacaaatcttcgtttaatctgggcacaattgaaactaaatccgcttcagtggcccccttcacctgtaagaccagtgaagccaagaaagaggagatgcctgccacgaagggaggattttccttcgggaacgttgagcctgctagcctgcctagcgccagcgtcttcgtcctcggcaggacagaggagaaacagcaggagcctgtgacgtccacatccctggtgttcggcaagaaagctgataacgaggagccaaagtgtcagcctgtgttttcgttcggaaacagcgaacagacgaaggacgaaaattcgagcaagagcacatttagcttcagtatgactaagccatcagagaaggagtctgagcagcctgccaaagccacattcgcctttggcgctcagacttcaacaaccgcagaccagggggccgccaagcctgtcttttcctttctgaacaattctagctctagctcctcaacccctgcaacctctgctggtggcggcattttcggttcttctacaagctcttcaaaccctcccgtggccaccttcgtgttcgggcagtcatccaaccctgtcagttcgtcagcatttggtaatactgccgagagctctaccagtcagagcctcctattttctcaggattccaaactggccaccacatctagtaccgggaccgctgtcactcctttcgtgtttggacccggcgcttctagcaataacaccaccacctccggatttgggttcggagctaccacaacctcttcttccgccggaagctcttttgttttcgggacaggccccagcgcaccctcagcatccccggcctttggggcaaaccaaactccgacattcggccaatcccagggcgctagccagcccaatccacccggcttcggctctatcagctcttctaccgccctgttccccactgggagtcagccagcaccacctacctttggaactgtctcttccagctcacaaccacccgtgtttgggcagcagccctcacagtcggccttcggctcaggcaccaccccgaattcttcgtccgcctttcagttcggatccagtactactaacttcaacttcactaacaacagcccctccggcgtgttcacattcggagcaaacagctccacgcccgccgccagcgcccaaccatcaggcagtggcggcttccccttcaatcagtctcccgcagccttcacggtaggttctaacggcaagaatgtgttttctagttcagggacctcgttctccggccgtaaaattaagactgccgtgaggaggcgcaaatag

SEQ ID NO: 127112 - DNA, 4521 bp, synthetic construct
  misc_feature 1..4521: note = Description of Artificial Sequence: Synthetic coding sequence
  source 1..4521: mol_type = other DNA
atggcctcaggcgccgggggcgtcgggggcgggggcgggggaaaaatcaggaccagaagatgccatcagggtccaatcaagccgtatcaacagggaagacaacagcaccaagggattctgtctagagtgactgagagtgtgaagaacatagtgcccggatggctacagaggtactttaacaagaatgaagatgtctgtagttgtagtaccgatacttctgaggttcctcggtggcctgagaataaggaagatcatctggtgtacgcggacgaagagtctagtaatatcaccgacggcaggattacccccgagcctgcagtgagtaacactgaagaaccgtctactacctcgacagctagcaactatccagacgtcctgacacgtccctcacttcaccgatcccatctcaacttttccatgctagaatcccccgccttgcattgccaacccagtaccagtagtgcctttccaataggcagtagcggctttagtctggtcaaagaaataaaggacagcaccagccagcacgacgacgataatattagcacaacaagcgggttctccagtagagccagcgataaggacattactgttagcaagaacactagcctacctccgctttggtccccagaagctgagagatcacactccctgtctcaacataccgccacctcttccaaaaaacccgcctttaacctctccgccttcggcacattaagtcccagccttgggaactctagcatcctgaagacttctcagctcggggactcccctttctatcctggcaagacgacctacgggggggccgcggccgcggtgcgacagagtaagctaagaaacaccccttaccaagcccccgttcggagacagatgaaagccaagcagctttccgcccaaagctatggcgtcacaagcagtaccgctagacggatactccagagcctcgagaagatgagttctccactggccgatgccaagagaatcccgtctattgtcagtagtcctctcaactcccctctggaccgttcgggaatcgatattactgattttcaagccaagcgcgagaaggttgatagccagtatcccccggttcaacgcctgatgacccctaaaccggtcagcatcgcaactaaccggtccgtctatttcaagccctcactgaccccgtctggcgagtttcggaagacgaatcaaaggatagacaacaaatgtagtaccggttacgaaaaaaatatgaccccaggccagaatagagaacaaagggagtcggggttttcctaccccaactttagcctaccagctgcaaatgggctcagctccggagtggggggcggcggtggaaagatgcggagagagagaacaaggtttgtcgcttcaaagcccttagaggaggaacgtcagggcttgacagtgctccccaagctgattagcagctcctgcgcgcaggctattattccatcgtggcccctgaaggttctgcgcctccaggaaatggaggtgcccgtcctccccaagatctcactacctatcacgagctctagcctgccaacgtttaatttttcttctcccgagattactactagcagcccttcccccatcaattcctcccaggctctgactaacaaggtacagatgacctctccttcctctacagggtccccgatgttcaaattctctagtccgatcgttaaatccactgaggctaacgtgttgccaccaagcagtattggtttcaccttttccgtaccagtggcaaaaacagctgagctgagtggttcatcaagcaccctcgaacccattatcagcagttctgcccaccatgtgactacggttaactccacaaattgcaaaaaaacaccccctgaagattgcgaggggccatttcggcccgctgagattcttaaggaaggtagtgtcttggatattctcaaatcgcctggctttgctagccccaaaatcgacagcgtcgccgcccagccaacagccacctctccagtggtctacacccgccccgcaatttcctcattctcctccagtgggatcgggttcggcgagtctctgaaagctggcagtagttggcagtgtgatacatgcttgctgcagaacaaagtgactgataataaatgtattgcatgccaagctgccaaactttcgcccagggataccgcgaagcaaaccggaatcgagacacccaataagtccggcaaaacaaccctgtcggcgtccggaactggcttcggcgataaatttaagccagtcatcggtacatgggactgcgatacttgcctggtccagaacaagccagaggccattaagtgtgtggcctgtgagactcctaagccaggaacatgtgtgaaacgcgctcttaccttgacagttgtgtcagaatctgcggaaacgatgactgcaagctccagctcctgcacggttaccactgggacactagggtttggagacaaatttaagcgcccaatcgggagctgggagtgtagtgtctgctgcgtgtctaataatgcagaggacaacaagtgtgtgtcttgcatgagcgagaaacccggatcgtccgtgccggcaagcagcagttcaacagtgcctgtgagtctcccatccggtggctcactcggcctcgagaagttcaagaaacctgaggggagctgggactgtgagctttgtctcgtccagaataaagccgacagtaccaaatgcctcgcctgcgagtcagccaagcctgggacaaagtcggggtttaaaggatttgatacaagcagcagtagttcaaactcagccgccagttcatctttcaaatttggagttagctccagtagtagtggcccgtcacagacccttacctctacgggtaactttaagttcggtgatcagggagggtttaagataggagtgagcagtgactctgggagtatcaacccaatgagtgagggatttaagtttagcaaacccatcggtgactttaagtttggcgtgtcgtcggaatcaaagccggaggaggtaaagaaagactccaaaaatgataatttcaagtttggactttcaagcggcttgagtaaccccgtgagcctgacacctttccaatttggagtcagtaatctcggccaggaagagaagaaagaagaattgccaaaatccagctccgctggtttttctttcggcacaggtgtgataaactccaccccagcgcctgctaacaccatagtgacttcagagaataaatccagtttcaacctggggacaatcgaaacaaaatcagcttcagtcgccccattcacatgtaaaaccagtgaggctaagaaagaggaaatgccagcaactaaagggggattcagctttggcaatgtcgagcccgccagccttccctcagccagcgtattcgtgctggggaggactgaggagaagcaacaggagcccgtaacctccaccagtctggttttcggaaagaaagctgataacgaggaaccgaagtgccaacctgtcttctctttcggcaactccgagcagacgaaggacgagaactcgtcaaaaagcacattttcgttttccatgactaagccaagtgagaaggagtctgagcagccagccaaagcaacattcgcattcggagcccagactagtaccacagctgatcagggcgcggccaaaccggtcttctcctttctcaacaactccagttcatctagctccacacccgcaacgagcgcaggcggggggatatttggatccagtacttccagcagtaatccacccgtggccacttttgtgttcggacagtcttccaacccagtgagctcatcagcgttcggaaataccgctgagagcagtactagtcaaagcctgttgttcagccaagattcaaaactagctacaaccagtagcacaggcacagccgtaacccctttcgtgtttggccctggggcaagcagcaataatacaaccacttcggggtttggcttcggtgcaactaccacctcctcttctgcaggaagctccttcgtgttcgggaccggaccgtctgctccctctgccagcccagctttcggcgccaatcaaacccccaccttcggccagagccagggggcctcacagccgaatcccccaggcttcggatctatcagcagcagtacggctctgttcccaacagggtcacaacccgcccctcccacctttggcaccgtatctagtagctctcagccccctgtcttcggtcaacagccctcccaatccgctttcggaagtggtacgacccctaacagttccagcgccttccagttcgggagcagtactactaacttcaatttcaccaataacagtccttccggagtcttcacctttggcgcaaactcaagtacaccagcagccagcgctcagccctctgggagtggtggattcccattcaatcagtctccagctgcttttacagtcggtagcaatggaaaaaacgtattctccagctctggtacttccttctccggcagaaagattaagaccgctgtccgcagaagaaaatag

SEQ ID NO: 127113 - DNA, 3555 bp, synthetic construct
  misc_feature 1..3555: note = Description of Artificial Sequence: Synthetic coding sequence
  source 1..3555: mol_type = other DNA
atgatgcagttgcttcagctcctgctcgggctgcttggtccgggcgggtaccttttcctcctgggagattgtcaagaagtaaccacgctaaccgttaaataccaggtatctgaggaggtgcccagcggaaccgtgattggtaagctgtctcaggaactggggagggaagaaaggcggcggcaagccggagctgcattccaggtgctccagctgcctcaggccctgcccattcaagtcgatagcgaagagggacttttgtccaccggcaggcgccttgacagagagcagctgtgccgccagtgggatccgtgtctcgtgtccttcgacgtgctagctactggagatctggcgctgatccacgtagaaatccaggtactcgacatcaatgatcatcagcctcgttttcccaaaggtgagcaggaattggagataagcgagtctgccagtctccgaacaagaattccgctggatagagccttggatcccgacacagggcctaatacactgcacacctacactcttagcccctccgaacacttcgccttagacgtgatcgttggacctgatgaaaccaaacacgccgaattaatcgtggttaaagaactcgacagggagattcattcttttttcgatctggtgctgaccgcgtatgataatggcaatccccccaaaagtggcaccagtctggtcaaggttaacgttctggactccaatgataatagccctgcgttcgctgagagctccttagccctcgaaattcaggaggatgctgcgcccggcacgttattaatcaaactgaccgccaccgaccctgatcagggcccaaacggtgaggtggagttctttctctccaaacacatgcccccagaggttttggacaccttttcgatcgacgcaaagaccggccaggtgatactgcgcaggcccctggactacgaaaagaacccagcctatgaggtggacgtccaggcgagagacttgggcccgaatcccatccctgctcactgtaaggtgttgatcaaagtgctcgatgttaatgacaacatccctagtattcacgtaacttgggctagtcagccttctctagtttcagaggccctgccgaaggattcatttattgcccttgtgatggccgacgaccttgactccgggcacaacggtctcgtccactgttggctgagccaagagttggggcacttcaggctgaagagaaccaatgggaacacgtacatgctcctcaccaatgccaccctggatagagaacagtggcccaaatacaccctcacattgctggcgcaagaccaaggtctccagcccctgagcgcaaagaagcagctcagcattcagatctccgatatcaatgataatgcaccagtcttcgagaagtctcgatacgaggttagcacaagggaaaataatttgcccagcctccacctgatcacgataaaggcccatgatgccgacctgggcattaacgggaaagtatcttacagaatacaggactccccagtggcccatctggtggccattgatagtaatacaggcgaagttacagcacagcgaagtctgaattatgaggagatggctggctttgagtttcaggtcatcgcagaagattctggccaacccatgcttgcaagctccgtcagtgtgtgggtttcactgctggacgccaatgacaatgccccagaggtggtacagccggtgcttagtgacggcaaggcctctcttagcgtactggtgaacgcttctacaggtcaccttcttgtgcctattgaaactcccaacgggctagggcctgcagggactgataccccccccctcgctacccattctagcagaccttttctcttaacaaccatagtggccagagatgctgactcaggggccaacggagagcctttgtactccatcagatctgggaacgaggcccatctcttcattttgaaccctcataccgggcaactctttgtgaatgtgaccaacgcctcaagtttaattggttctgaatgggagctggagatcgtcgtggaagatcagggctcaccaccgctccagacacgggcactacttcgcgtgatgttcgttactagcgtcgatcacttgcgggactccgctagaaagccgggcgctttatccatgtccatgcttaccgtgatttgcctcgctgtgttgctcggaatattcggtctcattctggcgctgttcatgagtatttgtagaaccgaaaaaaaggacaatagggcctataattgtagagaagctgaatctacctacagacagcagcccaagcggccccaaaaacacatccaaaaggccgacatacaccttgtccccgtgcttagggggcaggccggcgagccttgtgaagtgggccagagccataaagacgtggacaaggaggccatgatggaagccggctgggacccttgcctacaagctccttttcatctgacaccaacactgtaccggaccctgagaaaccaggggaatcagggtgctccggcggagtcacgcgaggtcttgcaggatactgtcaacctgctatttaatcacccgaggcagcgcaacgcttctagagaaaacctcaatctgccagaaccgcagccagctacgggccagcctagatctcgtccactgaaggtcgcggggagccctactggacgtttagcaggagatcagggcagcgaggaggccccccaaagaccaccagcttccagcgcaactctcaggcgacagcgccacctcaatggcaaagtatcccctgaaaaggaatccgggccgaggcagattttacgatccctggttagactaagcgtggcggctttcgccgagcggaaccctgtggaggaattgacggtagacagcccgcccgtacagcagatcagtcagctactgagcctactgcatcaaggccagttccagccaaaaccaaatcatagaggaaataagtatctagcaaagcccggaggaagtagaagtgctattccagacactgatggaccatcagctcgcgcgggcggccagacagatccggagcaagaagagggccctctcgatcccgaggaagatctgtctgtgaagcagttgcttgaggaggagctgtcatccctgttggatcctagtaccggcctcgctctggaccggctctctgccccggacccagcctggatggccagactcagtctaccgttaaccactaattaccgagataatgttatctctcctgacgctgcagccactgaggagccacggacttttcagacctttggtaaagctgaggcacccgaattgtcaccgacaggcacgaggcttgcctcaacctttgtgtccgaaatgtcctctcttcttgaaatgcttctggaacagcgttctagcatgcccgtggaggccgcttctgaagccttgcggcgattgagcgtgtgtgggcgcacactgagcttggacctggccacctcagccgcttcaggcatgaaagtacaaggtgaccctggaggcaagaccggaacggaggggaagtccagaggttcatcgagtagcagccgatgtctgtag

SEQ ID NO: 127114 - DNA, 3999 bp, synthetic construct
  misc_feature 1..3999: note = Description of Artificial Sequence: Synthetic coding sequence
  source 1..3999: mol_type = other DNA
atgagtgacatggactatcctctgcagggtcccggactgctgtccgtccccaatctcccagaaataagtagtatccgcagggtcccccttccaccagagctggttgagcagttcgggcacatgcagtgcaactgcatgatgggtgtattccctccgatttctcgggcttggctgaccatcgactcggatattttcatgtggaactacgaggacggcggagacctcgcttattttgacggcttgagcgaaacaatactcgccgtgggtttggtaaagccaaaggcaggcatattccagccacacgtgcggcacttgttagtgctggccacaccagtagacatcgtgattcttggactgtcttacgctaatttgcagaccggaagcggggtgttgaatgattccctttcaggcggcatgcagttgcttcctgatcctctctattctttgccgaccgacaatacctaccttctgacaatcacttcgacagataatggccgcatattcctggccggcaaggacgggtgtctgtatgaggtcgcatatcaagctgaagcagggtggtttagtcagcggtgtcgcaaaattaaccattcaaaatccagcctatcattcctcgtccccagtctgctgcaattcaccttttcagaagatgacccaattcttcagatcgccatcgacaacagccggaatatcctctacaccagaagcgaaaagggagtgatccaggtttacgacttggggcaggatggccagggaatgagcagagtcgcttccgtctctcagaacgcgatagttagcgctgctggcaatatcgcgaggacgatcgatcgttccgtttttaaacctatagttcagatcgccgtgattgaaaattccgaatctcttgattgccagttgttggccgtcacccatgccggtgttagactctatttctcaacctgtccgttccggcagcctttagctagaccgaatacattgaccctggttcatgttcgcttaccacccggcttctcggcctcgagcactgtagaaaagcccagtaaagttcatagggcactgtactccaaggggatccttctcatggcggccagcgagaatgaggataacgatatcctgtggtgtgtaaaccacgataccttcccgttccagaagccaatgatggaaactcagatgaccgccggtgtcgatggacatagctgggcacttagtgctattgacgaactcaaggttgataagattataacacccctgaacaaagaccacatcccaataactgacagtcccgtggtggttcagcagcatatgctgccgcctaaaaagttcgtcttgcttagcgctcagggctctttgatgttccacaaattgcgaccagtggatcagctgcggcatctgctggtcagcaacgtgggcggagatggggaggaaattgagaggttttttaagctgcaccaagaagatcaggcttgcgctacatgcttaatcctggcctgtagcacagcagcatgcgaccgggaagtgagcgcatgggcaacccgggccttctttcgctacggcggcgaagctcagatgagatttcccaccaccctgcctccaccaagcaacgtcggcccaatcttgggttcccctgtatattcaagctcaccagtcccttctggaagcccttaccccaacccttcattcctgggaacaccctcacacgggattcaaccccccgccatgtcaacgcctgtctgtgctctgggcaatcccgctacccaggcaacaaatatgtcctgcgtcaccggtccagagatcgtctatagtggaaaacacaatggcatatgtatttatttctctaggatcatggggaatatttgggacgcgtcacttgtggttgagcggatctttaaaagcggaaatagagagatcacggccatcgagtctagcgtcccatgtcagttattggaatctgttctgcaggagctgaagggcctgcaagagttcctcgatcgcaattcgcagtttgccgggggtcccctgggaaacccgaatacaacagccaaggtacagcagaggctgattggatttatgcgcccagagaatgggaacccacagcaaatgcagcaggagcttcagcgaaaattccatgaagcccagttatctgaaaagatttccctccaggctattcaacagctggttagaaagtcctatcaggctctggcattatggaaattactctgcgaacatcagtttacaataatcgtcgccgaattacagaaagagcttcaggagcagctgaagattaccacattcaaggatctggtcatccgcgataaagagctgactggagccctcatcgccagccttatcaattgctacatccgggataatgctgccgttgatggtatttctctgcatctgcaggacatctgtccactattgtattccacagacgacgcaatctgcagcaaagctaacgagctgcttcaaaggagcaggcaggttcagaataaaacggaaaaagaacgaatgctgagggaatcattaaaagaatatcaaaaaattagcaatcaagtggatctgagtaatgtctgcgcacagtacaggcaagtgcgattttatgagggcgtggtggaactgtcgctgactgctgcggagaagaaagatccccaaggcctagggctacatttctataaacatggcgagcctgaggaagacatagtggggctgcaggcgtttcaggagaggctgaactcatacaaatgcatcacagatactttgcaggagctggtgaatcagtcaaaagccgctccccagtcgccatccgttccaaagaagcctggcccccctgtgttatcttctgacccaaatatgctaagcaacgaggaggctggccaccattttgaacaaatgcttaagctttcacaaagatctaaagatgaactgttctccatcgccctgtataattggctgatccaggtggatctagctgacaagctcctccaggtggcttcgccgttcctggaaccacatctggtgaggatggcaaaagtggaccaaaatcgggtcaggtacatggatctcctgtggaggtactatgagaaaaatcgaagcttctctaacgcagcccgagtgctcagccggctagcagacatgcactcgacggagatttcactccagcagaggctcgagtacattgctagggccattttatctgcgaagtcttccactgctatctccagtatcgctgctgatggtgagtttttgcatgagttggaagagaagatggaggtggctcgcattcagctgcagattcaggagactctccagcgccaatattctcaccattcctccgtgcaggacgccgtcagccagcttgattctgagctgatggacatcactaaactctacggagagttcgcagatcctttcaagttagctgaatgtaagctggcgattatccactgtgcgggctacagtgatcctattctggtacaaaccctgtggcaggatattatcgaaaaggagctcagtgatagcgttactctgtccagttcggacagaatgcatgctctgtctctgaaaatcgtcctcctcggcaagatctacgccggcaccccccggttctttcctctggacttcatagttcagttcctcgagcagcaggtgtgtactctgaactgggacgttggctttgttattcagacgatgaatgaaatcggtgtgccattgcctagacttttggaggtgtatgatcagttatttaagagtcgggatcccttctggaaccggatgaagaaacctctccacctgcttgactgcatccacgtgctgctaattagatacgtggaaaatccctctcaggtactgaattgcgagaggcggcgtttcactaacctatgtctggacgccgtgtgtggctacctcgtggagctacaaagtatgtcttccagcgtcgccgtccaagctattacgggtaatttcaaatccctacaagctaagctggaacggctgcattag

SEQ ID NO: 127115 - DNA, 4062 bp, synthetic construct
  misc_feature 1..4062: note = Description of Artificial Sequence: Synthetic coding sequence
  source 1..4062: mol_type = other DNA
atgtacccagatttgagcgagctgcttatggtgagtgctccgaacaatccaacggtttccggcatgtctgacatggactatcctttgcagggccccggtctcttgtcagtccccaatctacccgagatttcttccatcagacgagttccgctgccgccagagctggtcgagcaattcggccacatgcagtgtaactgtatgatgggtgtcttcccaccaatctcacgggcatggctgacaattgattcagacatattcatgtggaactatgaggacggaggggatttagcatacttcgacggcctgagcgaaaccatcttagccgtgggcctggtcaaaccaaaagctggcatcttccagccacacgttagacaccttctggttctggctaccccagttgacatcgtgatcctgggactctcttatgcgaatctccagactgggtcgggcgtgctgaacgacagcctgtccggcgggatgcagctgctgccagacccgctgtattctcttccaacagataacacatatttactgacaattaccagtaccgataatggtagaatctttctggcgggcaaggacggatgtctctatgaagtggcctaccaggcagaagctggttggtttagccaacgctgcagaaagatcaatcattcaaaaagttccctgagcttcctggttcccagcttactccaattcacgttcagtgaagatgaccctattcttcaaatcgccatcgacaattcccggaacatcctgtacacacgcagcgagaagggggtgatacaagtctacgatttaggacaggatggacagggcatgtcgcgagtagcgtccgtgtcacagaacgcaattgtgagcgccgctggtaatatagccaggacaatcgatagaagcgtcttcaagccaattgtgcagattgcagtgatcgagaacagcgagtctctcgattgccaattgttggctgtgactcatgccggcgtgagactgtatttctcaacatgtccttttcggcagcccctggctagacccaacactctgaccctggtgcatgtccgcctccctcccggatttagcgctagttctacagtagaaaagccgtccaaggtgcaccgtgccctctattctaagggtattctactgatggccgcttcagagaatgaagacaatgatatactgtggtgtgttaaccacgacaccttccccttccaaaagcccatgatggagactcagatgaccgccggtgtggatgggcactcttgggcgctttctgccatcgacgagttgaaagtcgataagattattactccactcaacaaagatcacattcccattactgattctccggtggtcgttcagcagcacatgctgccacccaagaagtttgtgcttctcagcgcccaaggttcactgatgttccataagctgaggcccgtcgaccagctgagacacctcctggttagtaacgtgggaggtgacggggaagaaatagaaagattttttaaactacaccaggaagaccaagcctgtgccacctgtctgatactggcctgctcaaccgcggcatgtgatcgcgaagtgtctgcatgggctacgcgagccttttttagatacggcggcgaggcccagatgagattccctaccactttacctcctcccagcaatgtcggacctattctcgggagtcccgtgtactcctccagccctgtgccctctggctcgccataccctaaccctagctttctaggcacaccttctcacggcatccaaccacccgccatgtcgaccccagtctgcgctctgggaaatccggcaactcaggcaaccaatatgagctgcgtgactggcccagagatcgtgtattcaggaaaacataacggtatctgtatctacttctccagaataatgggtaatatttgggacgcttcgcttgtggtggagcgaatttttaaatctggtaatagggagatcaccgccatcgagtccagcgtgccctgtcaattactagaaagtgtgttgcaggaactcaagggattgcaagagttcctggaccgaaactcccaatttgcagggggacccttggggaatccgaataccactgctaaggtccaacagcgactcataggattcatgagacctgaaaatggaaatccacaacagatgcagcaggagctgcagcgcaaatttcacgaagcccagctcagcgagaaaatcagtctccaagctatccagcaactggttcgaaagtcctaccaggcccttgcgctgtggaagttgctgtgcgaacatcagttcacaataatcgtggcagaattacagaaagagttgcaggagcagctcaaaataactactttcaaagatctcgtgattagggataaagaactaaccggagctcttattgcatcgttaattaattgttatatccgagacaacgcggctgtcgacggcatcagcctgcacctccaggatatctgtcctctgctctatagtacagatgatgctatctgttccaaggcgaatgagctgcttcagaggtccaggcaggtccagaataaaaccgaaaaagaaagaatgcttcgggagtctctgaaggagtatcagaagatctccaatcaggtagacttaagtaatgtgtgcgcccagtacaggcaggtccgcttttacgagggagtggtggagttatctttgacagcagctgaaaaaaaagacccgcaaggtttaggattgcatttctataagcatggtgagccagaggaggatatcgtggggctccaggcctttcaggagcgtttaaattcctataagtgtattactgacactttacaggagctcgtgaatcagagcaaagcggccccacagtctcctagtgtgcctaagaagccaggccctccagtactgagttcagaccctaatatgctgagcaatgaagaggccgggcaccactttgaacagatgttgaaactctcacagcgaagcaaggatgagcttttctcgattgccctgtacaactggctaatacaggttgatctggccgataagctgctgcaggtcgccagcccctttctggaacctcacctcgtgaggatggcaaaggtggaccaaaatagagttcgatatatggacttactgtggaggtactacgaaaagaatcgcagcttcagcaatgctgcccgggtcttgtcccggctggctgatatgcattcaaccgagatcagcctgcagcagagactggaatatatagccagagccatcttatccgccaaatcttcaactgcaataagcagcatcgccgccgatggggagtttttgcacgagttggaggagaaaatggaagtcgcacgaattcaacttcagattcaggaaaccctccagcgacagtattcccatcattccagcgtccaggatgctgttagtcagttggactctgagcttatggacattaccaaactgtatggcgagttcgccgatccctttaagctggcagagtgtaaacttgccattattcattgcgccggttactccgaccctattctggttcagaccttatggcaggacatcatagaaaaggaactgtcggactccgttacactgtcctcctctgaccgcatgcacgcactatctctgaaaatcgtccttctcggaaagatttacgcgggaaccccgaggtttttcccactggactttattgtccagttcttagagcagcaggtgtgcacactgaactgggatgtggggtttgtgatccagacgatgaatgagattggcgtaccactaccgcgactactagaagtatacgatcaattgttcaagagccgggacccattctggaatcggatgaagaaaccgctgcaccttttggactgtatccacgtgctgcttatccgctatgtcgagaacccttctcaagtccttaattgtgaaaggagacgctttactaatctgtgtcttgacgcggtctgtggctacttggtggaactccaatcgatgagcagctccgtcgctgtccaggccattacaggtaacttcaaaagtctacaagccaagctggagaggctgcactag

SEQ ID NO: 127116 - DNA, 3984 bp, synthetic construct
  misc_feature 1..3984: note = Description of Artificial Sequence: Synthetic coding sequence
  source 1..3984: mol_type = other DNA
atgcccagctcactcctgggggctgcaatgcccgctagcaccagcgccgccgcccttcaagaggccctggaaaatgcaggacgtctcattgatcgacaactgcaagaggataggatgtatcctgacctcagtgaattattgatggttagcgcacccaataatcccaccgtgtctggcatgagcgatatggactacccgctacagggacctggacttctgtccgtgcctaatctgcccgagatttccagcattcgaagagtgcccctcccacccgaactggtggagcagttcggccacatgcagtgtaattgtatgatgggagtctttccacctatctctcgggcgtggcttacgatcgactccgatatttttatgtggaattatgaagatggcggtgaccttgcctattttgacgggctgtcagagaccattctggcagtcggcttggtgaagcccaaggctggcatctttcaacctcatgttcggcatctactggtactggcaaccccagtcgacatcgtgattctcggattatcatacgcaaatctacaaacaggttcaggggtgttaaacgactctctctccggagggatgcagctgctgccggaccctttgtacagtctacccaccgacaacacatatctgctgacaatcacctccactgataacggccgcattttcctcgcaggcaaggacggatgtttgtacgaagttgcatatcaggctgaggctggatggttctcccagaggtgccgcaaaattaaccactccaagtcctctttgtcttttctggttccctctttgcttcagtttacatttagcgaggatgacccgatcttgcagatcgcaatcgacaattcgagaaatattctatatacacggagcgaaaagggagttattcaggtctatgacctggggcaagatggccaagggatgagcagggtggcgagcgtgtctcagaatgcaatcgtctcagcagctggtaatatcgctcgaacaatcgaccgctcggtattcaagcctatcgtgcagatcgctgtcattgagaactccgagagcctcgactgtcagctgctggctgtgacccatgctggagtgcggctgtatttttccacctgtccattccggcagccactggcccgcccaaataccctgactctcgtgcatgtaaggctccccccaggattttctgcctcatctacagtcgaaaagcctagcaaggttcacagagctctatacagcaaggggatcctacttatggctgcttccgagaatgaagataacgacattctgtggtgtgtcaaccacgacacattcccctttcagaagcctatgatggaaacacagatgaccgcgggggttgacggacacagctgggccctgagtgcaatcgatgagcttaaagtcgacaagatcattacaccgctgaacaaggaccatataccaatcaccgattctcccgtcgtagttcagcaacacatgcttcctcccaaaaagttcgtgttgctcagcgcgcagggatctttaatgttccataagctaagacccgtggaccagctacgacacctcctggtgtccaatgttgggggagacggcgaggagatagagcgtttctttaagttgcaccaagaggatcaggcctgcgcgacctgtctaatcttggcgtgctcaaccgccgcctgtgaccgagaggtctcagcgtgggcaacaagggcttttttcaggtatggtggagaggcacaaatgaggttccctaccaccctaccacccccaagtaacgtcgggccaattctgggctcccccgtctattccagttccccggttccctctggcagtccatatcccaatccgtcatttctcggaacgccttctcacggcattcagccaccagccatgagcacccctgtgtgtgccctgggaaatccagctacccaagctaccaacatgtcctgcgttacagggcccgagatcgtgtactccggcaagcacaatggtatatgcatatactttagtcgaatcatggggaacatttgggatgcaagtctcgtggtggagagaatctttaagagcggaaaccgggagattaccgctattgaatcttctgtcccatgtcagctgctagagagtgtgctgcaggaattgaagggactccaggaatttctggaccgcaattcacaattcgccggtggacctcttggaaaccctaacacaaccgccaaggtccagcagcgccttataggctttatgcggccggaaaacggaaatcctcagcagatgcagcaggagctccagaggaagttccatgaggcacagctatctgaaaagatttctctccaagctatacagcaactggtgagaaaatcgtaccaggccctggcactttggaagctcctctgtgagcaccagtttaccataattgtcgctgagctacagaaggctaacgagctgctgcagcgatctaggcaagttcaaaacaagaccgagaaggaacgtatgctgcgcgagtcccttaaggaatatcaaaaaattagtaaccaggttgacctgtctaatgtttgcgcccagtaccggcaggtaagattttacgagggcgtggtcgaactttcgctgactgctgctgagaaaaaggaccctcagggcctggggctgcatttttacaagcatggtgaaccagaggaggatattgttggccttcaggcatttcaggaaaggctcaactcatacaagtgcatcacggacacactgcaggaactggtgaaccagagtaaagctgctcctcaaagtcccagcgttcccaaaaaacccggacccccagtgctctcgtccgatccaaatatgctcagcaatgaggaagcagggcaccactttgagcagatgctgaaattaagtcagagatcaaaggatgaactctttagcatagccctgtacaactggctcatccaggtggacctggcagacaaactgttgcaggtagcttcaccattcctggagccccatctggtgaggatggccaaggtagaccaaaacagagtgcggtacatggacctgctgtggaggtactacgagaagaatcggtcctttagcaacgcagctcgagtcctctctcggcttgccgacatgcacagcacagagatctcactccagcagagactagaatatatcgctcgagcgatcctgagtgctaagagttcaaccgcaatctcgtcaattgcagcggacggcgaattcctccatgaactggaggagaagatggaagtggcccgaattcagctccagattcaggaaacgcttcaaaggcagtattcacaccatagctctgtccaggacgccgtaagtcagctagacagtgagctgatggatataactaaactgtatggagaatttgctgacccatttaagctggctgaatgcaagctggctattattcattgcgcaggttactctgatccaattcttgtgcagactttgtggcaagacatcatcgaaaaagagctgtcagactctgtgactctctcgtcctcagatcggatgcatgctctgagtcttaagatcgtgctgctggggaaaatatacgccgggacccctcggttctttcctctggatttcatcgttcagttcctggaacagcaggtctgtaccctgaactgggacgtaggcttcgtcattcagactatgaatgaaattggcgttcctttgccccgactgttggaagtctacgatcagctgtttaagtctcgcgaccccttctggaataggatgaaaaaaccactgcatcttctggactgtatacatgtactgctgatcaggtacgttgaaaatccatcacaggtgctgaattgcgaaaggcggcgctttacaaacctgtgcttggatgctgtctgcgggtatttggtagaattacaaagtatgagctcctctgtcgcagtccaggcaatcaccggtaatttcaagtccttgcaggcgaagttagagcgtctgcactag

SEQ ID NO: 127117 - DNA, 4311 bp, synthetic construct
  misc_feature 1..4311: note = Description of Artificial Sequence: Synthetic coding sequence
  source 1..4311: mol_type = other DNA
atgttacatttgagcgccgccccgcctgcccctccacctgaggtgactgctactgcacgaccttgtctctgtagtgtaggtcgaagaggtgacggaggtaaaatggccgccgcaggtgcactggaaaggagcttcgtggaactgagcggcgctgagagagagcgccctcgccactttagagagttcacagtctgtagcataggcactgccaatgcagtagccggtgccgtcaagtacagcgaaagtgcaggtgggttttactatgtcgagagtggcaaacttttttcagtgactcgcaaccgatttatccactggaaaactagtggagatactctggagctcatggaagaatctctggatatcaacctcctgaacaacgcaataagactgaaattccagaactgttccgtcctgccaggaggggtttatgtgtctgagacgcagaaccgtgttatcatcctgatgctgactaatcaaaccgttcaccggctgcttctgccccatcctagcaggatgtaccgcagtgaattagtcgtggacagccagatgcaatccatattcacggatattggaaaggtggatttcaccgatccttgcaactatcaactgatccctgcggtgcccggcatttcccccaactccacggctagcactgcatggctgtccagcgacggagaggctctgtttgcgctgccgtgcgcttctggtggtatattcgtcctgaagctgcctccgtacgatatccctggcatggtgagcgtcgttgaattgaaacaaagcagcgtcatgcagcgcctcctgactggttggatgccaaccgctatacgcggggaccaatcaccatctgatcgtccactctctctggccgtacactgtgttgagcacgatgccttcattttcgcgctgtgtcaggatcataaactgagaatgtggagctacaaagaacagatgtgcctcatggtggctgacatgctcgaatacgtccccgtgaaaaaagatttgcggctgaccgccggaacaggccacaaacttcggctcgcatattccccaacaatggggctgtacctgggcatatacatgcatgcccctaaaagggggcagttctgtatcttccagctggtgagtaccgagtccaacaggtacagcctggatcacatctccagcctcttcacttctcaggaaacccttatagatttcgccctgacatcgactgacatctgggccctgtggcacgacgctgagaatcagaccgtggtgaagtacatcaacttcgaacataatgtggcaggacagtggaacccagtgttcatgcagcccctccctgaggaggagatcgtcatccgcgatgaccaagaccctcgggagatgtacctacaatcattgtttacacctggacagtttacaaacgaggctctctgcaaggcccttcagatattttgcagaggaacagagcgaaacctggatctgtcctggagcgaactcaagaaggaagtgaccttggcagtggagaatgaactgcagggtagcgtaactgagtatgagtttagtcaggaggaatttcgcaatcttcagcaagagttctggtgtaagttctacgcctgttgcctccagtaccaggaagccctgtcccacccactcgctctgcatctgaacccacacacgaatatggtctgcctgttgaagaaagggtatctgtccttcttgatcccctctagcctagttgatcacctttatcttctaccctatgaaaacctgctgacagaagacgaaaccaccatctctgatgacgtggatatcgctagagacgtgatctgtctgattaaatgcctgagacttatcgaagagagtgtgacagttgacatgagcgtcattatggaaatgtcctgctataatcttcaatcgcctgaaaaagccgcagagcagatcctggaggatatgataacaatcgatgtcgaaaacgtgatggaggacatctgctccaagctgcaggaaattcgcaatcccattcatgccattggcctcttgatcagggagatggattatgagacagaggtcgagatggagaaaggatttaatcccgcccagccattaaatattcggatgaatctgacacagctgtatggcagcaataccgcaggatatatcgtctgcagaggagtgcataagattgcaagtaccaggttcctgatttgcagagacttgttaatccttcagcaactgctaatgcgtctgggcgacgcagtcatttggggtaccggtcaactcttccaggctcagcaagacctgctgcaccgcactgctcccttactcttatcttactatctgattaaatggggttccgaatgccttgcaactgatgtgcccttggacacgttggagagcaatctccagcatctctcggtgctagaactcactgatagtggagcgctgatggctaacaggttcgtgagcagcccgcagaccattgtggagttatttttccaagaggtggcacggaaacatatcatcagtcacctgttctctcagcccaaagccccgctgagtcagaccggacttaattggcctgaaatgatcacagccataacctcatacttgttgcagctactgtggccgagcaaccctggctgcctatttctcgaatgtctgatgggcaattgccagtatgtgcagctgcaggactatatccagctgttgcacccctggtgccaagtgaatgtgggcagttgccggttcatgctgggacgctgttacctggtcaccggggagggacagaaggccttagaatgcttttgccaggcagcttcagaggtaggtaaggaggaattcctggatcggctgattcgtagcgaggacggagaaattgtcagtacgccccggcttcagtattacgataaagttctgcgcttgctggatgtcatcggcctgcctgaactagtcatccagctggccacttcagccattactgaggcaggggatgattggaaatctcaggcgacactccggacatgtatcttcaagcatcacctggaccttggacacaactcccaggcctacgaggcgttgacccaaatacccgatagttccaggcagctggactgcctgaggcagcttgttgtagtgctgtgtgaaagatctcagttacaagatttggtagagtttccctacgtgaatctgcataacgaggtggtgggaatcatcgagtcccgcgcccgcgccgttgacttgatgacacataactactatgaattgctgtacgccttccacatatataggcataattaccgtaaggccgggactgtcatgttcgagtacgggatgcgccttggccgcgaggtgcggactctgcgtggtttggagaaacagggcaattgctatttggctgctcttaattgtctgagattgatccgccctgaatatgcatggattgtgcagcccgtgtccggagcggtctacgatcgccctggggccagtcctaagaggaaccatgacggagaatgtacagctgcgcctactaacaggcagattgagatactcgaacttgaggacttagagaaggagtgctccttggcccgtattaggctcaccctggcccagcacgatccatcagccgtggccgtggctgggagtagctccgctgaggagatggtgacactgttggtgcaggccggcctgtttgacacagctatatccctctgtcagacattcaaattaccactgacacccgtgttcgaggggctggcatttaaatgcatcaaactgcagtttggaggtgaagctgcacaagcagaagcgtgggcttggttggctgctaaccagctctccagtgtgattaccacgaaggaatccagtgccactgatgaagcttggcggcttctgtcgacttatttggaaaggtacaaagttcaaaacaatctataccatcattgcgtgatcaataaactcctgagccacggggtgcctttgcctaactggttaatcaacagctataagaaggtggacgctgccgagttgctgcggttatacctgaactacgaccttctggaggaagccgtggatctagtctccgaatatgtggacgctgtgctagggaagggacaccagtactttgggatagaatttcccttgagtgctacagcccctatggtgtggctgccttacagtagtatagaccaactactgcaagctcttggtgagaacagcgccaattctcacaacatagcactctctcagaagatcctagataagcttgaggattaccagcaaaaagtagacaaggccacccgcgacctactctaccgaaggaccttgtag

SEQ ID NO: 127118 - DNA, 1452 bp, synthetic construct
  misc_feature 1..1452: note = Description of Artificial Sequence: Synthetic coding sequence
  source 1..1452: mol_type = other DNA
atggtgtcagtggtagaactgaaacagagcagtgtcatgcagagactgctcaccggatggatgcctacggccattcgcggtgatcagtcaccttccgacaggcccctgtccctcgccgtccattgtgtcgagcacgatgctttcatattcgccctctgccaagaccacaagctccgcatgtggtcctataaggagcagatgtgtttgatggtggccgacatgctggaatacgtccccgttaagaaggatctacgcctgacggccggaactggccacaagctgcggttggcctactccccaacgatgggcttgtatcttggcatctatatgcacgcacccaagaggggacagagacgggggtttgccatgttgcccggtctcaagctcctgagctcctcatctccccctacatctgccagccagtgcgcaggcatcaccagcgttaaccatagcacacagcccgagttttttttctgtattttccagctggtcagcacagaaagcaataggtattccctcgaccatatctcgtccctgtttacaagccaggaaacactgattgatttcgcactgacgtctacagacatttgggccttgtggcatgacgccgaaaatcagactgttgtgaagtatatcaattttgagcacaacgtggccggccagtggaaccctgttttcatgcagcctctccctgaagaagagatcgtcatccgagacgaccaggacccaagagagatgtacctgcaatctctgtttacccctgggcagtttactaatgaggccctgtgcaaggctctgcaaattttctgtcgcggtaccgaacggaacctggatctctcatggtccgagctgaaaaaagaggttacacttgccgtcgaaaacgagctgcagggtagcgtaacagagtatgagttctcccaggaggaatttaggaacctgcagcaggagttctggtgcaagttttatgcttgctgcttacagtaccaggaggcactcagccatcccctcgcactgcatctaaacccgcatactaacatggtgtgcttactcaagaagggctatctatcatttctaatacctagttccctggtggaccatctttacctgctgccttacgagaacctgctgacagaagacgagactacaatttctgatgacgtggacattgcaagggacgtcatttgccttattaaatgcttaagactgatagaggagtcagtgaccgtggatatgagcgtgataatggaaatgagctgttataacctacaaagcccggaaaaggcggccgagcagatcttggaagacatgattacaatcgatgtggagaatgtgatggaagatatttgctcgaagctgcaggaaattcgaaatccaatccacgctatagggctgctcattcgggagatggattatgaaacggaggttgagatggaaaaggggtttaacccatag

SEQ ID NO: 127119 - DNA, 675 bp, synthetic construct
  misc_feature 1..675: note = Description of Artificial Sequence: Synthetic coding sequence
  source 1..675: mol_type = other DNA
atgctgcatctcagcgccgcgcccccggcgcccccccctgaggtgactgctaccgcccggccttgtctatgttctgtgggccgtcgcggcgacggcgggaagatggccgcggctggcgccctcgagcggtctttcgtcgaactatcaggcgccgagagagagaggccccggcactttcgggaatttaccgtgtgttctattggtactgccaatgcagttgccggggctgtgaaatactccgagtcggccggaggcttttattacgtggaatccgggaaacttttttcggtcactcgaaataggtttatacattggaaaacttcaggcgatacccttgagttaatggaagagagtctcgatattaacttgctcaacaacgctattcgcctgaagttccagaattgctctgtgctccccggcggagtgtacgtgtccgaaactcagaacagagtgatcatactcatgctgaccaatcaaacagtgcatagactgctactgccacatcccagcagaatgtaccggagcgtgagctggctgtcggcaatcagcttcatatcccaaataactttgggggttacaaacgtggtgcttgagcgatgtctgctggagctgaaggaaatctggattttggtgatcccacaccaagcctatttcgactcgtacagactgaagtag

SEQ ID NO: 127120 - DNA, 6039 bp, synthetic construct
  misc_feature 1..6039: note = Description of Artificial Sequence: Synthetic coding sequence
  source 1..6039: mol_type = other DNA
atggcaacacctcttgccgtgaattcagccgcatctctgtggggcccctataaggacatctggcataaggttggtaacgcactctggaggcgccagccggaggccgtgcatctgctggataagattctcaagaagcacaaacctgacttcatatccttgttcaagaatccaccaaaaaatgttcaacagcatgagaaagtacagaaggcgtctacagagggcgtggctattcagggacagcaggggactagattgctgcctgaacagcttattaaagaggctttcattttatccgatttgttcgatattggcgaactagctgcagtggagctgctgcttgccggcgagcatcagcagccccacttcccaggcctcaccagggggctggtggctgtgcttctctactgggacggaaagcgatgtatagccaactcactgaaggctttgatccagtctagaaggggaaaaacatggactctggaattgagtcctgaactcgcctcaatgaccacacggttcacggatgagcttatggaacaggggctgacctacaaagtgctgactctcgtatctcagattgatgtaaacaatgaatttgaaaaactgcagcgcgagaggggccttggatcagaaaaacaccggaaggaggtttcagacctgatcaaggaatgtaggcagagtttggccgagagtttatttgcttgggcctgccagtctcctctgggcaaggaggatacactgctgcttatcgggcatctggagagagtgaccgtcgaggccaacggatcacttgatgctgtcaacctggcgcttctgatggctttattgtattgcttcgatatctccttcatcgaacagagcaccgaggagcgagatgacatgatccaccagctgcccctcctgaccgaaaagcaatacattgcgactatccacagccgccttcaggactcccaactgtggaagcttcccgggcttcaagccacagtgaggctggcctgggcactcgcactacgtggaatatcccagcttcccgatgtgacagctctggccgagttcaccgaggctgacgaggccatggcggagctggcaatcgccgacaacgtattcttgttcctgatggaatcagtggtggtttcggaatatttctatcaagaggaattttatatccgccgtgtgcacaacctcataacagacttcttggccctcatgccaatgaaagtaaaacagctccgcaaccgcgccgacgaagacgcacggatgatccatatgtccatgcagatgggcaatgagccacccatttctctcagacgggacttagagcaccttatgctgttaatcggtgaactgtataaaaagaatcccttccacctggaactggctctagaatattggtgcccaacagaacctctccagacccctacaatcatgggctcttacctgggcgtggcccaccaaaggccccctcagcgacaggtggtcctgagcaagtttgtcaggcaaatgggcgatcttttgccgccaacgatctacatcccctatctgaagatgctccagggactggccaatgggccacaatgcgctcattattgtttttctcttctgaaagtgaacgggagcagccacgtggaaaatatccagggtgctgggggatcgcctgtgagttgggagcactttttccacagtctaatgctgtatcacgaacacttgcggaaggacctaccctcagccgactccgtgcagtatcggcatctgcctagccgcggaatcacccaaaaagaacaggacggactgattgcttttctgcaactgaccagcacaatcattacctggtctgaaaatgcccgtctggccctgtgtgagcatccccagtggacaccggttgtcgttattctgggtcttttgcaatgcagtataccaccagttctgaaggccgaactgctgaagacactggctgccttcggcaagtccccagagattgcagcctcactttggcaatcgctcgaatatactcagatcctacaaaccgtacgaatcccctctcagcgtcaagcgataggtatagaggttgaactgaacgaaattgaaagccgatgtgaggagtatcccctgacacgcgctttctgtcagctcatttccaccctggttgagagctccttccctagcaatctgggtgccgggttgcggcctcccggctttgacccttaccttcagtttcttcgcgactccgtcttcctgcgattccgcacacgggcttaccggcgagctgcagaaaagtgggaagtcgcagaagtggtccttgaagttttctataagctcctgcgcgattatgagccacaactcgaggatttcgtggatcagttcgtcgagctccagggggaggaaatcatcgcctacaaacctcctggattcagtttgatgtaccatctgctgaacgaatccccaatgctggaacttgctctgtctctgctggaggaaggagtgaagcagctagacacctatgcccccttcccagggaagaaacatcttgagaaagcagtgcaacactgcttggccttactcaatttgaccctgcagaaggagaacctgttcatggatctgctgagggagtcccagctggcactgattgtgtgcccgctagagcaactgttacagggaataaatcctaggactaaaaaggccgacaacgtcgtaaatattgcgcgatatctataccatgggaacactaacccagagctcgcttttgagagcgccaaaatcctctgctgcatttcttgcaatagtaacattcaaattaagcttgtgggagattttacccacgaccagtcaatttctcaaaaactgatggccggatttgttgagtgtttggattgtgaggacgccgaggagttcgtccggctggaggagggttctgagctcgaaaagaagcttgtcgccatccgtcatgaaacacgcattcatatcttgaacttgctgatcacaagcttggagtgtaatccccctaacttggctctgtacctgctggggttcgagctgaagaagcctgtgtctaccaccaatttgcaagatccgggggtactcggctgtcctagaacatgtctgcatgctattttgaacatcctggaaaaaggcacagaggggagaaccgggccagttgctgtcagggaatctccgcagctcgccgaactgtgttaccaagtgatttatcagctctgtgcttgcagcgacacgagtggtcctacgatgcggtatctccgtacatcgcaggatttcctgttcagccagctacagtatctgcccttttctaataaggaatatgagatcagcatgctcaatcagatgtcttggctgatgaagactgccagtattgaactgcgtgtcaccagtttaaacagacagaggagtcacacacagagacttctgcacctcctcttggatgatatgcccgttaaaccatattctgacggcgaaggcggcatagaagacgaaaacaggagcgtctccggcttcttacactttgatacagcaacgaaagttcgcaggaaaatactgaacatactagattcaattgacttctctcaggaaataccagagccactccaactcgacttcttcgacagggcccagatagagcaggtgattgccaactgcgagcataagaatctccgaggtcagacagtatgcaacgtgaagttgctgcatagggtgctcgtggctgaggtgaacgccctgcagggtatggcagcgattggacagagacccctccttatggaagaaatctcaaccgtgctgcagtacgtggtgggccgcaacaagctgctgcaatgcctgcacgctaagcggcatgcacttgagagctggcgtcagcttgtggagataatcctgaccgcctgcccccaggatctgatccaggccgaggacagacaacttatcataagggacattcttcaagatgtccatgacaaaattctggacgatgaggctgctcaggaacttatgcccgtagtcgccggtgcggtctttacactgacagcacacctgagccaggcagtgctgaccgagcagaaggagacttcagtcctggggcctgctgaagctcactacgcttttatgttggattcatgctttacatctcctcctccagaggagaacccactcgtaggcttcgcatccatcggcgattcatcactgtatattatccttaagaaactgctggactttatcctgaagaccgggggcggctttcaacgtgtgcggacacatctctacggtagcttactttattacctacagatcgcacagcggcctgatgaacccgatacactagaagcggcaaagaagaccatgtgggagcggctcaccgctcccgaggatgtgttctccaagttgcagagggaaaacatagcaattattgagtcttatggtgctgcactgatggaagtggtctgccgcgacgcctgtgatggccacgagatagggagaatgttagctttggctctgttggacagaatcgtatccgtggataaacagcagcagtggctcttgtacctcagtaattccggctaccttaaagtcttagttgattcactcgtcgaggatgaccggaccctgcagtctctactgacccctcagcccccgttgctgaaagctctctatacatacgagtctaaaatggcatttctgactagggtggcaaaaattcagcagggggccctagagttgttaagatctggggtcattgtgagactggctcaatgtcaggtgtacgacatgagaccagagaccgatccccagagtatgtttggaatgcgtgacccacctatgtttatccctacccctgttgatcgttaccgccagattttactgcccgctctgcagctatgccaggtgatcctgacatcttcaatggctcaacatctgcaggccgccggccaagtcttgcagttcctgatatcacattccgataccatccaggcgatcttgcgatgtcaagatgtgtctgcgggttctcttcaggagctggccctgctgacagggatcatttctaaggccgcgttaccaggaatcctgtccgaactggatgtcgacgtaaatgaggggagtttgatggagctgcagggacatattggacgcttccagaggcaatgcctgggcctattgtccaggtttgggggctcagatcgcttacgccagtttaagttccaggacgataacgtcgaaggagataaggtgagcaaaaaggacgaaatcgagttggccatgcaacagatctgtgcgaacgtgatggaatactgccaatcattaatgttacagtcttcaccaaccttccagcatgccgtgtgtctgttcactcccagcttgagtgaaacagtaaatcgcgatggtccccggcaagatacccaggcacctgtagttccctactggaggctgccaggccttgggattattatctatctcctgaagcaatcggctaacgacttcttcagttactacgactcacatagacagtcagtgtccaagctccagaatgtcgagcagttgcccccggatgagatcaaggaattatgtcagtcggtaatgccggctggggtggataaaatctcaacagctcagaaatacgtgctagcccgccggagattagtgaaggtcatcaataaccgggcaaagcttttatctctttgttcattcataattgaaacatgcctctttatcttatggcggcacctggaatattacctgctccactgtatgccaactgacagccaagacagcctctttgcaagtcgcaccctctttaaaagtaggcgattacaggacagcttcgcatccgaaaccaatcttgatttccgaagcggcctggccattgtatcacagcacgacttggaccagttgcaggccgatgccatcaatgcctttggcgagtcccttcagaagaagctgttggacattgaaggactttactccaaagttcggtctagatactcctttatccaggccttggtccgaagaattagggggctgcttcgcatctctcggaattag

SEQ ID NO: 127121 - DNA, 750 bp, synthetic construct
  misc_feature 1..750: note = Description of Artificial Sequence: Synthetic coding sequence
  source 1..750: mol_type = other DNA
atgagccttagaaattattctgagagggaggtcagtgaccttatcaaagagtgcagacagtctttggcagaatccctgttcgcctgggcttgccagtccccacttggtaaagaagacacactactgctgattggacacctggagagagtgaccgtcgaggccaatggaagtctcgatgccgtaaatctcgcactgctgatggcgctgctatattgctttgatatttcttttatagagcagtcaaccgaggagagagacgatatgatccaccaactgccgctgctgactgaaaaacagtacattgccactattcatagccgcctacaggattcacagctttggaaactgccaggactacaggccactgtgaggctggcctgggccctggcccttagagggatttctcagctgcccgatgtgaccgctctggcagaatttacagaggccgatgaagccatggccgagttagctattgccgacaacgtcttcctgtttttaatggagtccgtcgtcgtttctgagtatttctaccaggaagagttttacatccggcgggtgcacaacttgattactgattttttggccctgatgccgatgaaggtaaagcagctgcggaatcgagccgacgaggatgccaggatgattcatatgagcatgcagatggggaacgaaccacccatttctcttaggcgcgacctggagcacctgatgttactggtgtcaaaacttttggtgctgagactcaactag

SEQ ID NO: 127122 - DNA, 5664 bp, synthetic construct
  misc_feature 1..5664: note = Description of Artificial Sequence: Synthetic coding sequence
  source 1..5664: mol_type = other DNA
atggcagcaagggggcgggggctgttgctgttgacgctgagcgttttgcttgctgcaggcccatctgcagcagcagcgaaacttaacatccctaaggttctgctaccttttacccgagccactcgcgtgaacttcacacttgaggcttccgagggctgttatcggtggctgtctactcggccagaagtcgcaagcattgagcccctcggactggacgaacagcagtgctcacagaaggcagtggttcaggccaggcttacccagcctgcccggctgacctcaattatattcgctgaggatatcacgaccggccaggttcttaggtgtgacgctatcgttgatcttattcatgacattcagattgtttcaacgacacgagaactctatctggaagactccccgctggaactcaagatacaggcgctggactcagaaggaaatacctttagtacgctggctggactggtctttgagtggaccattgttaaggactcggaggcagatcggttctccgactcgcacaatgccctcaggatcttgacattcctggagtcaacttacattcctccctcctatattagtgaaatggaaaaggcagccaaacaaggagacaccatcctggtgtcaggaatgaaaacgggttctagcaagctaaaggcaagaattcaggaggcagtctataaaaacgtccgacctgccgaagtcaggctgctgatactcgagaacatcctgcttaatcctgcttatgacgtttatctaatggtgggtacatcgattcattacaaagtgcagaagattcggcaaggcaagattacagaactcagcatgcctagcgatcaatacgagctacagctgcagaactccataccaggacctgagggcgatcctgcaagaccggtggctgttctcgcccaggacacgagtatggtgaccgcacttcaactggggcagtcaagtctggtgctaggccatcgctccatccggatgcagggggcctctaggttgcccaactccacgatttacgtggtcgagcctggctacctggggtttaccgtgcatcccggtgatagatgggtgctggaaacagggagactgtacgagattaccatcgaagtttttgataaattttctaataaagtttacgtcagcgacaatatccgcattgaaaccgtccttcctgcagagtttttcgaggttctcagtagctcgcagaatggctcttatcataggattagagccctcaagcggggtcagactgcaatcgacgccgcactgacatcagtggttgaccaggacggcggggtgcacatcctgcaagttcctgtttggaaccagcaggaagtcgaaatacacatccccattactctttacccctcaatcttgacttttccttggcaacccaaaacgggcgcttaccagtataccatccgggcacacggcggcagcggcaacttctcttggtcctccagcagccacctcgtcgctacagtgacagtgaaaggggtgatgaccacagggtctgacataggttttagcgtgatccaggcccacgatgtccagaatccattgcacttcggggagatgaaagtgtacgtgattgagccacactcaatggaatttgccccatgtcaggtggaagcccgggttggacaggctctggaactgcctctccgcataagcgggctcatgccgggtggcgcgtcagaagtcgtcacactcagcgattgtagtcactttgaccttgccgtcgaggtcgagaaccaaggtgtcttccaaccattgcctggcagacttcccccagggtcagagcactgcagtggaatacgcgttaaggcagaggcccagggttccacaacactgttggtgtcataccgccacggacatgttcatctgtccgctaagatcacaatcgcagcttacttgcccctgaaagccgtggatccatccagtgtggccctcgtcaccctgggtagcagcaaagagatgctattcgaaggggggcccaggccttggatcctggagccttcgaaattctttcagaacgttactgctgaggatacggatagtatcggactagctctcttcgccccacactcctcccgaaattaccagcagcactggattctagttacgtgtcaggctctgggtgagcaggtaatcgcactctctgtcgggaacaagccttcgttgactaacccctttcctgctgtcgaacctgctgtcgtcaaatttgtgtgcgcaccccctagcaggctgacgctggcgcccgtctacacttctccacagctagacatgagttgtcctctattgcaacagaacaagcaagtcgtgccagtgagcagccaccggaatcccaggctcgacctggcggcgtacgatcaggaaggccgaagattcgacaacttctcgtcgctctcgatccaatgggaaagcacgagaccggtcctggcaagcatcgagcctgagctccccatgcagttagtatcccaggatgatgaaagtggccagaagaaactccacggcctccaagctattctggtgcatgaggcatctggcacaacagccataactgctaccgcaaccggctaccaagaaagccatctctcttccgccagaacaaaacagccacatgacccactcgttcctttgagcgcctccattgaactcatattggtcgaggatgttcgtgtctcacctgaagaagtcacaatctacaaccaccccgggatacaagcggagttaagaatccgcgaaggaagcggatattttttcttgaatacaagcaccgctgatgtggtgaaggttgcttaccaagaggccaggggagttgccatggtacacccactgctgcccggcagctcaactatcatgatccacgacctttgtctcgtattcccggcccccgccaaggccgtcgtgtacgttagtgatatccaggaattgtacatcagagtggtggataaagtggagattggcaaaacagtaaaagcttatgtgcgcgtgctggatctccataaaaaaccttttctcgctaaatattttcctttcatggatctgaagctgagagctgcatccccaatcattacactcgtcgctctggatgaggccctggacaactacaccatcacattcctcatccgcggggtggcaatcggtcagacttccctgaccgcctcagtaactaacaaagctggtcagcggattaacagcgccccacagcagattgaagtgttcccacctttcaggctcatgcctagaaaagtaactttactgattggagccaccatgcaggtcacctcagaaggtggaccacagccccaaagcaatatactcttctccatcagcaatgaatccgtcgcgctggtgtcagccgctgggcttgtgcaaggtttggccatcggcaacggtacagttagcggcctcgttcaggccgttgacgcggaaacaggcaaggtggttatcatcagccaggaccttgtgcaggttgaagtgctcctactgcgggccgttcggattagggcccctatcatgaggatgagaacaggaacccagatgcctatttacgtaaccggaattaccaatcatcaaaaccctttttcgttcggtaatgccgtccccggcctcacattccactggagtgttaccaaacgggatgtattggatctgcgcggtcggcatcatgaagcctccattcggttaccctctcaatataatttcgccatgaacgttctagggagggtgaagggcaggactggattacgagtcgtggtcaaggccgtggaccctacaagcggccagttgtacggtctggctcgcgagctctcagatgaaatccaagtgcaagtgttcgaaaaactgcaattattaaaccccgagattgaagctgagcaaatattgatgtccccaaactcctacattaagctgcagactaatcgggatggcgcagcgagcctttcctatcgtgtgctcgatggccccgagaaagtccctgttgtgcacgtggatgagaaaggttttctcgcctccggcagtatgattgggacaagcaccatcgaggttatcgcccaagaacctttcggggccaatcaaactatcattgtagcagtgaaagtatctccagtgagctacctgagagtgtccatgagccctgtgctgcacacccagaacaaggaggctctggtagccgtgccactgggaatgacggttaccttcactgtacatttccacgacaattccggagacgtgtttcatgcgcactccagcgtgcttaactttgccaccaatcgcgacgacttcgtccagatcggcaaggggcctaccaacaatacgtgtgtggtgcgaacagtatccgtagggttgacactgctcagagtttgggacgcagagcatccaggactctcagactttatgcccttgcccgttcttcaggccatcagtcccgaactgagcggcgctatggtggttggcgacgtcctctgcctcgctacggtccttacttcactggaaggactcagcggcacttggtcgagttccgctaattccatcttacacattgaccctaagacaggtgtggccgtggcccgggccgtggggagcgtgacagtgtattacgaagtcgctggtcacctacgaacctacaaggaggtggtcgtgtctgttccacagcgcataatggcacggcacctgcatccgatccagacctcgtttcaggaagctaccgcctccaaggtgatagtcgctgtgggcgacaggtccagcaacctgcggggcgaatgcacgcccactcagcgagaagttatccaggcactccaccccgagaccctgattagctgccagagccagttcaaaccagcagtctttgacttccccagtcaagacgtgtttactgtcgagcctcagttcgatacggccctgggacaatacttttgttcaatcaccatgcatcgactgacagataaacagcggaaacacctaagcatgaaaaaaaccgctttggtggtctccgcaagcttaagctcatcacacttcagcacagagcaggtgggtgcagaagtgccttttagtcctggtctgtttgccgatcaagcagagattctgttgtctaatcattacacgagctctgagataagggtgtttggagcaccggaggtgctcgaaaatctggaagtgaaatccggctcaccagccgtcctcgcttttgccaaggagaaatcctttggctggcccagcttcataacctacacagtgggtgttctcgatcccgctgcagggagtcagggccccttgtccactaccctcacgttttcgtctcctgtgaccaatcaggccatcgctatacctgtgacggtggcctttgttgttgaccgtcgcggaccaggaccctatggtgcttccctgttccaacactttctcgattcttatcaagttatgttcttcacgttattcgctctgttggccggcaccgccgtgatgatcatcgcataccatactgtctgtaccccacgcgacctggccgtgccagccgccttaacccctagggctagccctggtcactcaccccattactttgctgcatcttcacctacgtcacccaacgctctgccacccgcccgaaaggcctccccacctagcgggctttggagccccgcctacgcgagccattag

SEQ ID NO: 127123 - DNA, 6273 bp, synthetic construct
  misc_feature 1..6273: note = Description of Artificial Sequence: Synthetic coding sequence
  source 1..6273: mol_type = other DNA
atgggtgatgaaatggacgctatgatccccgagagggagatgaaggacttccagtttcgagcgttaaagaaagttagaatctttgacagccccgaggagctacccaaggagcgtagctccctgctggctgtcagtaataaatacggactggtgtttgccgggggcgcctcaggattgcaaatatttccgaccaaaaatttgctgatccagaacaagcccggggacgatccgaacaaaattgtagataaggttcagggtctcctagtgccaatgaaattccccattcatcacctcgcactcagttgtgataatctcaccctgtcagcttgcatgatgagctcagagtatggaagcatcatcgcgttcttcgacgtcaggacattctcaaacgaggctaagcagcaaaagcgcccattcgcatatcataagttactaaaggatgctggcggaatggttatagacatgaagtggaatcctactgtgccaagcatggtcgccgtgtgtctcgcagatggtagtatcgcagttctgcaggtgaccgagacagtcaaagtctgcgctacactcccaagcacagtcgcagtcacatctgtgtgctggtctccaaaaggaaagcagctggctgtagggaagcagaatgggaccgtggtgcagtacctgccaaccttgcaagaaaaaaaggtgatcccgtgcccgccgttttacgaaagcgaccatccagtcagagtgctcgacgtgctgtggatcggcacatacgtgttcgcaattgtgtatgctgcagctgacggaacactagaaacgtcccccgacgtcgtgatggcgctcttacccaaaaaggaagagaagcatccagaaatcttcgtgaactttatggagccatgctacgggtcttgcactgaacggcaacaccattattatttatcatatatagaggaatgggacctggtactcgccgcctcagctgcatctactgaggtgagcatcttggcgagacagtctgatcagatcaactgggaatcctggctgttggaggattctagccgggccgaactccctgtgacggacaagtcggacgactccctccccatgggcgtggttgtcgattacacgaaccaggtcgaaatcactatctcagacgagaagaccctgccaccagcccccgtcttgatgttgctcagcacagatggcgttttatgtcccttttacatgattaatcaaaacccaggcgtgaaaagtttgattaagacccccgagaggctgagtctggagggcgaaaggcagcccaagagcccaggaagcactcctacaaccccaacctcgtcacaagcccctcagaaactggacgcatccgctgccgccgcgccagctagcctcccaccctcttcaccagccgctccaatagccactttcagtctacttcccgccggaggcgcccccacagtgttcagttttggctcaagcagcctgaaaagctctgcgacggtgactggggaacccccctcttacagcagcgggtccgacagcagtaaagcagccccaggtcccggcccctctacatttagcttcgttcctccatctaaggcctctcttgctccaaccccagccgccagcccagttgctccttccgccgcatcattctctttcgggagctctgggttcaagcctacactagaatctacacctgtccctagtgtgagcgccccaaatattgcaatgaaaccctcgtttcccccaagcacaagcgcagttaaggtcaacttgtccgagaagtttacagctgccgccacaagtacaccagtttcaagctcacagtctgcccccccaatgtctcctttttcatccgcatcaaaacctgctgcatctgggcctctctctcatccaaccccgttatctgcacccccgtctagcgtgccactgaaatcttccgtacttcccagtccttcaggtaggagcgctcaaggttcatccagtcccgtcccttcaatggtgcagaagtccccgaggattacaccccccgccgctaagcccggaagtccccaggcgaagtcactgcaacccgccgttgcggaaaaacagggacatcagtggaaggatagtgacccagttatggctggcataggtgaggagatcgcccacttccaaaaggagctggaggaactcaaggctaggacgtccaaggcatgcttccaggtggggacgagcgaggagatgaagatgctacggaccgagtcagatgatctgcacacatttcttcttgagatcaaggagacaactgaaagcctccacggagacatttcttccttaaagaccactctcttggaggggtttgctggggtcgaggaagctagggaacaaaacgaaaggaaccgggatagcggctatctccacctgttatacaagcgcccactggatcctaaaagtgaggcccagcttcaggaaatccgccgactgcatcagtacgtcaaatttgccgtccaggacgttaatgacgtgcttgatctagaatgggatcagcatttagaacagaagaaaaagcagcgacacctgctggtgccagaaagggagacactttttaacacccttgctaacaatcgggagatcatcaaccagcaacgcaaacgtcttaatcacttggttgattcgttgcagcagctgcgattgtataagcagacctccctctggtcactctcaagcgcggttcccagccaatcaagtatccactcctttgatagcgacctggaaagtctgtgtaatgccctcctcaagacaaccattgagagtcataccaagagcctgcctaaagtgcccgcaaagttgtccccaatgaaacaggcccagctgaggaatttcctggctaaacgtaagactccccctgtacggtccaccgcccctgcctctctgtcacgtagcgcatttttatcccagaggtattacgaggatttagacgaggtgagcagtactagttccgtgagccagtctctggaatcggaggatgctcgtacatcctgtaaggatgacgaggcagtggttcaagccccacgacatgccccagtggtcaggactccgagcatacagccctctcttttgccacatgcggcccccttcgccaagtcgcacttagttcatgggtcctcccccggcgtaatgggtacttctgtggcaaccagcgcctctaagatcataccccaaggtgccgactcaaccatgctggctactaagactgtgaaacatggcgcaccatcaccatcccatcccatctccgcaccccaggctgccgctgcagctgcacttcgaagacagatggccagccaggctcccgcggtgaataccctgacggagtccaccctcaagaacgtgcctcaggtggttaacgtgcaggagctgaaaaacaatcccgccactcccagcacagctatgggtagcagtgtcccatactccaccgcgaaaaccccacacccagtactgaccccggtcgccgcaaatcaggcgaagcaagggagcctcataaactccttaaaaccaagcggtccaacccctgcctcagggcaactttctagcggagacaaggcttctggaacagccaagatcgaaaccgccgtgacctccacccccagcgcaagcgggcagttttctaaacctttttcattcagcccaagtggcacaggatttaatttcggcattataacacccactcccagctctaacttcactgccgcccagggagccaccccttccacgaaggagtcgagccaacccgacgcattcagctctgggggcgggtcaaaaccctcgtacgaagctattccagagtcaagtccgccgtctggaatcacatcagcttccaatacaactccaggcgagcccgccgctagctcatcaaggcctgtggccccttcagggactgcactgtcgactacatcgagtaagctggagacaccacccagcaaactgggcgagttgctctttccgagctccctcgccggggagaccctgggctctttctctgggctaagggtgggccaggcagatgactccactaagcctacaaacaaggcttctagtacctcactcacgagcacacaacctactaaaactagcggcgttccctccggtttcaatttcacagccccccccgtgcttggaaaacacacggaaccgcctgttacgtcctcagccacaacaacctcagtggcgcctccagccgcaacaagcacctccagtacggcggtgttcggcagtcttccagtaacatcggccggttcttccggggtcatcagtttcggcggcacaagtctcagtgcaggaaagacaagcttctccttcggctcacaacagactaattccacagtcccgcccagtgcccccccccccacaacagcagccacaccgctgcctacaagttttcctacgctcagtttcggttcgctactttctagcgctacaaccccctctctgcctatgagcgcagggagatcaacggaagaggccacaagctctgctttacccgagaagcctggagattctgaggtgagcgcttctgccgcatcgcttctcgaggagcagcagagtgcacaacttccacaagcccctccccagacttctgatagtgtgaagaaggaacctgttctggctcagcccgccgtgtccaatagcgggacagctgcatcttctacatctctggtggcactgtccgccgaggccacaccggcaacgactggcgtgccggacgctcgaaccgaggctgttccgcccgccagcagcttcagtgtgcctgggcagactgcggttacggcagccgcaatttcaagtgctggaccggttgctgttgagacatctagcacccctatcgcaagttccacgacatctatagtggcccccggacctagtgcggaagcagcagctttcgggaccgtgaccagcggaagctccgtattcgcccagcctccagccgctagctctagctcagccttcaatcagcttaccaacaacactgccaccgcaccgagcgcgactcctgtgttcggtcaggtcgccgcgtccaccgcaccaagtctgttcggccagcagaccggatctactgccagtacagccgctgcaaccccacaggtaagttcttctggattctctagcccagcatttggaactaccgcaccgggagtatttgggcagacgacatttggccaagcatctgtttttgggcagagcgcttcgtctgccgcctccgtcttttcattttcacagccgggattttcttcagttccagctttcggacagccagcctctagcactcccacaagtacttccgggagtgtgtttggggctgcatcctcgacctctagttctagtagcttctcattcggacagagttccccaaacacgggcggagggctcttcggccaatcaaatgccccagccttcggacagtccccaggcttcggccagggggggagcgtctttggtggtacctctgctgctacgacaacagccgcaacatctggcttttcgttctgtcaggcctccgggtttggttccagcaataccggctctgtcttcggccaggccgctagcaccggtggtatcgtgtttggccagcagtccagttcttctagtggatccgtgtttggctctggaaacacaggccgaggcgggggattcttctcaggactcggcggcaaaccttctcaagatgcagctaacaaaaatcctttcagcagcgcatctggtgggttcggctccacagctaccagtaatactagcaacctgttcgggaactcaggggccaaaacatttggaggtttcgcctctagcagttttggtgaacagaaacctaccggaacctttagtagtggcgggggtagcgtcgcgagtcaggggtttggcttcagctctcccaataagacagggggtttcggcgccgctccagtctttggcagccctccgacatttggcgggtcccccggcttcggcggagtgcccgcattcgggagtgcccccgcctttacctccccactcggatccaccggcggcaaggtatttggtgagggcactgctgcggccagtgccggaggtttcgggtttggcagcagcagcaataccacctcatttggcaccctggctagccagaatgccccaacctttgggagcctgtcccaacagacatcaggttttggcacgcagtctagtggcttctcgggatttggctcaggaactggtggctttagtttcggctcaaataattcctctgtacaaggattcggtgggtggcgctcctag

SEQ ID NO: 127124 - DNA, 6243 bp, synthetic construct
  misc_feature 1..6243: note = Description of Artificial Sequence: Synthetic coding sequence
  source 1..6243: mol_type = other DNA
atgggcgatgaaatggatgccatgatccccgagagggagatgaaggacttccagtttagggccctgaaaaaggtgcgaatttttgacagccctgaggagcttcctaaggaaaggtccagcctcctcgcagtctcaaacaagtacgggctagtcttcgcggggggcgcaagtgggctacagatcttcccaaccaagaacctgctaatccagaacaagccaggggacgacccgaataaaatcgtcgacaaagtgcagggactgctggtgccaatgaagttccccatacatcacttggctcttagctgcgacaatttgaccctgtccgcctgcatgatgtctagcgaatatggaagcatcattgccttcttcgacgtgcggactttctcaaatgaagctaagcagcagaagaggccattcgcctaccataaactcctgaaggatgctggggggatggtgatcgacatgaagtggaaccccactgtgccttccatggtggctgtgtgtcttgcggatgggagcatagccgtgctgcaagttaccgaaaccgttaaagtgtgtgccactctaccttctacagtggccgtcacttctgtgtgctggtcccccaagggcaaacagcttgctgtgggcaagcaaaatgggacagtcgtgcagtacctgcccacactccaggaaaagaaggtgataccatgtccccccttctacgagtccgaccatcccgtgagagtcctagacgtactgtggataggtacctacgtctttgccattgtgtatgccgcagctgacggaactctcgagacgagtcccgatgtagtcatggctctgctgcctaaaaaagaagaaaagcaccccgaaattttcgtaaacttcatggagccatgttacgggagttgtacagaaaggcagcatcactactatctgtcatacatcgaggagtgggacttagtgctggctgcctcagctgcctccacggaagtatccattcttgcaaggcagtctgaccagattaactgggagagctggcttctggaggacagctcaagggccgaactgcctgttacggataaaagcgacgactcccttccaatgggagtcgtcgtggactacacgaaccaagtggaaataacaatcagcgacgaaaaaacactccctcctgcccctgtgctgatgctactgagcacagatggtgtattgtgtcccttttatatgatcaaccagaatcccggcgtgaagtctctcataaaaacacctgaacgcttgagtctcgagggggaacgccagcctaaatctccaggttccactcctactactcccacgtcatcccaggctccacagaagctcgacgccagtgctgctgcagccccggcttccctgcccccatcttcacccgctgctccaatagctaccttctcactgctgccggctggcggcgctcctacagtgtttagcttcggctcctcctctctaaaatcctccgctactgtgacaggggagccccccagttactctagcggatcagattcaagcaaggccgcccctgggccaggcccgagcactttttcgttcgtgcctccatcgaaggcttccttagccccgacccctgcggcttcaccggtcgccccatcggccgcgtcctttagcttcggatcctcaggatttaagcctacgctcgaaagcacgcccgtgccctcagtgagcgcgcccaatattgccatgaagccaagctttccaccttctacttccgccgtcaaagtgaacctttcggaaaatagctcacagagcgcccctcctatgtctccattttcaagtgcctctaagccagctgctagcggtcctctgagccacccaaccccactatccgcaccacccagcagcgtccctctgaagtccagtgtgctcccttcgcctagcgcaggccgaagtgcccagggtagttcctcccccgtgccatcaatggttcagaaatccccgaggattaccccacccgctgccaaacctgggtcgccccaggccaagtccctgcagccagcagtcgcggagaaacaggggcatcagtggaaagattcggaccccgtgatggccgggatcggagaggaaatcgcacacttccagaaggaacttgaggaattgaaagccaggactagcaaggcctgctttcaggtcgggacttcagaagagatgaagatgttgcgaacagagagcgatgatctgcacacgtttctactggagatcaaggaaacgacagagagcctccacggtgacatctcctctctgaaaaccacgctcttagagggatttgccggcgtggaagaggcacgggaacagaatgagcggaatagggacagtggttatctgcacctcctatataaaagacctcttgatccaaaaagtgaagcacagctgcaggagattcggcgcctacatcagtacgttaaatttgctgtgcaggacgtaaatgacgtcctggacttagaatgggatcagcaccttgaacagaaaaaaaagcaacggcacctgctggtgcctgagcgagaaactcttttcaacacactggccaataatcgggagattatcaatcagcagaggaagagactgaaccacctagtggattctctacaacagctgaggctctataagcaaacatccctatggtctttgtccagcgccgtgccatctcaatcctcaatacactcttttgatagtgatctggagtccttatgtaatgcattgctgaagaccacgatcgagagccataccaaaagtctaccgaaggtgcctgctaaactgtcccctatgaaacaggcacaattacggaattttctcgcaaagcggaagactcccccagtgagaagtaccgcccctgcctccctcagtcggagcgcattcctgtcacaacggtactacgaggacttggacgaagtgtcttccaccagttcggtgtcacagagccttgagagcgaggacgcaaggacatcgtgcaaggatgacgaggcagtggttcaggctccaagacatgccccggtcgtgcggaccccatccattcagccctcgttgctccctcatgcagcccccttcgccaagagccatctcgtgcatggatccagtccaggagtgatgggcactagcgttgcaaccagcgcatccaagatcatccctcagggagctgattccactatgctcgccaccaaaactgtgaagcacggcgccccctccccatctcatccaatttccgctcctcaggcagctgctgcggccgccctaagacgccagatggcgagccaggctccagctgtaaatactctgaccgaatctacgctgaagaatgtacctcaggtcgtgaacgtccaagaactgaagaataatcccgcaacacccagcacagccatgggcagttcagtaccttacagtacggccaagacaccccatcccgtattaaccccggtagcagctaatcaggctaagcagggatccctgataaactctctgaaaccgagcggaccgacccctgcctctggacagttgtcctctggagacaaagctagcggaactgctaaaatcgagacagctgtcacctcaaccccatccgcctctggccagttttccaagccgttttcattttctccttcggggacaggattcaatttcggtatcatcactcctacgcccagcagtaacttcaccgcggctcagggagctacgccatcgacgaaggaatcgtcccagccagacgccttttcttccggcggtggctccaagcccagctatgaggcgatcccagaatcttccccccctagcgggataacttctgcttcaaacaccacaccaggagaaccagcggcctcaagttcacggccagtcgccccatccggcacagcgctctcaaccaccagttccaagttggagaccccaccatcgaaattgggcgagctgctatttccaagtagcctcgctggagagacactggggtcctttagtggactgagggtgggtcaggccgatgattcaaccaagcccaccaataaggcttcgtctacctccctgacgtccactcaaccaacaaaaactagtggcgtgccctccgggtttaattttaccgcacccccagtgctggggaaacacacagaacctccagtcacctcttctgcaacgacgacgtccgtcgccccaccagccgcgacatcgacctcttccacagccgtgttcggatccttgcctgtgactagtgcaggctcttccggagtcatctctttcggtggtacctccctgtcggcagggaagacctctttctcatttggctcgcagcagacaaactcaactgtgcccccctccgccccacccccaacgaccgctgctacacctctcccaacatcattccctacgctgagtttcggatcgttgctgagctcagctacaacaccttctcttcccatgtcagcaggccgctccacagaggaagctacctcctccgccctgcccgaaaaacccggtgactcagaggtatccgcatctgccgcctcattactggaggaacaacaaagtgcccagctgccccaggcccctccacaaacgtccgatagtgtcaagaaggagcctgtattggcccagccagccgtgagtaactctggcactgcggcctcttctacttctctagtcgctttgtccgccgaggcaacaccagctacaaccggggttcctgatgctcggaccgaagctgtgccgcccgctagttcgttttccgtccctgggcagacagccgtgacggccgccgccatctcctctgccggtccagttgcagttgagacaagtagcactccgatcgccagcagcacaacttcgatagtagccccagggccgagcgccgaggccgcagccttcgggacagtcacatccgggtctagtgtgtttgctcagccccctgccgccagctcgtcatccgcctttaatcagctcacgaacaacactgcgactgctccatcagcaacaccagtctttgggcaggtagccgcgtctaccgctcccagtctcttcggacagcagacgggatctactgctagtacagccgctgccaccccgcaggtgtcttcttctgggttcagtagtccagcttttgggactaccgcaccaggtgtctttggacagacaacttttggccaggcctccgttttcgggcagagcgctagttctgcagcatcagtgtttagtttctcacagcccggattctccagtgtgcctgccttcgggcaacctgcctcatctactccaaccagcacctcaggctcagtctttggagccgctagttccacatcttccagctccagcttttcgttcggccagtccagtccgaatacaggcgggggactttttggccaatcaaacgcgccagccttcggacagagccccggttttggacagggaggaagcgtgtttggcggaacttctgccgctactactactgctgctaccagcggtttctcattttgccaggcatcaggatttggtagttcaaacacaggcagtgtgtttggtcaggctgcgtccactggtggcatcgtgttcggacagcaatcatcctcatcttccggtagcgtgttcggctcaggaaatacagggcggggcggagggtttttttccggactcggagggaagcccagccaggatgcagccaacaaaaaccccttctcaagtgctagtggggggttcggtagcacggcgacttcgaacacaagtaatctttttggcaatagcggcgccaagacctttggcggcttcgcttccagttcgtttggtgaacagaaaccaacaggtacattctcctcaggaggcgggagtgtggcctctcagggtttcgggttctcctctcccaataagaccggtggtttcggcgcagctcctgttttcgggagccctcctacttttggaggtagcccggggttcggaggtgtacccgcattcgggagtgctcccgcctttacttctccacttggaagtactggaggaaaggtgtttggggagggaacagccgctgcatctgctggcggtttcggttttggctctagcagcaatactaccagcttcggaacactcgcctcccagaatgcccctaccttcggtagcctgtcccagcagactagcggattcggaacccaatcatccggattttccggcttcggatcaggaacagggggattcagcttcggatcgaacaattcctctgtgcagggttttggaggatggaggtcctag

SEQ ID NO: 127125 - DNA, 4560 bp, synthetic construct
  misc_feature 1..4560: note = Description of Artificial Sequence: Synthetic coding sequence
  source 1..4560: mol_type = other DNA
atgaaaccaagcttccctcccagcacctccgcagtcaaggtgaacctatcagagaaatttaccgctgccgcaacctctacccccgttagcagcagccaaagtgcacctcccatgagccccttttccagtgccagcaagccggccgcctctggtcctctaagccatcctactccactgagtgcgcctcctagttcggtcccgctaaaaagttccgtgctgccgtctccttctgggagaagcgctcagggtagttctagccccgtgccttcgatggtgcagaagtcccctcgcattactcctcccgcagcaaagcctggctcccctcaggccaaatctcttcaacctgccgtggctgagaaacaggggcaccagtggaaggactctgatcccgtgatggcaggcatcggagaggaaatcgcgcactttcagaaggaattggaggaattgaaggcacgtacctcgaaagcctgcttccaggtcggcaccagcgaggagatgaaaatgcttcgaactgaatccgatgatctgcacacttttctattggagattaaggagaccactgaatctctgcatggagacatttcatcactgaagactacactgttggaaggctttgccggggttgaagaagcaagagaacagaacgaacgtaaccgcgacagtggttacttacacttgctgtataagcgccccctagatcccaagtctgaagctcagctgcaggagatcagacgtctgcatcagtacgttaagtttgctgttcaggacgtgaatgatgtgctcgatctggaatgggaccagcacctagagcagaagaagaagcagaggcatctactggtccccgagagagagacactgttcaacacgctggccaataaccgcgagatcattaatcagcagcggaagcggctgaatcacttagttgactctcttcagcagttgcgtttgtacaaacagacatcactctggagcctgtcttccgccgtaccatcgcagagctctatccattccttcgactccgacttggagtcactctgcaacgccctgctcaaaacaaccatagagagccacacgaagagcttgcccaaagtacccgcaaaactgagccccatgaagcaggcgcaattacgtaattttttggccaaacggaagacgcctccggtaagatcgactgccccagctagtttatccagatcagccttcctctcccagcgatattacgaggacctagacgaggtaagtagtacatcttctgtgtcccagtccctggagtcggaggatgccagaacatcatgtaaagatgatgaggcggtggtacaagctccgcgccatgcccctgtggtccggacacctagcattcagccatctttgttacctcatgccgcaccttttgccaagtcccacctcgtccacggatcctctcccggcgtgatgggtaccagtgtcgcaaccagcgcttcgaagattattcctcagggcgccgatagtactatgctggcaacgaagacagtcaagcatggggcccctagtccatcccaccccatttctgctccacaggctgcagctgctgctgccctccggaggcagatggcctcccaggcccctgcggtcaacacattgaccgagagcactctgaagaacgtgccgcaagttgtaaacgtccaggaactcaaaaacaaccccgccaccccttctacagcaatgggcagtagcgttccatattctactgctaagactccacatcccgttctaacccctgtggcggctaatcaagctaaacaggggtcacttattaatagtctgaagcccagcggaccaactccggcttctggccaactgtcttctggtgacaaggcttcgggcaccgccaagattgaaacagctgtgacaagcactccaagcgcttctggccagttttccaagccattttccttttctccctccgggacaggatttaactttgggatcataactcccaccccctcgtctaatttcacagctgcccagggcgcaaccccaagcaccaaggagagcagccaaccagacgcatttagctccggagggggatctaaacccagctacgaggcgatccccgagtcttccccacccagtggaatcaccagtgcgagcaataccacccccggggagccagctgcttcctctagtcggccagtggcaccatctggtaccgccctgagcaccacaagtagcaaactggagacaccgccatcaaagctcggagaactcctctttcctagtagtctcgcaggcgagacattggggtctttctcgggcctccgcgttggccaagcagatgactctactaaacccaccaacaaagccagtagcacctctcttacaagtactcagcccacaaaaacaagcggagtaccctctgggtttaattttacagctccacctgtcctcggcaagcataccgagcctccagttacgtcttctgccaccacaacttcagtggcgcccccggccgccacgagcacctctagcacggccgtcttcggatccttacctgtgacgagcgccggctcttctggagttatcagctttgggggcacctccttgtctgccggaaagacatcttttagttttggatcacagcaaacaaactctacagtgcccccctccgcaccccccccaacaacggcagctactccactccctactagtttccctaccctctctttcggttctctactcagctcagcgacaactccttctctcccaatgtccgccggcagatcaactgaagaggccaccagctctgcactcccagaaaaacccggagacagcgaggtaagcgcatcagctgcaagccttctggaagagcaacagtccgcccagctgccccaggctccccctcaaacaagcgacagtgtcaaaaaggaaccagtgctggcccaaccagcagtctccaactcaggcacagctgcatcttccacttccctagtcgccctttctgcagaagccacgcctgctaccacaggggtgcccgacgcaaggacagaagcagtgcctccagccagcagcttcagcgtgcctgggcaaactgcggtgacagctgctgccatatcaagcgccggcccagtggctgtggagacatcaagtacccctatcgcatcctccacaacctccatcgtggccccgggaccctcagccgaggcagctgcattcgggacagttacctccgggtcgtccgttttcgctcagccaccagccgcttcctcctcctcagcattcaaccagctgacaaacaatactgcaactgcgccatcagccacacccgttttcggccaggtggctgcttcaactgccccttcattattcggccagcagaccggctctaccgcttcaacagcagctgctactccacaggtgagcagtagcggcttcagtagccctgcttttgggaccaccgctcctggtgtgtttggccagaccacatttggacaggcctctgtattcgggcagtcggcatcatccgccgcgagtgtgttcagtttcagccagcccgggttcagcagtgtaccagctttcggacagcccgcctctagcacacctacctccacctcaggctccgtgttcggggcggcgtcctccacttcttctagttcctccttttcctttggtcagtctagtcccaacaccggcggcggcttatttgggcagtcaaatgcacctgcgttcggccagagtccaggattcgggcaaggagggagcgtttttggggggacttccgccgcgacaacgactgctgctacaagtggcttcagcttctgtcaggcctccggcttcggatcctccaacaccggctctgttttcggtcaggccgcttcaactgggggcatcgttttcgggcagcagtcctcttcaagttccggaagtgtttttggctctgggaacactggcagaggaggcggcttcttctcaggactgggagggaaaccctcacaggatgcggccaacaaaaaccctttctcaagtgcctctggcggattcgggagcactgcaacatcaaacacttccaacttgttcgggaattccggagcaaagacttttggcggattcgcctcctcatcatttggcgaacagaaacccaccggcactttttcttccggcggaggatccgtggcatcgcagggatttggcttctccagcccgaataagaccgggggattcggggccgctcccgtgtttggctctccgcccactttcggcggcagccctggtttcggtggggtgcccgccttcgggagcgcccccgcgtttacgtctccacttgggtctactggggggaaagtgtttggagagggaaccgccgctgcttccgccggcggctttggctttggatcttcctctaacacaacaagttttggtaccctggcgtcccagaacgctccaacttttgggtcattgtcacagcagactagtggatttggaacccagtcatctggcttttctggtttcggatccggcaccggtgggttctcttttggatccaataactcctccgtgcaggggttcggagggtggcgctcctag

SEQ ID NO: 127126 - DNA, 6276 bp, synthetic construct
  misc_feature 1..6276: note = Description of Artificial Sequence: Synthetic coding sequence
  source 1..6276: mol_type = other DNA
atgggcgacgaaatggacgcaatgatcccggagagagagatgaaggacttccagtttagagcactaaagaaggttcgaatctttgacagtccagaagagctacccaaggaaaggagctctctccttgctgtgtcaaacaaatatggcctggttttcgccggaggtgcctcgggcctgcagatatttcccacaaagaacctactgatacagaacaagcccggggatgatcctaataaaatagttgacaaggttcaaggcctacttgttcccatgaaatttcctatccatcacctggccctaagttgcgataacctcacactcagcgcttgtatgatgagttctgagtatggaagcatcattgcttttttcgatgttagaaccttctcgaacgaggccaagcagcaaaaacgtccgtttgcctaccacaagctgctgaaagatgccgggggcatggtcattgatatgaagtggaatcctacagtcccttctatggtcgctgtatgcctggctgatggctccattgctgtccttcaagtgaccgaaaccgtgaaggtttgtgctacactcccatcgacggtggccgtgaccagtgtttgttggtccccgaaaggcaaacagctggctgttgggaaacagaacgggactgtcgtgcagtatctgcccacgctgcaggagaagaaggtcatcccctgtccacctttctacgagagcgatcatccagtgagagtgctggacgttctgtggatagggacatacgtgtttgctattgtgtatgctgcagccgacgggactctggagaccagccctgatgtggtgatggctcttctcccaaaaaaggaggaaaaacaccccgagatctttgttaacttcatggagccctgttatggatcatgcactgaacgccaacaccactactaccttagttatatagaagagtgggacctcgtcctggccgcctccgccgcctctaccgaggtttcaattttagcaagacagagtgatcaaataaactgggagagctggctgttagaggattcatcaagagctgagctcccagtgaccgacaaatccgacgattctctgcctatgggagtggtcgtggattataccaatcaagtggagatcacgatatccgacgagaaaacactgccccctgcccccgtactgatgcttttgtccaccgatggcgtactctgtcctttttatatgattaaccaaaacccaggggtgaagagtctgataaaaacgcctgagcgcctctcattggaaggggagcggcagcccaaatctccaggctcaaccccaactacccccacgagttctcaggcaccacagaagctagacgccagcgctgcggctgcccccgccagcctccccccaagcagccccgcagcacccatcgcaactttctctctgctccccgccggtggagccccaacggtgttcagcttcggatcatccagtctgaagtcctctgcaaccgttacgggagagcccccgagctattcttcaggctcagactcatctaaggcagcgcccgggcccgggcccagtacattctctttcgtaccaccttccaaggctagccttgcgccgacacccgccgccagccctgtcgcccctagcgccgccagcttctctttcggaagcagtggctttaagccaacactcgagtccaccccagtcccctctgtgtccgccccaaatattgccatgaaaccctcatttcctccttcaaccagtgcagtgaaggtaaatctgtcagaaaagttcaccgcagcagccacttcaactcccgtctcaagcagccagtctgccccaccaatgtcacctttcagtagcgcctcgaagcccgccgcttccggcccactgtcacatcccacacccctgtctgctcctcccagtagcgtgcccctcaagtccagtgtgttaccatctcccagtgccggaagatccgcgcagggatcctcctctcccgtcccgagcatggtgcagaagtctccaagaattaccccgcctgcagcgaagcctggcagtccgcaagctaaatctctgcaacccgcggtggctgagaagcagggacatcagtggaaggatagcgatcccgtgatggccggaattggagaggaaattgctcatttccagaaggagttagaggaattgaaggcccgtacatcaaaggcttgtttccaggtgggtacaagcgaagaaatgaaaatgctgcgcactgaaagtgacgacctccacactttcctgctggagattaaggaaacgacagagagtctgcatggggatattagttcgctcaaaaccacactgttggaaggcttcgccggtgtagaagaagctcgtgagcagaatgagaggaatcgtgattccggatacctgcatctgctttacaagcgcccgctggaccccaagagcgaagctcagctacaggaaatcaggaggctgcaccaatacgtaaagtttgccgtgcaagacgtaaatgacgtgctagatttggagtgggatcagcacttggagcaaaaaaagaagcagaggcacctgctggtgcctgaacgcgaaaccttgttcaacaccctggcgaataaccgagaaatcatcaaccagcagagaaagagactgaaccatctggtagatagtctgcaacagctgcgcctgtacaaacaaacttccctgtggagtctcagttccgcagtgccatcccagtcttctattcattcgttcgacagtgacctagaaagcctctgcaatgcacttttgaaaacgacgatcgagtcccataccaagagcctgcccaaggtacctgctaagctaagtcccatgaaacaggcccaactgcgcaactttttggctaagcggaagacaccgcctgtcaggtcaaccgcgccggcatcccttagccgcagcgcttttctgtctcagaggtactatgaggaccttgatgaagttagttccactagcagcgtcagccagtctcttgaaagcgaggacgccaggacctcttgtaaagatgacgaggctgtcgtgcaggccccgcggcacgctcccgtggtcaggacaccttcaatacaaccatctctcttgccgcatgccgcacccttcgccaaatcccacctggtgcatggatctagcccaggagtgatgggtacttctgttgccacaagcgccagtaagataatcccacagggggccgactcaacaatgcttgccaccaaaaccgttaagcatggagccccgtcaccttctcaccctatctctgcaccacaagctgctgcggcagcagcgcttcgaaggcagatggctagccaggcgcccgctgtgaacacgcttactgagagcactttaaagaatgtgccccaagttgtgaacgtccaggagctcaaaaacaaccccgctactccttctactgccatgggtagcagcgtgccttattcaacagctaaaactccgcacccagttctgacaccggtcgcagctaaccaggccaagcaaggttccttaatcaactcactgaagccttccggtcctacacctgcctctggccagctgagtagcggagacaaagcttccggaactgccaaaattgagaccgcggtcacgtccacgccgtctgcatctggccaattctcaaagccattcagctttagcccatcagggaccggcttcaactttgggatcatcactccaacacccagctccaattttaccgctgcccagggggccacacccagcaccaaagaatcatctcagcctgacgcattctcctcgggaggcggctctaagcccagttatgaagctattccagagtccagcccgccttctggcattaccagcgcctcaaacaccacaccaggcgagcccgctgccagctcatctaggcccgtggcccccagtggcacagcactgtctaccacgtcttcaaagcttgaaaccccccccagtaaactcggagagcttttgttccccagctcactcgccggcgagaccttaggtagcttttcggggttgagggtggggcaggcggacgacagcactaagccaactaacaaggcaagttcgacgtcccttactagtacacaaccaacaaaaacaagcggtgtgccaagtggatttaatttcaccgcgccgcccgtcctcggcaagcatactgaacctccagtgactagctcagctacaactacaagtgttgcccctccggccgctacaagtacgagcagcaccgccgtgttcggctctttaccagtcacatctgccgggtcttctggagtcatctcctttggcggtacttctctgagcgccggcaagacatcattttcatttggttctcagcagactaatagcactgttccgccaagcgctccgccacccacgactgcggctaccccactgcctactagcttccccacgctgtctttcggaagcctcctgtccagcgccaccacacctagtctgccaatgtctgccggtcggagtactgaggaggcaaccagctcagccttacctgagaagcccggtgacagtgaggtgtctgcatccgctgcatcattgctggaagaacaacaatctgcacaattgccacaggctcctccccagacctcagattccgttaagaaggagcccgtcctggcacagccggctgtttctaattccggcaccgctgcctcttcaacctcacttgtggccctgtccgccgaggcgaccccagcaacaaccggagtccccgatgcccggacggaggcagtgccccccgcatcctcgttctctgtccccggtcagaccgctgtgactgccgctgccattagcagcgctgggcctgtggcggttgaaacatcaagcaccccaatcgcgtcgtctaccacgtccatcgtcgctcctgggccttcggcagaagcagctgcctttggaaccgttacctcaggaagttctgtctttgcgcagcctcccgccgccagtagctcgagcgcgtttaaccaactgacaaacaataccgctaccgccccttctgccactccggttttcggacaggtggcagccagtaccgcgccgtccttgtttgggcagcaaacaggctctaccgcctctacagccgctgccacccctcaagtgtcttcatcaggcttttccagccctgctttcgggacaacagcacctggagttttcgggcaaaccaccttcggacaggctagcgtgttcggtcaaagcgcctctagcgccgcctctgtgttttcattctctcaaccaggcttttcgtctgtgcccgcctttgggcagcccgcttcttctactcccacgtccaccagcggctcagtctttggggcagcttcgagcactagcagcagcagtagtttctcattcggccagagctcccctaataccgggggcggccttttcggacagtcgaatgcccccgcgtttggacagtctcccggttttggccaaggcggtagtgtctttggagggaccagcgctgccaccacgactgctgctacgagtgggttttcgttttgccaagccagtggtttcggaagcagcaatacaggcagcgttttcggacaagccgctagtactggcggcatcgtgttcggccaacagagtagttcaagctcaggctcagtttttggcagtggcaacactggtaggggaggaggctttttcagcggcctgggagggaagcctagccaggacgcagccaacaaaaatcccttttcttccgcgagtggtggcttcggctctaccgcaaccagcaacacatccaacctgttcggaaattccggagccaagactttcggaggattcgcgtcgagcagctttggtgaacagaagccaacaggcacattcagcagcggtggcgggagcgtggcatcacaaggcttcggattctcatcacctaataagaccggtgggttcggagctgccccagttttcggctcaccacccactttcggaggatctccaggctttggcggggtgccagctttcggcagcgcacccgcatttacttcccccctgggatcaaccggaggaaaggtgttcggcgaaggcacagcggccgctagtgctggaggcttcgggtttgggagcagtagcaacactacatcctttggaactctggcatcacagaacgcacctacatttggaagcttgagtcagcagaccagcggcttcggcacgcagtcgagcgggttctcaggctttggtagcggtacaggaggattttcttttggctcaaacaactcatctgttcagggctttggcgggtggcgatcctag

SEQ ID NO: 127127 - DNA, 237 bp, synthetic construct
  misc_feature 1..237: note = Description of Artificial Sequence: Synthetic coding sequence
  source 1..237: mol_type = other DNA
ggagaaggcaccgctgctgcctcagcaggaggctttggcttcggatcgagttccaatacaactagctttgggacactggcatcgcagaacgccccgacatttggttcactatcgcagcaaactagcggcttcggaacccagtcatccggattctccggctttgggagtggcacagggggatttagttttggctcaaataactctagcgttcagggatttggaggttggaggtcttag

SEQ ID NO: 127128 - DNA, 5055 bp, synthetic construct
  misc_feature 1..5055: note = Description of Artificial Sequence: Synthetic coding sequence
  source 1..5055: mol_type = other DNA
ggcgctgagggccgtaaatttgcagtcgagagacccggctttcgcggacagggtaggggccggcagcggtggctgctgcgccatactactcccacaagctcacaggccccccaaaaactggatgcaagtgcggcagccgccccagcttccctgcctcctagtagccctgctgcgccgatcgccactttcagtttgctgcctgcggggggcgctccaacagttttctcttttggtagctctagcctgaaaagctcagcaacagtgaccggagagcctccctcctattcctctgggtctgatagcagtaaagccgctcccggacccggacccagtacatttagttttgttccaccttcaaaagcatccttggcccctactccagctgcgagccctgtcgccccctcagcagccagcttctcctttggctccagcggttttaagcccacgttagagagcacccctgtgcccagcgtgtctgcccccaatatagccatgaagccctctttccctccctcgactagcgcagtgaaggttaatctgagcgagaaattcacagccgccgccaccagcactccggtgtcctcttcacaatctgccccgccgatgtcaccattctcatccgcaagtaaaccagccgcttcgggcccactgtctcatccaacccctctgtcagccccgcccagttctgtaccactgaaatcctcggttttgccctcacctagtgccggccggagcgctcaagggagtagctcacctgtccccagcatggtccagaagagcccacgcatcacaccccctgccgcaaaaccaggcagtcctcaagctaagagtcttcagcccgctgtcgccgaaaaacagggacaccagtggaaagactccgacccagtaatggccggaatcggagaagagatcgctcatttccaaaaggagctggaagaactcaaggctcgaacttctaaagcttgtttccaagtaggaacttccgaagaaatgaagatgctgagaaccgaatcagacgatctacacacttttctcctggagattaaggaaactactgaatcccttcatggggatattagttcactgaaaactacgttgcttgaaggatttgcgggggtcgaagaggcgcgcgagcagaatgagcggaaccgggattccggctaccttcaccttctttacaagcggcccctggaccccaaatctgaggctcaactgcaggagataaggcgtttgcaccagtatgtgaagttcgccgtccaggatgttaatgacgtactggacctggagtgggatcagcacctggaacagaagaaaaaacagcgccacctgttagtgcctgaacgcgagaccctctttaacactctcgcaaataaccgagagattattaaccagcagcgcaagagattgaatcaccttgtggatagtttgcaacaactgcgactgtacaagcagacctcactgtggtcccttagttctgcggtgccatcgcagagttccatccactcttttgactcggatctggaaagtctctgtaatgctctcctgaagaccaccattgaaagccacaccaagtcgctacccaaggtgccagctaaactgtcacccatgaagcaggcccagttgcgaaattttctggcgaagaggaagacccccccagttcgcagcactgctcccgcttcactgtccagaagcgcattcctctcccagcgctattacgaggacctggacgaggtttcgtccacgtcttctgttagtcaatctcttgagagtgaggacgcccggacttcatgcaaggacgatgaggccgtcgtccaggccccccggcatgctcccgtcgtgagaacaccgtcaatccagccctcgttgcttcctcacgccgctccctttgccaagagtcacttggtccacggcagcagtccaggggttatgggtacgtccgtcgcaacctctgccagcaagattattccacaaggagcagactctacgatgcttgccaccaaaactgttaagcatggagccccgtccccctcccacccaatctcagccccccaagctgcagctgccgccgccctgcgccgccagatggcctcccaggcacctgctgttaacacactcacagagtccacgctgaagaacgtgccccaggtggtcaatgtgcaggagttgaagaataacccggcaaccccctccacagctatggggtcaagcgtgccatattctacagccaagaccccacatcccgtgctgacccctgtggccgcaaatcaggctaaacagggcagtctgatcaattctttaaagcctagtgggcccaccccagcgagcggccagctgtctagcggagataaggcctcaggaactgcaaagattgaaaccgcggttacgtctacgcctagcgctagtggccagtttagcaaaccatttagctttagtccctctggcacaggtttcaactttggcatcatcaccccaaccccatcttcgaactttaccgccgcgcaaggcgcaactccctctacaaaggaatccagtcagccggacgcattcagcagcggcggtggatctaaaccttcgtatgaggcaatccctgagtctagccccccttccggtataacctcggcgtcaaatacaactccaggggagcctgccgcatcgtctagtcgcccggtggccccaagtggcacggccctctccacaacctcatcaaagttagaaacccccccttccaaactcggggaacttctcttcccatcaagcttagctggtgagacccttggttccttttctggcctccgtgtcgggcaggcggacgatagtactaaaccgaccaataaagcctccagcaccagcctcacttctacacaaccaacaaagacttccggcgtgccatcaggcttcaactttaccgcccctcctgtattgggcaagcatacagagccacccgtaacctcgagcgccaccactaccagtgtggcgcccccagccgccacctccacatcctcaacagcagttttcgggtctttgcccgtaacgagcgccggatcttcaggagtaatttcttttggggggaccagcctgtcagccggtaagacttccttttccttcggaagtcagcagaccaacagcactgtcccaccaagcgctcccccaccaaccaccgccgccacccctctccccacaagcttcccgactctgagcttcggttccctcctgagctcagctacaactcctagtctgccaatgtctgctggccggagcaccgaggaagccacatcttctgctcttccagagaagcccggggactccgaggtctcagcctccgccgccagcctgctggaggagcagcagtcagctcagttaccacaggcacctccgcaaacctccgactctgttaagaaggaaccagtgttggcccagcccgcagtctctaacagcggcaccgctgctagcagcacctcacttgtggccctgtctgctgaggccacgcctgccactactggagtgcccgatgctagaactgaagcggttccgcccgcgtcttcattctccgttccagggcagaccgccgtgacagcggccgccatatcgtccgctgggccagtggctgtagagacctcaagcaccccgatagccagtagtaccacaagcattgtggctcccggccccagcgccgaggcagccgcttttggcacagtgaccagcggatcctcagtttttgcccagcctcccgccgcctctagtagttcagctttcaatcaactgaccaacaacactgcaacggctccaagtgccacgcctgtcttcggccaagttgccgccagcacagctccttcactattcggtcagcagaccggatctacagcctcaaccgcagcagccacgccccaggtgtcctctagtggattcagctctcctgcctttgggaccaccgcaccaggcgtgttcggtcaaacgacgtttggtcaggcttctgtttttggccagtcggcaagctccgcagcctcagtcttctcattctctcagcctggcttctcctcagtgcctgccttcggccagcctgcaagttcaactccaacatccacttctggctctgtctttggggccgcctctagtacttcttccagcagtagctttagctttggccagagttcacccaataccggaggaggcctttttggccaatccaacgctcctgcattcgggcaatccccaggatttggccaaggaggctccgtgttcggcggcaccagcgccgcgacgaccactgcagcaacctcaggatttagtttctgtcaggcatccgggttcgggtcttcaaacactgggagcgtgttcgggcaggccgcatctacaggcggtatcgtgtttggtcagcagagcagtagcagcagcggtagcgtgttcggatctgggaacacaggaagaggaggtggcttttttagcggcctgggtggaaagccgtcccaggatgcggcaaacaaaaaccctttctccagcgcttccggcgggttcgggagcactgccacctctaacacttcgaatctgttcggtaactccggcgccaaaactttcgggggcttcgccagttcatcatttggtgaacaaaaacctacaggaacctttagctcaggcggtggttcagtagcatctcagggcttcgggttctcctctcctaataaaactggtgggttcggggccgctcctgtgttcggaagccctcccacatttgggggatctcccggcttcgggggggtccccgcatttggcagcgcccctgctttcaccagccccctgggttcaacaggcggcaaagtttttggggaaggaaccgcagccgcttccgctggcggctttggctttgggtcaagctctaacaccacaagctttggaaccctggcttctcagaatgctccaacatttgggtcactgtctcagcagacctcaggattcgggacacagtcaagcggattctcaggttttggttccggcaccggcggattttccttcggcagtaataacagttcagtccagggattcggagggtggcggagttag

SEQ ID NO: 127129 - DNA, 6282 bp, synthetic construct
  misc_feature 1..6282: note = Description of Artificial Sequence: Synthetic coding sequence
  source 1..6282: mol_type = other DNA
atgggcgatgagatggacgctatgataccagagcgcgaaatgaaagatttccaatttcgagccttgaaaaaagtgagaattttcgatagtcctgaggaactgccaaaggagagatcatcactgctagcagtgagcaataaatatggcttagtgttcgctggcggtgcgagcggcctccagatcttcccaaccaagaatctactgatccaaaataaacctggcgacgatccaaataagatagtcgacaaggtacaggggcttctggttcccatgaagtttccgatacaccatctggcactcagttgtgataatcttacactgtctgcgtgcatgatgtcctcggaatatggttccattatcgccttctttgatgttcggacattctccaatgaagccaaacagcagaaaaggccgttcgcatatcacaagcttcttaaggatgccgggggcatggttatcgacatgaagtggaatcccacagtgccatctatggtggctgtctgtctggctgatggctctatcgcagtcttgcaggttacggagactgttaaggtgtgcgccacacttccctccactgtggccgtgaccagcgtttgctggtctcccaaagggaagcaactcgccgttggaaagcagaacggtaccgttgtacaatatctgccaacacttcaggaaaaaaaagtgatcccatgcccccctttctacgagtctgaccacccagttcgcgtgcttgacgtgctatggataggtacctacgtgttcgccattgtgtatgccgccgcggatggcacacttgaaacttctcccgacgtggttatggccctgcttcctaaaaaggaagagaagcacccagaaatctttgtcaacttcatggagccttgttacgggagttgcacagaacgccaacatcactattacctgtcctatattgaagaatgggaccttgtgctagcagcgtctgctgcctccaccgaggtgtctatcctggcacggcagtcagatcagatcaactgggaaagctggctgttagaggactcaagtagagcagagttgcccgtgacagacaagtctgatgactccctgcccatgggagtggtggttgactatacaaatcaggtggagattactatttctgacgagaagaccctgcccccagccccggtcttaatgctgctgagtaccgatggagtgctctgccctttctatatgatcaaccagaatcccggagtgaagtctttgattaaaacaccggagaggctgagcctggaaggagagcggcagccgaaaagtccaggttccacccctaccacccccacaagctcgcaggcgccgcaaaagctggacgctagtgccgccgccgcaccagcttctcttcccccttcaagccctgcagctccaattgctacattttccttgctccctgccggcggagcccctactgtgttctcttttggcagcagtagtctgaaaagttccgccacagtgacaggtgagcccccgagttattcttctggttccgactcgtctaaggctgcaccaggtcccggaccttcaaccttctcctttgtcccccctagcaaagcctcactggcgccaacacctgccgcctcccctgtagctccttccgccgcatcattcagtttcgggtcctcaggattcaaacccacgctagaaagcacgccggttccctccgtaagcgcacctaacatcgccatgaagccttcctttccgccatcaacgtcggcagtgaaagtaaatctctccgagaactcatcacagtctgccccccccatgtctccattttcatctgcatctaaacccgctgccagcggccctctgagccaccctactccactttctgcccctcctagttccgtaccgttaaagtcgtcagtgctgccctcaccttccggccgatctgcgcagggaagcagcagccccgtcccctcaatggtccaaaagtcgccacggataactcctcccgccgcgaagcctggcagccctcaggcaaagtccctgcagccagcagtggccgagaagcaggggcaccagtggaaagactcggaccccgttatggccggcatcggtgaggagatagctcactttcagaaggagctcgaagagctgaaagcgcggacctctaaggcttgcttccaggtcggcacatctgaggaaatgaaaatgctaaggaccgaaagcgacgacctgcataccttcctgctggaaattaaggaaactaccgaaagcctgcatggcgatatatcttcactgaagaccacattgctggaaggctttgccggtgtggaggaagcaagggagcagaacgaaaggaatagggatagtggatatctacatttgctatacaagcggccattagacccgaagagcgaagcccagctacaggaaatccgcagactgcaccagtacgttaaattcgcggttcaggatgtcaatgatgtcctcgatctggagtgggaccagcacctcgagcagaagaagaagcagcggcacctgctcgtgccagaaagagagacgctgtttaacacgctcgctaataatcgggagatcatcaatcaacagaggaaacggctgaaccacttagtggattcgctccagcagctacgcctgtacaaacagaccagtctttggagtctctcctccgctgttccatctcagagtagcatacactcttttgacagtgacctcgagtcactgtgtaacgccctcctaaagaccaccattgagtcccacaccaaaagcctgcctaaggtccctgccaaactgtcaccaatgaagcaggctcagctgcgtaacttcctcgctaaacgaaaaacccccccagtgcgttccaccgctccagcgtctctcagtcgtagtgcctttctgtcacaacgatactacgaggacctcgacgaagtgtcctctacttcctccgttagccagagcctagagtctgaggatgccaggacatcatgcaaggacgatgaggccgtggttcaagcgcctcgccacgcccccgtcgtccgcactccctcaatccaacctagtctcctgccgcatgcagctccctttgcaaaatcccacctggttcatgggtcctcaccaggcgttatggggacgtctgtcgctacatccgcgtcaaagattatccctcaaggtgcagattctactatgttggccaccaaaacggtgaagcatggcgccccctcaccttcccacccaatcagtgcgccccaagccgccgcagccgctgctctacgccggcagatggcctcacaggctcccgccgtcaacactttgaccgagtcaaccctgaaaaatgtgccacaggttgtgaatgtacaggaattaaagaacaatcctgctaccccctccaccgcaaagaccccccacccggttttgacccctgttgctgccaaccaggcgaagcaggggtcactcatcaattcactgaaaccttccggtcccacgcccgcaagcggacagctgtcttcaggcgataaagccagcggcactgccaaaatagaaactgcagtcacaagcacaccttcagcttccgggcagttctctaagccattttcatttagccctagtggaactggctttaattttggaatcataactccaacaccctccagcaatttcacggctgcacaaggtgcgaccccaagcaccaaagagagttcacagcccgacgcattttcctccggaggaggtagcaaaccaagctacgaagccatacccgaatcctcccctcccagcggaatcaccagtgcctcgaacactactcctggggagccagccgcatccagctcccgccctgtggccccaagcggaactgcactgagtacaactagcagcaaactcgagactcccccttccaaactgggcgagctgcttttcccgagcagcctggccggggagaccttgggctccttctccggcctgagggttggacaggcagatgactctaccaaaccgacaaacaaagcgtcttccacctcattaacatcaacacagccaacgaaaacctccggggttcccagtgggtttaatttcactgccccccccgtcctgggtaagcacacagagcccccagtaactagcagtgctactacgacctccgtcgccccacccgccgccacttctacgtctagcaccgccgtcttcgggagtctgcccgtgaccagcgccgggagtagcggcgtcatatcttttggagggacctccctgtcagccggaaaaaccagtttctctttcgggagccagcagacaaactccaccgtgcctccatccgccccgcctcctacgaccgccgccacaccgcttccaacgtcttttcccacactgagctttggctcactgttatcctcggctaccactccctcgctgcctatgtcagcaggtcgcagcacagaagaagccacatcaagtgccctcccagagaagccgggggattcagaagtttcagcatccgccgcatccttacttgaggaacaacagtctgcacagctgccacaggctcctcctcagacctccgacagtgtgaaaaaggaacccgtactggcacaaccagccgtctccaacagcggcacagcggccagctctacctccctagttgcactctctgcagaggctactcccgctactactggcgttccagacgcacggacggaagcagtccctcccgcttcttccttctcagttcccggacaaacagctgttaccgccgcagccatcagtagcgccggccctgtagcggtggaaacctctagtaccccgatagcaagctcaactacctcaatagtggcgcccggcccaagtgccgaggctgctgctttcggtacagtaacctctggctctagtgtattcgctcaacccccagcggcgtcatctagtagtgccttcaatcaactgaccaataatactgccactgcccctagtgctacaccagtgtttggacaggtcgccgcctctacagccccttctctcttcgggcagcagacgggatctactgcatcaaccgctgcggccacaccccaggtatcctcgtctggctttagctcccccgccttcgggaccacagctcccggcgtgttcgggcagacaaccttcggtcaagctagtgtgtttggtcaatccgccagctccgccgcgtccgtgttctctttctctcagcccggtttcagctccgtgccagcattcggtcagccagcctcgtccacacctacaagcaccagcggcagcgtgttcggtgcagcatcctctacgtcttcatcgtcctcctttagtttcggccagtccagcccaaatacaggcggtggtctgttcggacagagtaacgcgcccgcattcggccagagcccagggtttggacagggcgggagcgtatttggtggtacgagtgctgctacgaccacagcagccacttccggattttcattttgtcaagcaagtggctttggctcaagtaataccggatccgttttcggccaggccgcctccactgggggaattgtctttgggcagcagtcttcctcatcttccggttctgtctttggatccggaaacactggccggggaggcggcttcttttctggcttaggcggaaaaccatctcaagatgccgccaataagaatccgttttctagtgcctccggcggatttggttccacagctacctccaacacgagtaatctgtttggcaacagtggcgcaaagacatttggcggattcgcctcttccagttttggcgaacagaaacccaccggaaccttcagctcgggtggtggaagcgtggcctcccaagggtttggttttagctcaccgaacaaaactggtggttttggagcagcccctgtgtttggaagcccccctacgtttggtggtagccccggttttggaggtgtgcctgcatttggttcggcaccagcttttacaagccccctcggttccaccggcggaaaggtgttcggagagggaactgcagctgcaagcgctggcggtttcggttccctggctatgtcactctctccgaccctaaagggcagactactgctcatgcgacctaaagcaggaggcgggcgcgaacaagccgcaccgggacgcaaatctaacgagtctcgctccttaggtcacctgtgcatggagagggctcttacctcccccctcaaggtgtgggagcagcagcagcaccatatattgcggcatgcaagggagtccgaatgcccacactttcggattacagtgcctactgacttctggttctgggaccctgagtag

SEQ ID NO: 127130 - DNA, 1308 bp, synthetic construct
  misc_feature 1..1308: note = Description of Artificial Sequence: Synthetic coding sequence
  source 1..1308: mol_type = other DNA
atgaagtctagcctgctattaagaggcgtgcacttctgcttccacctgcctggcgcgacgccgtcgactaaggaaagctctcagcccgatgccttctcatccgggggcgggtctaagccttcctacgaggcaatccccgaaagctctcccccctctgggatcacttcagcaagcaatacaacacccggcgaaccggccgcgtcctcttcgcgacccgtggccccatccggtaccgccttgtcgacaacctcctcaaagctggagacccccccgagcaaactgggtgaacttttgttcccctcctcattggccggcgagacgctgggctcattttcaggactgagggtcggacaagctgatgactccaccaaacctactaacaaggcttcatctacttctttgacgtctacccaacccactaagacatccggtgtcccctcaggattcaatttcacggccccgcctgtcctaggaaaacacaccgaaccacccgtgacttcaagcgcaaccaccacttcagtggcacctcccgctgccacctcaacctcttctaccgccgtgttcggcagtctcccggtgaccagtgctggatccagcggagtcatttctttcgggggtaccagcctgagcgctggaaaaactagcttttcattcgggtcccaacagacaaattctaccgtacccccctcagccccgccacccaccactgccgccactccactgccaacttcctttcccacacttagcttcggctccctcctaagtagcgccaccacgccatccttgcctatgtctgctgggcggagcaccgaggaggcgacaagctccgccctcccggagaagcctggtgacagcgaggtaagtgcctcagccgcatcgttgctagaggagcagcagagcgctcagctgccccaggctccaccccagacctccgactctgtcaaaaaagaacccgtgttggcccagccagcggttagtaactccgggaccgctgcctcctcaacgagtctggtcgcgctcagcgccgaagctacccccgccacaacaggtgtgcctgatgcaaggacggaagcggtgccccccgcatcatcgtttagtgtaccaggccagacagccgtgaccgctgcggctatctcctctgctggacctgttgccgtggagacttcatctacacctatcgcatcctcgacaacatccatagtagcccccgggccctccgctgaggccgcggctttcggaaccgtgacatcgggatcatctgtgttcgcccagcctccggctgcctcgagttcctccgccttcaattag

SEQ ID NO: 127131 - DNA, 981 bp, synthetic construct
  misc_feature 1..981: note = Description of Artificial Sequence: Synthetic coding sequence
  source 1..981: mol_type = other DNA
atggcggctttcgcagttgagcctcagggacccgctttagggagcgagcctatgatgctcggctctccaaccagtcctaagcccggtgtgaacgcacagttcctgccaggattcctcatgggggacctacccgctcctgtgaccccacagccaagatctatttccggcccatctgtaggcgtcatggagatgcgctccccgcttctggccggtggcagccccccgcagcccgttgtgcctgctcacaaagataagtcaggcgctccccccgttcgctccatctatgacgatatatcctctcctgggctgggatcaactccgctgaccagtcgacgacagccaaacatctctgtgatgcagagccctctggtgggcgtgacatccacccccggaacaggccagagtatgttttctcctgccagcataggtcagcccaggaaaacaactctctctcctgcccagctagaccccttttacactcaaggggattctctgacttcggaagaccacctggatgatagctgggtaaccgtgtttggcttcccgcaggcttcagcatcatacatcttgcttcagttcgcgcagtacggcaatatcctcaaacatgtgatgagcaataccggaaactggatgcacattcgataccaatcaaagcttcaagctagaaaggccctatctaaggatggaaggattttcggggagtctataatgatcggggtgaaaccttgcatagataaatctgtcatggagtccagtgacaggtgtgcactcagttcaccatctctggcattcactccaccgattaagacattgggtacgccaacccagcctgggtctacaccacgcatttctacgatgcgaccgttggccaccgcttacaaagctagtacaagcgattatcaggtaatctccgaccggcaaactcctaaaaaagatgagtccctcgtttcaaaagccatggagtatatgttcggttggtag

SEQ ID NO: 127132 - DNA, 930 bp, synthetic construct
  misc_feature 1..930: note = Description of Artificial Sequence: Synthetic coding sequence
  source 1..930: mol_type = other DNA
atgatgttaggctcaccgacctcaccaaaacctggagtcaacgctcaatttctacccggcttcctcatgggtgatttacccgctccggtgaccccccagcctaggagtattagcggtccctctgtcggcgttatggagatgaggtcacccctactagcaggaggaagtcctccccagccagtcgttcccgctcataaggataaatctggtgccccccccgtgcgtagcatatatgacgatatttcttcccctggattaggctctacccccctaacatcccgacggcagcccaacattagcgtgatgcagtcgcctctggtgggggtgacatcaaccccagggacaggccagagtatgttttcacctgcatctattggacagccgagaaagactacattgagtcctgcacagttggatcccttttacacccagggagatagcctcacaagcgaggaccacctggatgattcttgggtgaccgtgttcggattcccacaggccagcgcgtcttacatcctgctgcaattcgcccagtatgggaacattctgaaacacgtgatgtccaatactggcaattggatgcatatacggtaccaatctaagttgcaggccagaaaggctctgtctaaggacggcagaattttcggagagagtattatgataggagttaaaccctgtatcgataagtcagtaatggagtcaagtgatcgatgtgctctatcaagcccctctctcgcgttcactcccccaataaagacactgggaacacctactcagcctggatcaacaccacggatctcaacgatgagacccctggcaaccgcctataaggcctccactagcgactatcaagttatcagtgaccgacagacgccaaagaaagacgaatcattggtgtcgaaggcgatggaatatatgttcgggtggtag

SEQ ID NO: 127133 - DNA, 576 bp, synthetic construct
  misc_feature 1..576: note = Description of Artificial Sequence: Synthetic coding sequence
  source 1..576: mol_type = other DNA
atgttcagcccagctagcatcggacagcctagaaaaaccactctcagccccgcacagcttgatcccttctatacacaaggcgacagcctgacctccgaagaccacctggacgatagttgggtcacggtttttgggttcccccaggcttctgcgagctacatcctcttgcaattcgcgcaatacggcaatatactaaaacatgtgatgagcaataccggaaactggatgcatattaggtatcagagtaaacttcaggcacggaaggccctgtctaaagatggtaggatcttcggcgagagtatcatgatcggtgtaaaaccatgcattgacaagtccgtcatggaatctagcgatagatgcgctctgagctcaccctcccttgcctttactccccccattaagactctggggacaccaacacagcccggcagcacacctaggatttctaccatgcggccgctggccacagcttacaaggccagtaccagcgactaccaagttatcagcgatcgccagaccccgaaaaaggatgagagcctggtcagtaaggccatggaatacatgttcgggtggtag

SEQ ID NO: 127134 - DNA, 981 bp, synthetic construct
  misc_feature 1..981: note = Description of Artificial Sequence: Synthetic coding sequence
  source 1..981: mol_type = other DNA
atgaaacaggacgcttccagaaacgccgcttatactgtcgattgcgaagactacgtgcacgtggtggagttcaatcctttcgagaatggggactccggcaacctcatcgcatacgggggtaataattatgtggtgattggtacgtgcaccttccaagaagaggaggcagacgttgaagggatccagtataagacgctccgcaccttccatcatggcgtcagagtggacgggatagcatggagtcccgagacacgactcgattctttacctcctgtgatcaaattttgtaccagtgcggctgacatgaaaataaggttgtttaccagcgacctgcaagataaaaatgaatacaaagtgctggaggggcataccgacttcatcaacggactggtgtttgatcccaaagaaggtcaggaaatcgcctctgtgtctgatgatcacacttgtcggatctggaacctcgaaggcgtccagacagcacattttgtcctgcactcccctggcatgtcggtgtgctggcatcccgaggaaacatttaagctaatggtcgcggagaagaatggcaccatccgtttttatgatctcctggcacagcaggccatcctctccctcgaaagcgaacaggtcccactaatgtcagctcattggtgcttgaagaatactttcaaggtcggggccgtggccggcaatgactggctgatctgggatataactcggagctcttaccctcagaacaagcggccagtgcatatggatagagcctgtctctttcgatggagtactatttccgaaaacctgttcgctacgaccgggtatcctggtaaaatggcttcacagttccagattcatcaccttggacacccacaaccaattttaatggggagcgtggcagttgggagcggtttaagctggcatcgtaccctaccactgtgcgtgataggaggcgaccataagctcctgttctgggtgactgaggtgtag

SEQ ID NO: 127135 - DNA, 156 bp, synthetic construct
  misc_feature 1..156: note = Description of Artificial Sequence: Synthetic coding sequence
  source 1..156: mol_type = other DNA
atgaagcaggacgcctccagaaatgctgcctatactgtggactgtgaagactacgtgcacgtcgtggaatttaatccgttcgaaaatggtgactcgggcaatctgattgcatatgggggaaacaactacgttgtgattggtacatgcactttctag

SEQ ID NO: 127136 - DNA, 981 bp, synthetic construct
  misc_feature 1..981: note = Description of Artificial Sequence: Synthetic coding sequence
  source 1..981: mol_type = other DNA
atgaaacaggatgccagccgcaatgcagcttatactgtggattgtgaagactacgtgcatgtggtcgagtttaacccgttcgaaaatggggactctgggaacctgatcgcctacggcggcaacaattatgtcgttattggtacgtgtactttccaggaagaggaggctgacgtcgagggtatccagtacaaaacactacgtacctttcaccatggcgtgagggtggatggcatcgcctggtcacctgagacaagactggacagccttccccctgtgataaagttctgtacgtctgccgcagacatgaaaattcgcctgtttacctcagacctgcaagacaagaacgaatataaggtgcttgaaggacacaccgattttatcaacggactcgtcttcgaccccaaagaggggcaagaaatcgctagtgtgagcgatgaccatacgtgtcgcatctggaacttggagggagtccagacagcccattttgtacttcactccccgggaatgagcgtgtgttggcatccggaggagactttcaagctgatggttgcagagaagaacgggacgataagattctatgatttactcgctcagcaggctatcctctcactcgagtcagagcaggtgccactgatgtctgctcactggtgcttgaagaacacattcaaggtaggcgctgtggctgggaacgattggttgatttgggatataacccgctcatcctaccctcaaaataaacggcccgtccacatggacagagcctgtctgtttaggtggagtacgatctccgagaatctcttcgctactaccggataccctggcaaaatggcctcccagtttcaaattcaccacctcggccacccccagccgattctcatggggagtgtcgccgtggggtctggcctgtcgtggcaccgcactttaccactttgcgtaattggaggggaccacaagctgttgttctgggtgaccgaggtttag

SEQ ID NO: 127137 - DNA, 1143 bp, synthetic construct
  misc_feature 1..1143: note = Description of Artificial Sequence: Synthetic coding sequence
  source 1..1143: mol_type = other DNA
atggaggagatctatgccaaatttgtgtcccagaagattagcaaaacccgctggcgccctctgccaccggggagccttcagacagctgaaactttcgctacagggagttgggacaatgaagagaattacatctctctgtggtccatcggcgactttggcaacctcgacagtgatggtggattcgaaggagatcatcagttgctgtgcgatatacgtcatcacggcgatgttatggatttgcagttcttcgaccaggagcgaatcgtcgccgcctctagtaccggatgtgtgactgtgttcctccatcaccccaacaaccagaccctgagcgtgaatcagcaatggactacagcacactatcacacaggccccgggtcccctagctactcgtccgcaccgtgtaccggagtggtatgtaacaatccagagatcgtgacggtgggggaagacggacgcatcaaccttttcagggccgaccataaagaagcagtcaggacgatcgacaacgctgactcatcaacactgcacgctgtaaccttcttgcgcactccggaaattctgacagtgaactctataggacagctgaagatttgggactttcgccagcaaggtaatgaaccgtcccagattctctccctgaccggggatagggttccactgcactgcgtggacagacaccctaatcaacagcacgtcgtggccacaggcgggcaggatggaatgttgtcaatttgggatgtgaggcaggggacgatgcctgtgtctctgctgaaagcccatgaggcggagatgtgggaagtgcatttccatccaagcaatcccgaacacctgtttacatgtagtgaagacgggagcctgtggcattgggacgcgagtaccgacgtacccgagaagtcttctctattccatcagggcggtcgtagctctactttcctgtcacacagcatttccaatcaggccaacgtacatcagagtgttatctcctcttggctttccacggacccagctaaagatcggatagagattaccagcttactccctagccggtctctcagtgtcaacactctcgacgtgctgggaccttgcctggtttgcggtactgacgcagaagccatctacgtaacgaggcaccttttttcatag

SEQ ID NO: 127138 - DNA, 747 bp, synthetic construct
  misc_feature 1..747: note = Description of Artificial Sequence: Synthetic coding sequence
  source 1..747: mol_type = other DNA
atgggcggacctctgagcctgggcactgactgcgcccacacagggtacaggcgagagctcacattatgtagccatcgcctgagacctaaggtgccttccaatcaaggctccgctgggagaggaggggcggagagaagggttctctgtcttcttttcgctgtccctgcggccgcagccttcggaatggaagaaatctacgcgaaatttgtgtcacagaaaatctcaaagaccagatggcgcccgctgccaccgggtagccttcagaccgccgaaacattcgctactggaagttgggataacgaagagaactacatatctctgtggtcgataggtgactttggcaaccttgactctgacgggggatttgagggggaccaccagctcctgtgtgacattcgacatcatggcgatgtcatggatctgcagttctttgatcaggagcggattgtggcagcttcttccacgggctgtgtaaccgtgttccttcaccaccccaacaaccagactcttagcgtgaaccagcagtggactacggctcactaccacacgggcccgggcagtccttcgtactcttcagcaccatgcacaggcgtggtttgcaataatcccgagattgtgactgtgggcgaggatgggaggatcaacttgttccgggcagatcataaggaggccgtcaggaccatcggcttggtgaccgagtgtcactctaccgtattaattgatatccccacgaacagtatgctgtag

SEQ ID NO: 127139 - DNA, 1143 bp, synthetic construct
  misc_feature 1..1143: note = Description of Artificial Sequence: Synthetic coding sequence
  source 1..1143: mol_type = other DNA
atggaagagatttacgccaagttcgtgtcccagaaaatctcaaagactagatggaggccactccctcccgggtccctccagacagcagagacttttgccacaggctcctgggacaatgaggaaaattatatcagcctgtggtctatcggcgattttggcaacctcgatagcgatggaggcttcgagggcgatcaccagctcctctgtgacataagacaccacggagatgtcatggacctccagttctttgaccaggaacgcatcgtggccgccagttctactggctgcgtgacggtcttccttcaccaccctaataaccaaactttgtccgtgaaccagcagtggacgaccgcacattatcacaccggcccaggaagccccagttactcctcagcaccatgtacaggggttgtgtgcaacaatcccgaaatcgtgactgtgggggaggacggaagaattaatctgttcagagccgaccataaagaagcagtgaggactatcgacaatgccgacagctccacactgcacgccgtcacttttttgaggacaccggagatcctgaccgtgaatagtatcggccaattgaagatttgggacttccgtcagcagggcaacgagccaagccagatcctctctctgaccggggatagggtacccttacactgtgtcgaccgccatccaaaccaacaacatgtggtagcaacaggaggccaggatgggatgctgtctatatgggacgttaggcagggaaccatgcctgttagcctgttgaaggcacatgaagccgagatgtgggaggtgcattttcatccatcgaaccccgaacatctgtttacttgctccgaggatggctccctctggcattgggacgcctcaacagatgtcccggaaaaatcttcgctgttccaccagggagggcggagcagcacctttctgtcgcacagcatctcgaaccaagccaatgtgcaccagtcggtgatcagttcttggctttccactgacccagctaaagatagaatcgagatcactagccttctcccaagtcgcagtttgagcgtcaacactcttgacgttctgggcccctgtctagtgtgcggaacggacgcagaagccatatacgtaacaaggcatttgttcagctag

SEQ ID NO: 127140 - DNA, 1407 bp, synthetic construct
  misc_feature 1..1407: note = Description of Artificial Sequence: Synthetic coding sequence
  source 1..1407: mol_type = other DNA
atggcgaaacgcaatgctgaaaaagaactgacagaccgcaactgggatcaagaggatgaggccgaagaggtagggacctttagcatggcctccgaagaagtcctgaagaatagagcgatcaagaaggcaaagagacggaacgtagggtttgaaagcgacactggcggggctttcaagggttttaaagggttagtggtcccctcaggcgggggacgcttttccggcttcgggagcggggcaggcggcaagccactcgagggattgtccaacggcaacaacattacgagcgcaccccctttcgctagcgcgaaagccgctgcagaccccaaagtggccttcggcagcctagccgctaatggtcccacgacccttgtggacaaagtgagcaacccaaagactaacggggactctcaacaaccatcctccagtggactcgccagtagcaaggcgtgtgttggcaacgcataccataagcagctagccgcgctcaactgttctgtaagagattggatcgttaagcacgtaaacaccaatccactttgtgacctaacccccatcttcaaagactacgagaagtacctcgcgaacattgaacaacagcatggcaattcaggtaggaatagtgagagcgaatcaaacaaggtcgccgcggagactcagtctccaagccttttcggatctaccaagctgcaacaagaatctacattcctgtttcacgggaataagaccgaggacacccccgacaaaaagatggaagtggcctcagaaaaaaaaacagatccctcatctctaggggctacatccgcgtcatttaactttgggaagaaagtagacagctccgtcctagggtccctttcctccgtgccactgacaggctttagcttcagcccgggaaattctagtttgttcgggaaagacaccacccagagcaaacctgtctcttctcctttccctactaagcctttagaaggccaggcggagggggacagtggggaatgtaaaggaggagacgaagaggagaacgacgagcctccgaaggtcgtagtgacagaggtgaaagaggaggatgcattttactctaagaaatgcaagctattttacaaaaaggataacgaatttaaggaaaagggcattggaaccctgcacctcaaacctactgcgaatcaaaagacacagttattggtacgcgctgataccaatctggggaacatcttgcttaatgtgcttataccacctaatatgccctgcacccgtacgggtaaaaacaatgtgttgatcgtatgtgtgcccaacccaccaatcgacgagaagaatgctaccatgccagtgaccatgctgatcagggttaagacctctgaggacgcagacgagctgcataagatacttctggaaaaaaaggatgcatag

SEQ ID NO: 127141 - DNA, 1323 bp, synthetic construct
  misc_feature 1..1323: note = Description of Artificial Sequence: Synthetic coding sequence
  source 1..1323: mol_type = other DNA
atggcttctgaagaggtgctaaagaacagagccatcaagaaggccaagcgccggaacgtgggcttcgaatctgacacaggcggagcttttaaaggcttcaaaggtctcgttgtcccctcgggcggagggagattttctgggttcggttctggcgcaggagggaagccgcttgagggactctccaacggaaacaacattaccagcgcaccacccttcgccagcgcgaaagccgcagctgacccaaaagtggcattcggctcactggccgcaaacggtcctaccacgttagtggataaagtctctaaccccaagactaacggggattctcagcagccttcaagttccgggcttgccagtagtaaggcctgcgttggcaacgcgtaccataaacagttagcggccctgaattgctctgtgagagactggatcgtgaaacatgtgaatactaacccgctttgcgacctgactcccatcttcaaggattacgagaagtatctcgctaatatcgaacagcagcatggcaatagcggacggaatagcgaaagtgagtcaaacaaagttgctgctgagacgcagtctccatccctgtttggatcgacaaaactgcagcaggagtcaacattcctctttcacggcaacaagacagaggataccccagataaaaagatggaggtggcttccgagaagaaaactgaccctagctccttgggcgcaacctccgccagctttaacttcgggaagaaggtagactcttccgtcctggggtccttgagtagtgtgcctctgactggattcagtttcagccccggaaacagtagcctttttggcaaagatactacacaatcaaagcctgtgagctcacccttccccactaagcctctcgagggtcaagcggaaggagactcaggcgagtgcaaagggggagatgaggaggagaatgacgagcccccaaaagtggtggtaaccgaggtcaaagaggaggatgccttctatagcaaaaagtgcaaactgttttacaagaaggacaatgagtttaaggagaaaggaattggtacactgcatctcaaaccaacggccaaccagaaaacgcagctgctggtgcgcgccgacaccaacctgggaaatattctactcaatgtgcttatccctccaaatatgccctgtacgaggaccggtaaaaataatgtattgatagtttgcgttcccaatcccccaattgacgagaaaaacgcgaccatgcccgtcactatgcttatcagagtgaagaccagcgaggatgccgacgaacttcacaagatacttctggaaaagaaagacgcatag

SEQ ID NO: 127142 - DNA, 1323 bp, synthetic construct
  misc_feature 1..1323: note = Description of Artificial Sequence: Synthetic coding sequence
  source 1..1323: mol_type = other DNA
atggcctctgaggaggtgctgaagaacagagccatcaaaaaggctaagcgcagaaacgtcgggtttgaatccgacacagggggggccttcaaaggctttaagggactggttgtgccatctggaggcggtcgttttagcggcttcgggagcggcgctgggggtaagcccttggaaggcctttcaaatggaaacaacatcaccagcgctccaccctttgcgtccgccaaagcggcggctgatcccaaagtggcctttggcagcctggctgcaaacggacccacaacgctcgtggataaagtgagtaacccaaagactaacggggactcacaacaaccgtcgagtagcggacttgctagcagtaaggcatgcgttggcaatgcctaccacaaacagttggctgctctgaactgcagcgtgagagattggattgtaaagcatgtgaacacaaatcctctttgtgacttaactcctattttcaaggactacgagaagtaccttgccaatattgaacagcagcacgggaacagtggcaggaatagcgaatccgaatctaataaagtggccgctgaaacccagagccccagtctatttggcagcactaaacttcagcaagagagtacattcctgtttcatggcaacaagaccgaggatacccccgataaaaaaatggaagtagcctcagaaaaaaaaaccgatccgagttcactcggagcaacctcagcatcctttaactttggtaaaaaagtggattctagcgtgcttggttcactgagttctgtccccctgaccggcttttctttcagccctggcaacagctccttattcggtaaggacactacccaatctaaaccagtcagcagccccttcccaaccaagcctctggaggggcaggccgagggagatagtggggaatgtaaaggaggggacgaggaggagaacgacgaacctcccaaagtggtggtgactgaagtgaaagaagaggatgcattctattctaagaagtgcaaactgttttacaaaaaagacaacgagttcaaggagaaaggcattgggactctgcatctgaagccaaccgcaaaccagaagactcagctgctggtgagggccgacacgaatcttggaaatatcctactgaacgtgctgatcccacccaatatgccgtgcacaaggacaggaaaaaacaacgtgctcatcgtttgcgtccccaaccctcctattgacgaaaagaacgccactatgcccgtgacgatgttgattcgcgtgaaaacgtctgaggatgctgacgaactgcataaaatcctgctggaaaagaaggatgcatag

SEQ ID NO: 127143 - DNA, 27 bp, synthetic construct
  misc_feature 1..27: note = Description of Artificial Sequence: Synthetic coding sequence
  source 1..27: mol_type = other DNA
atggcatccgaagaggtgttgaagtag

SEQ ID NO: 127144 - DNA, 537 bp, synthetic construct
  misc_feature 1..537: note = Description of Artificial Sequence: Synthetic coding sequence
  source 1..537: mol_type = other DNA
atggccaagcgtaacgcagagaaggagctgacggaccgtaactgggaccaggaagacgaggccgaggaggtgggcaccttttcgatggcctctgaagaggtactgaagaacagggccattaaaaaagcgaagaggaggaacgtggggtttgaatctgatactggcggggcttttaaaggattcaaaggcctagttgtccctagtggcggggggcgattctcggggtttggcagtggggccggtggcaagccactggaagggctgtcaaatggaaacaatatcacctccgcccctccgtttgcctcggccaaagctgctgcagatcccaaggtcgcatttggtggtgatgaagaggagaatgatgaacccccaaaggtagttgtgaccgaggttaaagaagaagacgcgttctactcgaaaaagtgtaagttattttacaagaaagataatgaatttaaagaaaaaggaattggtaccctgcatctcaagccaaccgccaaccagaaaacccagctactggtcagagccgatacctag

SEQ ID NO: 127145 - DNA, 138 bp, synthetic construct
  misc_feature 1..138: note = Description of Artificial Sequence: Synthetic coding sequence
  source 1..138: mol_type = other DNA
atggcaaaacggaacgctgagaaggagctgacagatcgcaactgggatcaagaggacgaggctgaggaggtcggcacattctccatggcttccgaggaagtcctaaaaaaccgtgccattaaaaaggccaagcggtag

SEQ ID NO: 127146 - DNA, 657 bp, synthetic construct
  misc_feature 1..657: note = Description of Artificial Sequence: Synthetic coding sequence
  source 1..657: mol_type = other DNA
atggaagtagcgtccgaaaagaagactgatccctcttcattaggtgccaccagtgcatcctttaacttcggcaagaaagtggattctagtgttctcggatcgctgtctagtgtccctctgacaggcttctcttttagtccagggaatagcagcttgtttgggaaagacaccactcagagtaaaccagtatcaagccccttccccacgaaacccttggagggacaggccgaaggggactcaggggaatgtaaggggggcgacgaggaagaaaacgacgagccaccaaaggtagtcgtgaccgaagttaaagaagaggatgcattttatagtaaaaagtgtaagcttttttacaaaaaagacaacgaattcaaagagaaaggcattgggaccctccacctgaagcctactgcaaaccagaagacccagctgttggtccgcgcggacacaaatcttggcaatatcctcctcaatgtgctgatcccccctaatatgccttgtacccgaaccgggaaaaataacgtgctcatcgtgtgcgttccgaatcctccgattgacgagaagaatgccactatgcctgtgaccatgcttatccgtgtgaaaaccagcgaagatgccgatgaactgcacaagattcttctcgagaagaaggatgcttag

SEQ ID NO: 127147 - DNA, 231 bp, synthetic construct
  misc_feature 1..231: note = Description of Artificial Sequence: Synthetic coding sequence
  source 1..231: mol_type = other DNA
atggccaaaagaaatgctgaaaaggaacttactgatcggaactgggatcaggaggatgaagcggaagaagtggggactttttcgatggcctccgaggaggttctcaagaacagggccataaagaaagccaaacggcggaatgtgggattcgaagtgttgctcctgcaaatggccctccctccttggctgattaaattccagattccgaaactgatgggtactgtctcctag

SEQ ID NO: 127148 - DNA, 15 bp, synthetic construct
  misc_feature 1..15: note = Description of Artificial Sequence: Synthetic coding sequence
  source 1..15: mol_type = other DNA
atggccaagcggtag

SEQ ID NO: 127149 - DNA, 33 bp, synthetic construct
  misc_feature 1..33: note = Description of Artificial Sequence: Synthetic coding sequence
  source 1..33: mol_type = other DNA
atggctaagcggaacgccgaaaaagaactgtag

SEQ ID NO: 127150 - DNA, 1524 bp, synthetic construct
  misc_feature 1..1524: note = Description of Artificial Sequence: Synthetic coding sequence
  source 1..1524: mol_type = other DNA
atggcgtttaattttggggcaccctctggaacctcaggcactgctgctgccaccgcggcacctgcagggggctttggaggcttcgggacaacctcaaccactgctggatccgctttcagtttcagcgcccccacaaacaccgggaccactggactgtttgggggtactcagaataagggattcggctttggaactgggttcggcactaccacaggaacttcaacagggctgggtactggcctgggaacaggactgggttttggcggcttcaacactcagcagcagcagcagacaacactggggggtctgttctcacagccgactcaagctcccacgcagagcaatcagttaatcaacacggccagcgccctgtccgctccaacccttttgggggacgagagggacgccatcctcgctaaatggaatcagctacaggcattctggggcacagggaaggggtactttaataataacataccaccagtagaattcactcaagagaacccgttctgcagatttaaagccgtcgggtacagttgcatgccgtctaataaggacgaagatgggctggtggtgctcgtgtttaataaaaaagagactgagatccggtcgcagcagcaacagctggtcgagagcctgcacaaagtcctgggcggtaatcagaccttgacggttaatgttgaggggaccaagactttacctgatgatcagacagaggttgtgatctacgttgtggaaaggagcccaaatgggacaagccgccgcgtgccagcaacgaccttgtacgcacacttcgagcaagccaacattaaaacacagctccagcaactgggagtgacactctctatgacgaggacagagttgagtcccgcacagattaaacagctgctgcagaacccccctgcaggtgtcgaccctatcatttgggaacaggctaaggtcgacaaccctgactccgagaagctgattcccgtgcctatggtggggtttaaggaactcctaagacgactcaaagtacaagaccagatgaccaagcagcatcagacccggttggacataatcagcgaggacatctccgaactccaaaaaaatcagaccacttctgtggccaagattgctcaatataagcgaaagctaatggacctgtctcatcggacgttacaggttttaatcaagcaggagatccaacggaaatccggttacgccatccaggcggacgaggagcagctccgggttcagctggacacaatacagggagaactgaacgcccccacacaattcaagggtaggctgaatgagcttatgagccagatacggatgcaaaaccatttcggagctgtgcggtcagaggagcgctactacatcgacgctgacctgctgcgggaaataaagcagcacttgaagcaacaacaagaaggcctgtctcacctgatcagcatcattaaggacgatcttgaggacattaaactggtcgagcacggtctcaacgaaactatccacatcaggggcggagtcttcagctag

SEQ ID NO: 127151 - DNA, 876 bp, synthetic construct
  misc_feature 1..876: note = Description of Artificial Sequence: Synthetic coding sequence
  source 1..876: mol_type = other DNA
atgccctctaataaagatgaggatggcctggtagtgctcgtctttaacaagaaagaaaccgaaatcagaagccagcagcagcaactcgtggaatccctccataaagtcctgggaggtaatcagacattgacagttaatgtggaaggcaccaagaccctgccggatgatcagacggaggtggtcatctatgttgtggagagatcccccaacggcacaagtcggagggtaccagctacaaccctctatgctcactttgagcaagctaacatcaaaacgcagctgcagcagctgggcgtcacactctctatgaccaggactgagctttcaccagcacaaatcaagcagctgctacagaaccctccagctggcgtggatcctatcatatgggagcaggcaaaggttgacaaccccgacagcgagaagcttatccctgttccaatggtgggtttcaaggaactgttgcggagactgaaagtgcaggatcagatgacaaagcagcatcagacccggctggatgttttgatcaaacaagagattcagcgaaagtctggttacgccatacaggccgacgaagagcagctgcgcgtacagctggacacaatccagggggaactgaacgcccccacccagttcaagggacgcctgaatgaactaatgtcccaaattagaatgcagaaccactttggcgccgtgcgctctgaagagagatactatatcgacgcagatctgttacgcgagatcaagcaacatctcaagcagcagcaagaaggcctatcacacctgatatcaattattaaggatgaccttgaggatataaaactcgttgagcacgggttgaatgagactattcatatccgcggcggcgtctttagctag

SEQ ID NO: 127152 - DNA, 984 bp, synthetic construct
  misc_feature 1..984: note = Description of Artificial Sequence: Synthetic coding sequence
  source 1..984: mol_type = other DNA
atgccgagcaataaagatgaggatggcctcgtggtactggtctttaacaagaaggagacagaaattaggtcgcagcaacagcaactcgtagagtccctgcataaggtgctcggcggcaaccagaccctaacagtaaatgtggaaggaacgaaaactctcccggatgaccaaacggaggtcgttatttatgtcgtcgagcgatctcccaatgggacatcacgccgcgtccccgcaacaaccttgtacgcgcattttgagcaggccaacatcaagacccagcttcagcaactcggcgttacactgtcgatgactagaactgaactgtcccctgcccagattaaacagctcttgcagaatccgcccgctggggtcgatcccattatctgggaacaggccaaagttgataatccagactctgagaagctgattcctgttcccatggttgggttcaaagagcttctgcgaagattaaaagttcaagatcagatgacaaagcagcaccaaaccagactggatattatctccgaagatattagcgaattacagaagaaccagacaaccagcgtagcgaaaattgcgcaatataagcgcaagctgatggatctttctcacagaacacttcaggtgctcatcaaacaggaaattcagcgcaagtcagggtatgcgattcaagctgacgaggaacaattgagagtgcagctggatacaatccaaggcgagttgaacgctccgacccagtttaaggggcggctaaacgagctcatgagtcaaataaggatgcagaatcacttcggggctgtgcggagcgaagagagatactatatcgacgcagatctccttcgtgagatcaagcagcatctgaagcagcagcaagaaggcttgtcacacctgatctccattattaaagatgatttagaagacatcaaactggtggagcatggcctaaacgaaacgattcatatacgcggcggagttttttcatag

SEQ ID NO: 127153 - DNA, 1380 bp, synthetic construct
  misc_feature 1..1380: note = Description of Artificial Sequence: Synthetic coding sequence
  source 1..1380: mol_type = other DNA
atggcctttaacttcggggctccatcggggacatccggaaccgctgccgctactgcagctcccgcaggcggatttggagggtttgggaccacctccacaacagcggggtcggccttttcattcagcgcaccaaccaacactggaacaactgcactaggcggtctcttttcccagcccacgcaggccccaacacaatcaaaccagctgattaacaccgccagcgctctcagtgcacccaccctgctcggagatgaaagggacgccatcctggccaagtggaatcagctacaggctttttggggaacaggcaaggggtacttcaacaacaacatccctcctgtcgagtttactcaagagaatccgttctgtcgcttcaaagccgtaggatattcatgcatgccctctaataaggatgaagacgggctcgtggtgctcgtgttcaataagaaagagacagaaatacgatcccaacagcagcaactcgtcgagtccctccacaaagtattaggagggaatcaaactctcacagttaacgtggaaggtactaagacgctccccgatgatcaaactgaggtggttatatatgtcgtggaaaggagccctaatgggacgtcccgaagggtgcctgcaaccaccctgtacgctcattttgagcaagccaacatcaaaacacagctgcagcagctcggagtgaccctgtctatgactagaaccgagctgagccccgcccagatcaagcagctcttacagaacccccctgctggtgtggacccaattatctgggagcaggcgaaggtcgacaaccctgattctgaaaagctaatccccgtccctatggtaggcttcaaggaactgcttaggcgcctcaaggtccaagatcaaatgacgaaacaacatcaaactcggttggacattatatcagaagatatttccgagcttcagaagaatcagacgacatcagtagccaagatcgcacaatacaagagaaagttgatggacctaagccacaggacgctgcaggtgctgataaagcaagaaatccagcgtaagtctgggtacgcaatacaagctgatgaagaacaactgagggtacagctggacactatccagggtgagctgaatgcacccacgcagttcaaggggcgtcttaatgagctgatgtcccagattcggatgcaaaaccatttcggggcagtacggtccgaagagcggtactacattgatgctgaccttctgcgcgagattaagcagcaccttaagcaacagcaggagggactatcacatctcattagtatcatcaaggacgatctggaggacatcaaattagtggagcacgggcttaacgaaaccattcacatcagaggcggagtgttttcgtag

SEQ ID NO: 127154 - DNA, 582 bp, synthetic construct
  misc_feature 1..582: note = Description of Artificial Sequence: Synthetic coding sequence
  source 1..582: mol_type = other DNA
atgagcgggtttaactttggagggacaggcgctcctaccggtggttttacattcggtaccgccaaaactgccactacaacgcccgccaccgggtttagcttttctacaagcggaacaggcgggttcaattttggggctcccttccaacccgcaacatccacaccatcgaccggactgttcagcctcgctacgcagacaccggccactcagacgactggatttacatttggaacagctaccctggcaagcggtgggacaggattcagcctgggcattggagcatccaaactgaatctctccaacacagccgctacacctgccatggcaaacccatctggcttcgggctcggctcgtccaatctcacaaatgcaatatcatccacagtaacttccagtcaggggactgctcccaccggtttcgtgttcggcccgtctactaccagtgtggccccagcaaccacttctggcggcttcagttttaccggcgggagcacagcgcagccaagcggctttaacattggaagcgcaggaaacagcgcccaacctacagctccagccacccttcctttcacgccagcgtag

SEQ ID NO: 127155 - DNA, 1569 bp, synthetic construct
  misc_feature 1..1569: note = Description of Artificial Sequence: Synthetic coding sequence
  source 1..1569: mol_type = other DNA
atgtctggatttaattttggagggactggtgcacccaccggcggcttcacattcggcactgcaaagacagctactactacgcccgccacgggcttcagcttttccacctcgggaacaggcggattcaacttcggggctcccttccagcccgcaacaagcactccttccacaggccttttcagcctggctacacagaccccagcaacccagacaactgggttcacattcggcaccgccacgctagcatcaggaggaactggattctccctcggtattggggcttctaaactgaacctgagtaatacggcagcgacaccagccatggcaaaccccagtggttttggcctgggcagctctaacttaacaaacgcaatatcatccacggtgacgtcctcgcaggggactgctcccactggctttgtgtttggccctagtacgacatccgtagcacccgctacaactagtgggggattctcttttactgggggaagcacagctcagcctagcggatttaatattggaagcgccgggaactcggcacagcccacagcccccgcgacgctgcctttcacgcccgcaacacctgccgccacgaccgctggtgctacacagcccgccgcccctactcccaccgccactattacaagcacgggcccttcactgttcgcttctatcgccacagctcctacaagcagcgctaccactggactgagcctgtgcacgcctgtcaccaccgcaggcgcaccgacagccggcacgcagggctttagcctaaaggcccctggcgccgcctcgggaacatccaccactacgagtactgctgccactgctaccgctaccactactagcagctcctccacaacaggcttcgctcttaacctaaagcctctggcccccgcagggataccatcaaacaccgccgcagctgtcactgcacctcccgggcccggagccgccgcgggcgcggctgccagttctgctatgacctacgcccagctcgaaagtcttatcaacaagtggagcctcgagctggaagatcaggagaggcatttcctgcaacaagctactcaggtcaatgcctgggataggactctcattgagaacggggagaagatcacgtcactgcatagagaagttgaaaaggttaaactggaccagaaaagactggatcaggagctcgactttatattgagccagcaaaaggagctggaggatctcttgagccccctggaagagcttgtgaaggaacagtcgggaacaatttatctgcagcacgccgacgaggaacgagagaagacctacaaattggccgaaaatatagatgcccagcttaaacggatggcccaggacctgaaggacattatcgagcacctgaatacctccggggccccggcagatacatccgacccactccaacagatatgtaagattctgaacgcccacatggacagcctgcaatggatcgaccagaattccgctctgcttcaaagaaaagtagaagaagttacaaaggtatgcgagggaaggagaaaggaacaggaacgttcattccgtatcaccttcgactag

SEQ ID NO: 127156 - DNA, 1569 bp, synthetic construct
  misc_feature 1..1569: note = Description of Artificial Sequence: Synthetic coding sequence
  source 1..1569: mol_type = other DNA
atgtcaggttttaatttcgggggaacaggtgcacctaccggaggattcaccttcggaacagctaagaccgctaccaccactcccgctacagggttttcgttttcaacgtccggcacgggggggtttaatttcggcgcaccgtttcaaccagccacctccaccccaagtaccgggcttttctccctggcgacacaaactcctgcaacccaaacaacgggatttacttttggaaccgcaactcttgcaagcggcgggacaggcttttctctcggaataggcgcctctaagcttaacctctccaacaccgctgccacccctgctatggccaacccttctggattcggcctgggcagctccaacctcacaaacgctattagtagcaccgtgacaagtagtcagggaactgcgcccacaggtttcgtgtttggtccgagtaccacatcagtggcaccagctacaacctctggcggattctcattcaccggcggctccacagcacagccaagtggttttaacatcggcagtgccggaaattccgcccagcctactgccccggctaccctcccatttactcccgccaccccagctgctaccactgccggggccacgcagcctgccgctccgactcctacagccaccataacatcaaccgggccgtccttgtttgctagcattgcaactgcccccacatcaagtgccactacaggtttgagcctgtgcacacccgtaaccaccgccggagcgcctaccgcggggacccagggcttctctctcaaggctcccggtgctgcaagtggaactagtacaactacgtctacagccgctacagcaactgccacaaccacaagtagctcatcaaccacaggcttcgcattgaatttgaaacccctggcaccagcaggcattcctagcaataccgctgctgccgtcactgcaccccccgggcccggcgcggccgctggagcagccgcatcgagcgcaatgacctacgctcagctggagtctttaattaacaagtggtcactcgagttggaagaccaggagcgccactttcttcaacaggcgacccaggtgaatgcttgggacaggacactgatcgagaacggcgagaagattactagcctacacagggaggtcgaaaaggttaagctggatcagaagcggttggatcaagagctggattttatcctcagccagcagaaggaactcgaagatttgctgtcaccattggaggagctcgtcaaagagcaaagcgggactatctacctgcagcatgccgatgaggagcgcgagaaaacgtacaagctggccgagaacatagacgcccagcttaaaagaatggctcaggacctgaaggatattatcgagcacctgaacaccagtggagctcccgccgacacgtccgatccactccagcaaatatgtaagattttgaacgcccacatggattccctgcagtggatagaccaaaacagcgcactcttacagaggaaggttgaagaagtgacgaaggtttgcgagggacgacgaaaagagcaggaacgcagcttccggatcacgttcgactag

SEQ ID NO: 127157 - DNA, 1569 bp, synthetic construct
  misc_feature 1..1569: note = Description of Artificial Sequence: Synthetic coding sequence
  source 1..1569: mol_type = other DNA
atgtctgggttcaacttcggcggtacgggtgcccctacgggtggattcacctttggaaccgctaagactgcaacaactacacctgctaccgggttcagttttagcacgtctggcacaggcgggttcaactttggcgccccttttcagcccgccacctctactccatctaccgggctgttctcgctcgctacacaaactccagccacccaaaccaccggatttaccttcgggactgctacgctggcgagcggcggtactggcttttcacttggcataggcgcgtcaaagctaaacctgtccaacaccgccgccactcctgccatggctaatcctagcgggttcgggctcggatctagtaatttgacaaacgccataagctctactgtgacctcttcccagggtacagcccccacaggttttgtgttcggtccctcgacgaccagtgtggctccagccacaacctcgggcggcttcagttttactggcggatccacagcacagccgagtggatttaatattgggtcggccgggaattccgcacagccgacggctcctgcaactctgccctttacccccgcaaccccagcagccaccacagccggcgctacacagcccgctgctccaactcctaccgccacaatcacaagtaccggcccaagtcttttcgcctcaatcgccaccgccccgacttccagtgccactaccggcctttccttgtgcactccggtgacgactgcaggagctccaacggctgggacgcaaggatttagcctgaaagcaccaggggcagcgagtggaaccagcactacaacaagtaccgccgctaccgccacagcaaccaccactagctcctcctcaaccacagggtttgcactgaacttgaagcccctggctcccgccgggattcctagcaacacagctgcggccgtgaccgctccaccaggaccgggggccgctgctggtgcggctgcatcctctgccatgacatacgcacagctggaatccctaattaataagtggtccttggaacttgaggatcaagagcgtcactttcttcagcaggctacccaggtgaatgcctgggatcgcacattaatcgagaatggcgaaaagattactagccttcatcgtgaagtagagaaggtgaagctggaccaaaagaggctggaccaggagctggactttattcttagccagcaaaaagagctcgaggacctcctcagtccactggaagagctcgttaaagagcagtccgggaccatctatctgcagcatgccgacgaagagagagaaaaaacttacaagctggctgaaaacattgatgctcaattgaagagaatggcccaggacctcaaggacatcattgaacatctcaacactagtggtgcccccgccgatacttccgaccctctgcagcagatttgcaaaattctaaacgcccacatggacagccttcagtggatcgatcaaaattcagccctgttacaacggaaggtggaagaagttaccaaggtttgtgagggtcggcgcaaggaacaagagagatccttccgcattacatttgactag

SEQ ID NO: 127158 - DNA, 1971 bp, synthetic construct
  misc_feature 1..1971: note = Description of Artificial Sequence: Synthetic coding sequence
  source 1..1971: mol_type = other DNA
atggaagaactagacggggagcccaccgtgaccctgatccccggtgtgaacagcaagaagaaccagatgtactttgactggggccccggcgaaatgctcgtgtgtgagaccagctttaataagaaagagaagagtgagatggtgccatcatgccccttcatttatatcatcagaaaagatgttgacgtgtattctcaaatactacgaaagttgtttaacgagtcgcacggcattttcctcggcctccagagaatcgacgaggaactgactggcaaatcccggaagagtcagcttgtccgggtgtctaaaaactatcgttcagtgataagagcatgcatggaggagatgcaccaagtcgctattgccgctaaagaccccgccaacggcaggcagttcagctctcaggtgtccattctgagtgcgatggagttaatttggaacttgtgcgagatcctgttcatcgaagtggcacccgccgggcccctattactgcacttgctggactgggtccggctgcatgtctgtgaagtcgatagtctctcagccgacgtgttggggtccgaaaacccctcaaagcacgactccttctggaacctcgtcaccattctggtgctccagggtagactcgacgaggctagacaaatgctctctaaggaggccgatgcgtccccagcatctgccggtatctgcagaatcatgggcgatctaatgagaactatgcctatacttagccctgggaatacacaaactctgactgagttggaattgaagtggcagcattggcacgaggagtgtgagcgatacctgcaggattcgacattcgcgacttcaccccacctggaatcccttctgaaaatcatgctcggagacgaggccgctctgctggagcagaaagaactcctgagcaattggtaccactttttggtgacacggttactgtacagcaacccaaccgtgaaacctatcgatctgcactactacgcgcaaagtagtttggacctgttcctcggcggtgaaagctcaccagagcctctggacaacatattgctcgccgcctttgagttcgacatccaccaggtgatcaaggaatgcagcatcgctttgagtaattggtggtttgtagctcacctgaccgacctgctagaccactgtaagttgctgcagtctcacaacctgtatttcggtagcaatatgagagaatttctgttgttggagtacgcctccgggctgtttgcccacccaagtctgtggcaactgggcgttgactactttgactactgcccagagctaggtcgcgtatcactcgagctgcatatcgaaaggattcccctgaacacagaacaaaaggcactgaaggtgctgaggatttgcgagcagcggcagatgactgagcaagtgcgaagtatatgtaagatactggctatgaaggctgtgagaaataataggcttggaagcgccctgtcctggagcattcgggcgaaagacgctgcctttgctacactagtgtccgatcggttcctgcgagactactgtgaacgcggatgcttttcagatttagatcttattgacaatctggggcctgcaatgatgctctcggatagactgacatttttgggcaaatatcgggagttccaccgcatgtacggcgaaaaacggttcgcggatgctgcgtcccttctactgagcctgatgaccagcaggatcgctccaagaagtttttggatgacactgcttacagacgcccttcctttgctggaacagaagcaagtcattttctctgccgagcagacatacgagcttatgagatgcttggaagacctcacttcccgcaggcccgtccatggcgagagtgacaccgagcagcttcaggatgatgatattgaaacgactaaggtggaaatgctacggctgtcgctagctcgaaacctggcccgcgctatcatccgcgaaggctcactcgaggggagctag

SEQ ID NO: 127159 - DNA, 1389 bp, synthetic construct
  misc_feature 1..1389: note = Description of Artificial Sequence: Synthetic coding sequence
  source 1..1389: mol_type = other DNA
atggccgctagctcagctgccaggagtcctttctgccagcagtggtcaagttccggtacttgcgtgcgcttctttctgcttaagtggccccaggtgactatattggttcttcaggggcggttagatgaggctaggcaaatgttatctaaagaagccgatgcatcaccagccagcgccggcatttgccgaatcatgggggatctgatgcggacaatgccgattctgagtcccggaaacactcagaccctgactgagttggagctgaagtggcagcactggcatgaagagtgcgaaagatatctgcaggatagcacattcgccacatctccacacctcgaaagtctcctcaaaattatgcttggggatgaggctgccctgttggagcagaaggaacttttgtcaaattggtatcacttcttagtcaccaggctcttgtattctaatccaactgtcaaaccaattgacttgcactattatgcacagagcagcctcgatctcttcttgggaggcgaaagctctccagaacccctggataacattcttctcgcagcgttcgagttcgatattcaccaggtaatcaaagaatgttctattgcgttaagcaactggtggttcgtggctcatctaacagatctcttggatcattgcaaacttctccagtcacataatctttatttcggaagtaatatgcgcgaatttctgcttcttgagtacgccagcgggttattcgcacaccccagcttgtggcaactcggcgttgactactttgactattgtcctgaactaggccgggtcagcttagaacttcacatcgagcgcattccgttgaatacggaacagaaggccctcaaggtgctgagaatctgcgagcaacggcaaatgacagagcaggtccgctccatctgtaaaatcctggcgatgaaggctgtgcggaacaaccggctgggctctgctctgtcctggtcaatccgcgctaaggacgccgcgttcgcgacgttagtgtccgataggttcctgagagactattgtgagcgcggctgcttctccgatctggacctgatcgataatctcggaccggcgatgatgctgagtgacagactgactttcctcggcaagtacagggaattccacaggatgtacggcgaaaaacgattcgcagatgcagcaagcctcctcttatcactgatgacgagccggatagctccccgttccttctggatgactctattgactgatgctcttccgcttctggagcagaaacaggttaaagttgcagcggccgtggtattttttgcttgtcagtcgctgttggagctgagctgtatagctgtcgctgacgttcgcgtctccagcttcgtggtgcttccggtgcgtgtgtatagtccttag

SEQ ID NO: 127160 - DNA, 975 bp, synthetic construct
  misc_feature 1..975: note = Description of Artificial Sequence: Synthetic coding sequence
  source 1..975: mol_type = other DNA
atggtccccagctgcccattcatctacatcatcaggaaggacgtcgatgtgtacagccagattctgcggaagctttttaacgagagtcatggaatttttctaggcctccagaggattgacgaggagttaacggggaaatcaagaaaaagccagctggtcagggtctcgaagaactaccgcagcgtgatccgcgcatgtatggaggaaatgcatcaagtcgcaatcgccgcaaaagaccccgcaaacggtcggcagtttagtagtcaggtcagcatattgtcagcaatggagctgatctggaatctttgcgagatcctgtttatagaagtggcacctgccggtcctctccttctacacctgctcgattgggtaaggctgcatgtatgcgaggtagattccctgagtgctgacgttctggggagcgagaatccttcaaagcacgattcattttggaacttagtgactatactcgtcctccagggcagattggacgaggccaggcagatgttgtccaaagaagcggacgcttctccggcctctgccgggatttgcaggatcatgggagatctgatgagaacaatgccgatcctcagtcccggtaatactcagaccctcacagaactcgagttaaaatggcagcactggcatgaggaatgtgaacgatatctgcaggactcaactttcgcaactagtccccatcttgagagcctgttgaaaatcatgctgggcgatgaagctgccctcttagagcaaaaagagcttctatccaactggtatcacttcttagttaccagactgctgtactcaaacccaactgtgaagcctatcgacctgcactactatgcccaatcaagcctggacctcttcctggggggcgagtcttctccggaaccactcgacaacatattgctggccgccttcgagtttgatatccatcaagttattaaagagtgtagagatgtgcacttaaagtag

SEQ ID NO: 127161 - DNA, 780 bp, synthetic construct
  misc_feature 1..780: note = Description of Artificial Sequence: Synthetic coding sequence
  source 1..780: mol_type = other DNA
atgcgcgagttcttgctcctcgagtacgcctcgggattgtttgcccatcccagcctttggcagctcggcgtagattacttcgactactgcccagagttgggaagggtctctctggagttgcatatcgagcggattcccctgaacaccgagcaaaaggcactgaaagtcctcaggatttgcgaacagaggcaaatgactgagcaggtgagatctatctgtaagattctggctatgaaggccgtaagaaacaaccggctggggagtgcgttgagttggtctattagggccaaagacgccgcctttgcaacgttggtctccgatcggttcctccgagactattgtgaacggggttgtttttctgacctcgatttgattgataacctcggacctgccatgatgctctcagatagactcacatttctcgggaagtacagggagttccacaggatgtacggcgagaaacgcttcgctgacgccgccagcctcttgctcagtctcatgacctccagaattgctccacggagcttttggatgacgctattaactgatgccttaccacttttagaacagaaacaagtgatcttcagcgcggaacagacctatgagctgatgcgctgcttagaggatctgactagccgccgcccagtccatggtgagagcgacaccgaacaattacaggatgatgacatcgagactactaaagtggagatgctgaggctcagtcttgcccggaaccttgctcgcgctatcattagggaggggtctctcgaaggctcctag

SEQ ID NO: 127162 - DNA, 1833 bp, synthetic construct
  misc_feature 1..1833: note = Description of Artificial Sequence: Synthetic coding sequence
  source 1..1833: mol_type = other DNA
atggtgccctcatgtccatttatatacatcatccggaaagacgtggatgtttatagtcagatattgcgcaaactgttcaacgaaagtcacgggatctttctcgggctgcagcgtattgacgaggaactgactgggaaaagccggaagtcacagctggtgcgggtgagcaagaactataggtcagtgatccgggcttgtatggaggagatgcaccaagtcgccatagccgccaaggatccagctaacggcaggcagttctcctcccaagtctccatcctttccgcaatggaactaatttggaacctgtgcgaaattctgtttattgaagtcgcccctgcaggaccactgctcttgcatctactggattgggtacgtctgcacgtctgcgaggtggacagcttaagcgccgatgtactggggtctgagaacccttcaaaacacgattctttttggaacctcgtgacaattctggtgttgcaaggacgactggacgaggctaggcagatgttgtcgaaggaagctgatgcctcacccgcctcagccggaatatgcaggatcatgggcgatctgatgcgtaccatgccaattttaagccctggcaatacacagactttgaccgaactggaattaaaatggcagcactggcatgaagaatgcgagagatacctgcaggattctacatttgctacctccccccatctcgaatccctgctaaaaattatgctgggggacgaagctgcattgcttgagcagaaagagctcttatcgaattggtaccatttcctggtcactaggttgttatacagtaacccaactgtgaaacccattgatctgcattattacgcccagtctagccttgacttgttcctgggtggcgaaagttcccctgagcctctggacaatattctgttagccgcattcgaatttgacattcaccaggtgataaaggagtgctccatcgcattaagcaattggtggtttgtcgcccatctaaccgaccttctggaccactgtaaattgctgcaatctcataacctgtattttgggagcaatatgcgggagtttctcttactcgagtacgctagcggcctgttcgcgcatccaagcttgtggcagcttggagtggactactttgactattgccccgaattaggcagagtctctttggagctgcatatcgaacgcatcccactgaacacagagcaaaaagccctgaaggtgctcaggatttgcgagcaaaggcagatgactgagcaagtgcgctctatctgtaagatccttgctatgaaggcagtgaggaacaacaggttgggatcagcgcttagctggtccattcgagccaaagatgcagcgttcgccaccctggtctccgaccggtttttaagggactattgtgagcggggttgcttttcagaccttgacctgatcgacaatttaggcccggctatgatgttgtccgacagacttacttttcttggcaaatacagagaattccaccgtatgtacggggagaagcggtttgctgatgccgcctctctcctcctgagcctgatgactagcagaattgcgccaagatctttttggatgaccctcctaacggatgcgttgcccctgctcgaacagaagcaggttatcttctccgccgaacagacttatgagctcatgcgctgtttggaggacctaacttcacgaagaccagtccatggtgaatctgacaccgagcagctgcaggacgacgatattgagaccacaaaggtggagatgttgcgtctttctttggccagaaacctagcaagagccattatccgcgagggatctttggaaggctcatag

SEQ ID NO: 127163 - DNA, 846 bp, synthetic construct
  misc_feature 1..846: note = Description of Artificial Sequence: Synthetic coding sequence
  source 1..846: mol_type = other DNA
atgaaactcgccgctatgataaagaagatgtgtccctctgactccgagctgtcgatcccagcaaagaactgctatcgaatggtgatactggggtcctcaaaagtcggcaaaacagccatagtctcccggttcttgacaggtcggttcgaggatgcatacacgcccaccattgaagattttcacagaaaattttacagcatcagaggcgaggtgtatcagctggatatcctggacacctccgggaaccacccattccctgctatgcgcagactgagcattctgactggcgacgtgttcatcctggtattctcattagacaatagagactcctttgaggaggtgcagagactgcggcaacagattctggacaccaaaagttgtctgaagaacaaaacaaaagaaaacgtggatgtgccactggttatctgtggcaataagggggacagggacttctacagggaggtggatcagcgagagatcgagcagttagttggggacgacccacagcgctgcgcatacttcgagatatctgcaaagaagaacagctcgctcgatcagatgttccgcgcactgtttgccatggcaaagctgccgtcagagatgtcacccgatctgcacaggaaggtctcagtgcagtactgcgacgtcctgcataaaaaagcactgagaaacaaaaagctgttgagagcgggctctggcggcggcgggggcgatcctggtgacgctttcggcatcgttgcaccatttgctaggcggccatctgtacactcagatttgatgtatatccgagaaaaggcatctgctggatctcaagctaaggataaagaacgctgcgtgatttcttag

SEQ ID NO: 127164 - DNA, 1881 bp, synthetic construct
  misc_feature 1..1881: note = Description of Artificial Sequence: Synthetic coding sequence
  source 1..1881: mol_type = other DNA
atggttctggaacttcctaaacgttggggcaaaaactcagagtttgaaggtggaaagagcaccgtaaactgtagtacaacccccgtggcggagcggtttttcacaagttctacaagcctcaccctcaagcacgcagcctggtatccttctgagatcctggacccgcacgtcgtgctcctgacttccgacaatgttattaggatctattctctacgcgagcctcagacccctactaacgttattattctgagcgaggccgaggaggagtctctggtgctgaacaaggggcgcgcgtataccgcgagtctgggcgaaactgcagtggcatttgactttggcccgctcgctgcagtgccaaaaaccctgttcggacagaatggcaaagacgaggtggttgcctatcctctctatatcctgtacgaaaatggcgaaacttttctgacctacatctccctgctacacagtccggggaacatcgggaagctgctcggacctttgcccatgcacccagctgccgaagataattacgggtatgacgcgtgtgccgtgttgtgcctaccatgcgtacctaacatcctggtgatagctacagagtctggaatgctgtaccactgtgtcgtcctagagggcgaagaagaggacgatcacacaagtgagaagagttgggattcaaggatagatttgatccctagcctgtacgtgtttgaatgtgtggaactggaattggccttaaaactggcctctggcgaggacgacccctttgactccgatttttcttgtccagtgaaacttcatagagaccccaagtgtccatctagatatcactgcacgcatgaagcgggcgtgcactccgtgggcctgacctggatccacaaactgcataaattcctgggaagcgacgaagaagacaaggacagtctgcaggagctgtccactgaacagaaatgttttgttgagcacatactgtgtactaagcctcttccctgccgccaacctgctcctatccgcggtttctggatcgtccctgacatcctggggccaacgatgatctgcattaccagcacctatgagtgtcttatatggcctctcctgtcaactgtacaccccgctagccccccgctactttgcaccagagaggatgtggaagtggcagagagccctttacgcgtactcgcggagactcctgatagttttgaaaaacatatccgaagcatactgcagcgaagcgtcgctaatcccgcattcctgaactgcttcacgcagttgcgtaagattaaagtggagaccctgtttctcagggcctcagaaaaagatatcgctccgcctcccgaggagtgtttacaactgctgtcccgagccacacaggtgtttagggagcaatacatattgaagcaggatctagccaaggaggaaattcagcgccgcgtgaagctactctgcgaccagaaaaaaaaacagctggaggacctgtcgtactgtcgggaggaaagaaagtcattgagggaaatggccgagcgactggccgacaagtacgaagaggctaaggaaaaacaggaagatattatgaacaggatgaaaaagctgttacatagcttccacagcgagctcccggtcctatcagattccgagcgggacatgaaaaaagagttacagcttataccggatcagcttagacatctgggaaacgcaattaaacaggtcacaatgaagaaagactaccagcaacagaaaatggaaaaagtgctgtctttgcccaagccaaccattatactgtctgcctatcagcggaagtgtatccagtcgattctcaaagaggaaggcgagcacattcgcgagatggtgaaacagatcaacgacatacgcaatcacgtcaacttctag

SEQ ID NO: 127165 - DNA, 2226 bp, synthetic construct
  misc_feature 1..2226: note = Description of Artificial Sequence: Synthetic coding sequence
  source 1..2226: mol_type = other DNA
atggcagcggctgagggtccagtgggagacggcgagctctggcaaacttggctccccaaccatgtcgtctttctcagactccgcgaaggactcaagaaccaaagccccacagaagccgaaaaacctgcctcatcttcccttccctctagtccccccccccagctgctaacaaggaacgtcgtcttcgggttaggcggtgagctgttcctttgggacggcgaagattctagttttctggtggtgcgacttcgcggtcccagtgggggtggcgaggaacctgcgttgtcacaataccagagactgctatgtattaaccccccactcttcgaaatttaccaggtactactcagcccgacacaacaccacgtggccctgatcggcattaagggcttgatggtgctagagcttcccaagaggtggggcaagaacagtgagttcgaaggaggaaagtcaactgtgaactgctctacgacccccgttgcggagcgcttcttcacctcctccacctcactcacactgaagcatgccgcttggtatccgtcagagatcctcgatccccacgtggtcctcttgacctccgataacgttattcgcatatacagcctgagggagccgcagactcctaccaacgtgataattttgtctgaagctgaagaagaatcccttgtgctgaataagggaagggcatataccgcttcattgggtgagactgccgtcgcgtttgacttcggcccattagccgctgtgcctaagacgctgtttgggcagaacggaaaagacgaagtggtcgcatacccactctacatcctgtacgaaaacggcgaaaccttcctgacatacatcagtctgctgcatagccccggtaacatagggaaattacttggcccacttcctatgcacccagccgccgaggataactatggctatgacgcctgtgctgtcctgtgtctgccatgcgtgcctaatatcttggtgattgcgacagaatcaggcatgctgtatcactgcgtggttctagagggcgaagaggaggacgatcatacctcagagaagagctgggactcccgcattgatctgatcccatctctttacgtctttgaatgcgtcgagctagagctcgccttgaaactcgcttcaggagaagacgatccgttcgactcagacttttcctgcccggtgaaactgcaccgggatcccaagtgcccatctcgatatcactgcacgcatgaggctggggtgcattccgtgggccttacctggatacataaactccacaagtttctgggtagtgacgaggaagacaaggacagcctacaagaacttagcactgagcaaaagtgctttgtcgaacatatcctctgcaccaaacctctaccgtgcagacaacccgcaccaatcagggggttctggatagtcccagatatcctgggtcctacgatgatttgtattacaagtacatacgaatgtctgatttggcctctgctttctactgttcacccagcatccccccctctactctgcacgcgcgaagacgttgaggttgccgagagcccattaagggtgctggcagagactccagatagcttcgagaagcacatcaggtctatcctgcagcgctccgtggccaaccccgccttcctcaaagctagtgagaaggatattgcccctcctcccgaggagtgccttcagctgctgtcgcgcgccacacaggtttttcgagaacagtacattctaaagcaagacctagccaaggaggagatccagagaagggtcaaactcctgtgtgatcaaaagaagaaacagttagaggatctgtcctactgtcgggaggagaggaaatctcttcgggaaatggccgagcgcttagccgataaatacgaggaagctaaggaaaaacaagaggacataatgaaccgcatgaagaagctgctgcacagtttccacagcgagctgccagtcctaagtgactctgaaagagacatgaaaaaagagctccagctgatacccgaccagcttcgccatctggggaacgccataaagcaggtgaccatgaagaaggactaccaacagcagaaaatggaaaaggtcctctccttgcctaaacccaccatcatcctatctgcctatcagcgcaagtgtattcagtctatacttaaagaagaaggggaacacatccgcgagatggttaagcagatcaatgacattagaaatcacgtgaacttttag

SEQ ID NO: 127166 - DNA, 2460 bp, synthetic construct
  misc_feature 1..2460: note = Description of Artificial Sequence: Synthetic coding sequence
  source 1..2460: mol_type = other DNA
atggatacagaggggttcggcgaattattacagcaggcagagcagcttgctgctgaaacggaaggtatctccgagctccctcatgtggaaagaaaccttcaagagatccagcaggccggcgaaagattgcggtcacggacactcacccgcacctctcaggaaacggcagatgtcaaggcttccgtcctgttagggtctagagggttggacatcagccacatctcccaacgactcgagagcctgtcggcagccacaaccttcgagcccctcgagcctgtgaaagacactgatattcaaggattcctaaagaacgagaaggataacgctttgttgtctgcaattgaggagtctcgtaagcgcacattcggaatggccgaggaatatcatcgcgagtccatgttagtggagtgggaacaggtgaagcaaaggattcttcacaccctcctcgctagtggggaagatgcactcgactttacccaagagtccgagcctagctacattagcgacgtaggcccacccggacgtagttctttagacaacattgaaatggcctacgcccggcaaatttatatctacaacgagaagatcgtgaatgggcacctccagcccaacctggtggatctatgcgcgagcgtggccgagctagatgataagagcatcagcgatatgtggaccatggtgaagcagatgacggatgttctgctgactcccgccactgatgcacttaagaaccgttctagtgttgaggtgcgaatggagttcgtcagacaggctctcgcatatttggagcagtcatacaagaactatacactggtcaccgtgtttgggaacctccatcaggcccagttggggggagtgccgggaacataccaacttgtgaggtccttcctgaatatcaaactaccagcccctttgccaggcctgcaggacggtgaggtcgaagggcatccggtttgggctctgatttattactgcatgcgctgtggcgatctcctagctgcgagccaggtggtgaacagggctcaacatcagcttggcgagtttaagacttggttccaggaatatatgaactcaaaggacagaagactttctcctgccaccgaaaataagctcaggctgcactaccggagagccctgaggaataatactgacccatacaagcgtgccgtatactgcatcatcggcagatgtgacgttacagacaatcaaagcgaggtggctgataagaccgaggactacctgtggttaaaactgaaccaggtttgtttcgatgacgatggcactagcagccctcaggacagacttactctgtcacagttccaaaagcagctgctggaggattatggggaatcacatttcacagtgaatcaacagccattcctttactttcaagttttgttcctaaccgcccagtttgaggcggcagtggcattcctattcagaatggagaggctaaggtgccatgcagtccacgtcgctctggtgctatttgagctcaagctactgctaaagtcttccggccaaagcgcccaactgttgtcccatgagccgggggatcctccttgcctacgacgattgaactttgtgagactgttaatgctatacacacgcaagttcgagagcactgatccccgggaagccctgcagtatttttacttccttagagacgaaaaggacagtcaaggcgagaatatgttccttagatgtgtttctgaattagtcatcgaatcacgcgaattcgacatgatcctcggaaaactggaaaatgacggatcccggaagccaggggtaattgacaagttcacgagcgataccaaacctattatcaacaaggtagcaagtgtcgcagaaaataaagggctattcgaagaagctgctaagttatatgacttggccaaaaatgccgacaaggtcctggaacttatgaataagttattatctcctgtcgtgcctcaaatttcggcccctcagagtaacaaggaaaggttgaagaatatggcgctgtctattgcagagagataccgcgcccagggcatatccgctaacaagtttgtggattcaacgttttacctgctccttgatctgattactttttttgatgagtaccacagcgggcatatcgaccgtgccttcgatatcatagagagacttaagctggtccccctgaaccaggaatctgtggaggagagggtggcagcattcaggaatttctcggacgagatacggcacaatttatctgaggtgttactcgcgacaatgaacatcttgtttacccagttcaagaggttaaagggcactagcccaagctcttcctcacgcccgcagcgggtgattgaggatagggatagccagctgcggtcccaagctcgcaccctgattaccttcgccggaatgattccttatcggacctccggcgataccaatgcccgcctagttcagatggaagtcctgatgaactag

SEQ ID NO: 127167 - DNA, 2091 bp, synthetic construct
  misc_feature 1..2091: note = Description of Artificial Sequence: Synthetic coding sequence
  source 1..2091: mol_type = other DNA
atggcagaagagtaccaccgggaatcaatgctcgtcgagtgggaacaggtcaagcagagaattctccacacactgttggcctctggcgaagacgccctggatttcacacaggaaagcgagccaagctatatcagtgatgtgggccctccagggcggtccagcctggacaacatagaaatggcatacgcccggcagatctatatctataacgagaaaatcgtcaatggacaccttcagcctaatcttgtggacctgtgcgcttctgttgccgaacttgacgacaagagtatcagcgatatgtggactatggtcaagcagatgacagatgtcttgcttactcccgcgacggatgctctgaagaacagatcgagcgtggaggtgagaatggagttcgtgagacaagcccttgcttacctcgagcaatcttataaaaattacactttggttaccgttttcgggaacttacaccaggctcaactggggggtgtgcctgggacctaccaacttgttcggtctttcctgaatattaagctacccgcccctctgcccggactgcaggatggcgaagtggaaggacatccagtttgggctctgatttactattgcatgcgctgcggggatctcctagctgcttcgcaagtggtgaatcgagcccaacaccagctcggcgagttcaaaacatggtttcaggagtatatgaattcaaaagatagaagacttagcccagcaacagagaacaagctgcggttgcactatagaagagctttacgaaacaacaccgacccctataagcgagcagtttactgtatcatcggccgctgtgacgtcactgataatcagagtgaggtggcagataagactgaagactacctgtggctgaaactgaaccaagtgtgttttgacgacgacggcacttcttcgccccaagaccggttaacgctctcccaattccaaaagcagctcctcgaagattatggggagtcccacttcacagttaaccagcagccatttctttactttcaggtcctgtttctgaccgcacagtttgaagctgccgtggctttcctttttaggatggagcgactgcgctgccacgctgttcacgtggcactcgtcttattcgagctgaagctgctgttaaaatcttctggacagtccgctcaactgctcagccacgagcccggagaccccccctgtctgagacgcttgaatttcgtgcgcttgctcatgctatatacgcgaaagttcgaatcgacggaccctagggaggcccttcagtacttctattttctgagagacgaaaaggatagtcagggtgaaaacatgttcctcagatgcgtcagcgagctggttatcgaaagcagggaatttgatatgatcctggggaagctggagaatgacggatctagaaagcctggcgtcatagacaagtttacctcagacacaaaacctatcatcaacaaagtcgcctctgttgcggagaacaagggcctcttcgaagaagcggctaagctgtatgacttggccaagaacgctgacaaggttctagaacttatgaacaaactgctgtctcctgtcgtaccccagatttccgctccgcagtccaacaaggaacggttaaagaacatggctttaagtattgccgaaagataccgagcccagggaatctccgcaaacaagtttgtcgatagcacgttctatctactcctggacttgattacgttctttgatgagtaccactccggccacatagacagagccttcgacattatagagcgactgaagctggtcccactgaaccaagagtccgtggaggagagagtcgccgcattccgcaatttcagcgatgagataagacacaacttgagcgaggtcttattggccaccatgaacattctctttactcaatttaaaagactgaaggggacgtctcccagttcctcttcccgccctcagcgggttattgaggatcgggacagccagctgaggtcacaggccaggaccctcatcacctttgcggggatgattccgtacaggactagtggcgacaccaacgcacgtctggtccaaatggaagtactcatgaactag

SEQ ID NO: 127168 - DNA, 2091 bp, synthetic construct
  misc_feature 1..2091: note = Description of Artificial Sequence: Synthetic coding sequence
  source 1..2091: mol_type = other DNA
atggcagaggaatatcacagggaatcaatgctggtggagtgggaacaagttaagcagcgcatcttgcacacactgctggctagtggggaggacgcccttgattttacacaagaatcggaaccttcatatatctctgatgtgggccccccgggccgttcttctcttgataacatcgagatggcctatgctcgacagatttacatctataatgagaagatagttaacggtcacctgcagcctaacttggtggatctgtgcgcgtccgtcgctgagctcgacgataagagcataagcgacatgtggacaatggtgaagcaaatgactgatgtgttgctgacgcctgcaactgacgctctgaaaaatagaagctcagtggaagtacgcatggaatttgtgcggcaggcgctggcctatctcgagcaatcatacaaaaactacacactcgttaccgtctttggcaatctgcatcaggctcagctcggaggggtccctggtacatatcagttggtccgctcctttcttaatattaagctgcccgcccctctgccaggactgcaagacggcgaggtggagggccatcccgtgtgggctcttatctactactgcatgcgttgcggggacctcctcgctgcatcccaagttgtaaacagggctcagcaccaactaggtgaattcaaaacctggttccaggaatacatgaatagcaaggaccgacgcctatccccagcgacagagaacaaattgcgacttcactaccggcgcgcattgaggaataacaccgacccatataagcgggccgtgtactgtataattggacgctgtgatgtgaccgataatcagagcgaagtcgcagataagacggaggactatctctggctgaagctgaaccaggtgtgctttgacgatgacgggaccagcagtccccaggaccgtctcacccttagccagtttcaaaagcagcttctggaagactatggagaatcccactttactgtgaaccaacagccttttctctatttccaggtcttgtttctgactgctcagttcgaggcagccgttgcattcttgttccgcatggagaggcttcggtgccatgcagtgcacgtggccctcgtcctgttcgaactcaaactcttactgaagtcatctggccagtcagcgcagcttctaagtcatgagccaggcgatcccccatgcctgcgcaggctcaacttcgtgcgcctgctcatgctgtacacaagaaagtttgagtccactgatccccgggaggccctccaatacttctacttcttacgcgatgagaaggactctcagggagagaatatgtttcttcggtgcgtcagtgaattagtaatcgagtcaagggagttcgacatgatcctgggcaagctcgagaacgatggaagtaggaaacccggcgtgattgataaattcacctccgataccaaaccaatcatcaacaaggtcgcgagtgttgccgagaacaaagggttattcgaggaggctgctaagttgtacgacctggctaagaacgccgataaagttctggagctgatgaacaaactcctgagtccagtcgtgcctcaaatctctgcaccgcagtctaataaggaaagactgaagaatatggccctatcgatcgcagaacggtatcgtgcccaggggatttctgcaaacaagtttgtggactcaaccttttatctactactcgatctaatcactttcttcgacgagtaccattccggacacatagatagagcattcgatattatcgagagattgaagttagtaccattgaatcaggagagcgtggaggagcgcgtggccgccttcagaaacttttctgacgagatcaggcacaacctgtctgaagtgctgctggctacaatgaacattctgttcactcaattcaagcggctgaagggaacatcaccttcttcgagttctcgcccacagagagtcatcgaggacagagattcacagctgagaagccaggcccggactctcatcacattcgcagggatgattccatatcggacatccggcgacactaatgctcgccttgttcagatggaagtgctgatgaactag

SEQ ID NO: 127169 - DNA, 5403 bp, synthetic construct
  misc_feature 1..5403: note = Description of Artificial Sequence: Synthetic coding sequence
  source 1..5403: mol_type = other DNA
atgttcaacaagagtttcggcacaccttttggaggcgggaccggtgggttcggcacaacatctacattcggccagaacacgggatttggtacaacatctggcggagcgttcggaacttcggctttcggcagttccaacaacacaggaggtctgttcggaaactcacagaccaagcccggaggtctcttcggaaccagttcgttttctcagcccgctacaagtacgagcactgggtttggctttgggaccagtactgggacagctaatactttatttggcaccgcctctaccggaacttcacttttcagctctcagaataacgcattcgcacagaacaaaccaacgggcttcggaaatttcgggacttccacatcatcaggcggcctgtttggcactacaaatacaacctcgaatcctttcggcagcacatcgggttccctgttcgggccatcgtccttcaccgcagctccaacgggcacgaccattaagttcaatcctccaacaggaacggacaccatggtaaaggcaggagttagcaccaatattagtaccaaacaccagtgcataacagccatgaaagagtatgagagcaaatcgcttgaagaactgaggctggaagactatcaggccaatcgcaagggaccacagaaccaggtgggcgctggcacgaccacaggactttttgggagctcccctgccacatccagcgccaccggactcttctcatcgagcaccactaatagcggctttgcgtacgggcaaaacaagaccgcgttcggcacttcaacaacaggctttggcactaacccaggagggctattcgggcagcaaaatcaacagactacatcgctattctccaagccgtttgggcaggcaaccacgacccagaacaccgggttttccttcggcaacacttcaacgatcggacagccttctaccaacacaatgggattgttcggcgtcacccaagcttctcagccgggcgggctcttcgggactgccacaaacacatctaccggcacagccttcggcactggaactggtctgttcggacagaccaatacaggtttcggagcagttggcagtactcttttcggcaataataaacttaccaccttcggaagcagtacaacctcggcaccgagctttggtaccaccagcgggggactctttgggtttgggactaatacatcgggtaacagtatttttggcagcaagccagcacctggaactttgggaactggtctcggggctggctttggcacagcactgggtgccggacaagcctctctgttcggcaacaaccagcctaagatcgggggcccgctgggtactggagctttcggcgctcctgggtttaacacgactactgcaaccctgggcttcggcgcaccccaagcgccagtggccctgaccgaccctaacgcaagtgctgcacagcaggctgtactccagcagcatatcaactccctcacctattcaccctttggagacagcccactcttccggaatcctatgtcggacccaaagaagaaggaagagcgactgaagccaacaaatcctgctgctcaaaaagccctgaccacgccaactcattacaaactcacacctaggccagccacccgggtcaggccgaaggccctgcagaccactggaaccgcgaaaagtcatcttttcgatggcctggacgacgatgagccctcacttgctaacggcgcttttatgccaaagaagagcatcaagaagctggtgctcaaaaatctaaacaacagcaatctcttctcacccgtgaatcgggactctgagaatctagcgtccccgtctgagtaccccgagaacggagagaggtttagttttctgtcgaaacccgtggacgagaatcatcagcaggatggagacgaggacagcctggtatctcacttttacacaaaccccatcgccaagcctatcccacaaacaccggagtcagccggtaacaagcactccaactccaacagcgtggacgacactattgtcgcgttaaatatgcgtgctgctttgaggaacggactcgagggttccagtgaagaaacaagttttcatgatgagtcactgcaagatgatcgagaggaaatcgagaataattcttatcacatgcaccctgcgggaatcatcttgacaaaggtggggtattacaccatcccatcaatggacgacctcgcgaaaatcacaaatgaaaagggcgaatgtatcgtatctgacttcacgatcggccggaagggttacgggtcgatctactttgagggcgacgtgaacttaacgaacctcaatctcgatgacatcgtccacataagacgcaaggaggtggtggtgtaccttgacgacaaccagaaaccccctgtcggggaagggctcaatcgtaaggcagaggtcactttggatggggtgtggcccaccgataagacctccaggtgcctgattaagtcccccgatcgcctcgccgatatcaattatgaaggccggctagaggccgtaagccggaagcagggcgcacagtttaaggagtataggccagagactggaagctgggtgttcaaagtgtcccatttcagtaaatacgggttgcaggatagcgacgaggaagaagaagaacatccaagcaaaaccagtactaagaaacttaaaactgccccgcttccacccgcctcccagactacacctctgcagatggcccttaacggaaagccagctccccctccacagagtcagagtccagaggtggagcagctcggaagagtagtggaactggactccgatatggtcgacattacgcaggagcccgtgctcgacacaatgctcgaggagtcaatgccagaggaccaagaaccagtgagcgcctctacacatatcgcttcttccttgggaatcaatccacatgtgctgcagattatgaaggctagtctgctgactgacgaagaagacgtcgacatggccctggatcaaaggttcagtagactccccagtaaagcagatacttctcaggagatttgttctccacgcctgcccatctctgcaagccactctagcaagactagatcactcgtcggcggactgctccagtctaagttcactagtggggcattcctgtcaccctcggtgagcgtccaggagtgcagaactccacgggccgcttcattaatgaatatacccagtacttctagttggtcagttccccccccattgaccagcgtgtttacaatgccgtcccctgcccctgaagtgcccctcaagaccgtggggacacgtcgccagctcggtctggttccacgcgagaaaagcgtcacctacggcaaaggcaaactgctgatggatatggcactgttcatgggtcggagttttagagtaggttggggccccaactggacactcgcgaactcaggcgaacagctgaatggaagtcatgagcttgagaatcatcagatcgccgacagtatggaatttgggttccttcccaaccctgtcgccgttaagcctcttactgagtctccattcaaagtgcacctagagaagctgtctctgcggcagcgtaagcccgacgaagatatgaaactgtaccagacgccactggagcttaagctgaagcacagcaccgtgcacgtggacgaactctgcccgttgatagtgccaaaccttggagttgccgtcatccacgattatgccgattgggttaaggaagcatccggggatctgccagaggctcaaatcgtcaaacattggagtctgacatggactctttgcgaggccttatggggacatctcaaagaactggacagccagttaaacgaacctcgcgagtacattcagattctggagagacggcgcgctttctcccgctggctgtcttgcaccgccaccccacagatcgaggaagaggtttctctgacacagaagaactcaccagtggaggctgtttttagctatctgaccggcaagagaatttcggaagcctgcagcttggcccagcagagtggcgatcacagattggcactcctgctctcccagtttgtcggctcgcagtccgtgcgcgagctgcttacaatgcagctggtggactggcaccaactgcaagccgactcattcatccaggacgaacgtctccgtatattcgctctgctggcaggaaagcctgtgtggcaattatcagagaagaagcaaattaatgtgtgtagccaacttgactggaagcggtccctggcaatccacctgtggtacctccttcctcctacggctagtatcagtagggcccttagcatgtacgaggaagcatttcagaacaccagcgacagtgatcgatatgcctgcagcccactgccaagttacctggaggggagtggctgcgtgatcgccgaagagcagaatagtcagacgcctttgagggacgtgtgtttccacctgctaaagctgtacagtgatcggcactacgacctgaatcagctgctcgaaccacgctctatcaccgcagatcccctggattaccgcttgagctggcacctctgggaggtcctgcgggcgttgaactacactcacctgagcgcgcagtgtgagggagtactgcaggcttcttacgctggccagctcgagagcgaagggttgtgggagtgggctattttcgtccttctgcatatcgacaattcgggaattagagagaaggcagttcgcgaattattgacacgtcattgtcagctgctcgagacccccgaaagctgggccaaagagacctttctgacccagaagctccgcgtgcccgccaagtggattcatgaggccaaagcggtgagagcacacatggaaagtgacaagcacctggaggccctgtgcctgtttaaggccgagcactggaataggtgccacaaactgattattagacatttggcctcggacgctattatcaacgagaactacgactatctgaaaggctttctggaagacttggcccctcccgaaaggtcttctcttatccaggattgggagacatcgggactcgtatatttagactatatccgagtcattgagatgctccgacacatacagcaggtggactgttcaggcaatgacctcgagcaattgcatatcaaagtaacctccctgtgcagtagaatcgaacagattcagtgttattcggccaaagaccggcttgctcaatccgatatggccaaaagagtggccaatcttcttcgcgttgtgctcagtctccaccatcctcctgatcgtacctctgattctacgcccgatccccagagagtcccccttaggctgttggcgcctcatatcggccgcttgcctatgccagaagactacgccatggacgaactgaggagcctgacacagagctatctccgagaattggctgtcggatcactttag

SEQ ID NO: 127170 - DNA, 5181 bp, synthetic construct
  misc_feature 1..5181: note = Description of Artificial Sequence: Synthetic coding sequence
  source 1..5181: mol_type = other DNA
atgtttaataaaagttttgggacaccctttggaggtggtaccggcgggttcggcactactagcaccttcggtcaaaatactggattcggcaccaccagcggtggggctttcggcacatcagcttttgggagctcaaataatacgggaggcctctttgggaattcgcagaccaagccaggaggtttatttgggacatcctcattttcccaacctgccaccagcaccagcacggggttcggttttggaacttcgacaggcaccgccaacactctctttggaaccgcttccaccgggaccagcctgttctcctcgcaaaataacgcctttgcccagaataagccaacaggctttgggaattttgggacttcaaccagtagcggcggtctgtttggaactacgaataccacatccaaccccttcggcagcacgagcgggtctttattcggaccatcctccttcacggccgctcccactggtaccaccataaagttcaatccacccaccggaaccgacactatggtgaaggccggggtgagcaccaacatttccacgaagcatcagtgcataaccgcaatgaaggaatacgaaagcaagtctctcgaagagctcaggcttgaggactaccaggccaacaggaagggccctcagaaccaggtcggggccgggactacaaccggcctctttggctcatcacccgctacgtcctccgcaacaggactgttcagtagctccacaactaactcaggctttgcctacggccagaataaaactgcgttcggtacatccaccacgggatttgggacaaaccctggcggtttgtttgggcagcaaaaccagcagaccacctcactgttctccaaaccattcggccaggccaccacgacccagaatacaggctttagctttggaaacactagcaccattggacaaccatctactaacaccatgggcctattcggtgtcacccaggcgtcccagccaggcgggctctttggcacggcaaccaacacaagcaccggaacagcctttgggactggcaccggtctttttggccagaccaatacaggctttggggcggtcggatccacattattcggcaataataaattaactacattcggcagctcaaccacaagcgcgccctcctttggtacaaccagcggggggttgttcggtttcgggaccaacacttctggtaattctatcttcggctctaaacccgccccgggcactttagggactggcttgggggcaggatttgggaccgccctcggtgcaggccaggcatccttattcggaaataaccagcctaagattggcggtcccctaggcacaggggcattcggagccccgggattcaacactaccacagccacactaggcttcggcgccccacaggcgcctgtagctctgactgatcctaatgcctccgccgcgcagcaagcagttctgcagcaacacatcaactccctgacctacagcccatttggtgactcccccctgtttcggaatccaatgtcagatccgaaaaaaaaggaagaaagactcaaaccaaccaatcccgcagcacaaaaggccctcactactcctacgcattacaagttaacaccacgaccagctacacgagtacggccaaaggctctgcaaaccactggaacagccaagagccatttgtttgacggtctcgacgacgatgagccaagcttggccaatggtgctttcatgcccaagaaatcaattaagaaactggtccttaaaaatcttaacaattctaacctgttctcccctgtgaatagggactccgaaaacctggccagcccatcagaatacccggagaatggagagcgattctcctttctgagtaaaccagtggatgagaatcaccaacaggatggcgatgaagactccttagtttctcacttttatacaaaccctatagccaagccaatcccacagactccagaaagtgccggcaacaagcatagcaattctaactccgtggacgatacaatcgtcgcgctgaacatgagagcagctctcagaaatgggctggaaggcagttccgaggaaactagcttccatgacgaatctcttcaggacgacagagaggaaattgaaaataatagttaccatatgcatcccgccggaatcatacttactaaggttggctattacactatcccgagcatggatgatctcgcaaagataaccaacgagaagggcgagtgtatcgtctccgatttcactatcggcaggaaggggtatggttcaatatatttcgagggcgatgtgaatcttacaaatctaaatctggatgacattgtgcacatccggcggaaggaagtggttgtgtacctggatgacaatcagaagccccctgttggcgaaggattaaatcggaaggccgaggtcaccctggacggggtgtggcccaccgacaaaacttctagatgcctaataaagtctccggaccgcctggccgacattaactacgaaggccgactggaggccgtaagccggaagcagggcgcccagttcaaggagtaccgtccagaaaccggaagttgggtgttcaaagtgagtcacttcagcaaatatggacttcaggacagtgatgaagaggaggaagaacacccgtccaagaccagtacaaagaagctgaaaacagcccctctcccacctgcgtcccagaccactcctctgcagatggcactgaacggtaaaccggcacctcccccccagagtcagtctcctgaagtggagcaactgggacgcgtagtggagctcgacagtgacatggtggacatcacccaggagccagtactagacaccatgttggaggaatctatgcctgaggaccaagagccagtgagcgcctccactcatatagcctcgtctctggggatcaatccacacgtgctccaaatcatgaaagcgtctctgctgacagatgaggaagatgtggatatggctctggatcagcgttttagtcgtctcccttccaaagccgacacgtcacaggagatctgttcacctagactgccaatatccgcaagccacagctctaagacccggtcactcgtcggcggtttactgcaatcaaaatttacaagtggcgctttcctctccccatcagtctctgttcaagagtgccgcacccctcgagctgccagtctgatgaacatcccaagcacatccagctggtctgtgccgcctccccttacaagcgtatttacaatgccttcaccggcaccagaggtacctctcaagacagtcggtaccaggcgccagctgggcctcgtccctagggaaaaatcagtaacctatgggaagggtaaactgttgatggatatggccctgtttatgggccgctcctttcgagttgggtggggaccaaattggacactggctaactcgggggaacagctgaatggctcacacgagctggagaaccatcagatcgctgatagcatggagttcggattcctgcccaatccagtagcagtgaaaccgctgaccgaatcgccctttaaggtgcatttggaaaagttgtctctgcggcaacgcaagcccgacgaggatatgaagctgtaccagacccctctggagctcaagctcaagcattcgaccgtgcacgtcgatgagttatgtcccctgatcgtccctaacctaggcgtggccgtcatccatgattacgccgattgggtgaaggaggcctcgggtgacctgcccgaggcacagattgtaaagcactggagcctgacttggactctctgcgaagccctttggggacatctcaaggaactggacagtcagctcaatgagccaagagaatacatccagatcctcgagcgccgtagagcattttcccgttggctgagttgtaccgcaactcctcagatcgaggaggaagtaagtctgacacagaaaaatagtcccgtggaagcggtcttctcatacctcactggcaagcggatatccgaagcgtgctccctggcccaacaaagcggcgatcacagactagcactgctactgtcacagtttgtcggaagccagtccgtgagagagctgctgactatgcagctagttgactggcaccagctgcaggcagacagcttcattcaggacgagagactccgcatttttgctcttctggccggtaagcctgtctggcaactgagtgagaaaaagcagatcaatgtgtgctctcagctggattggaaaaggtctctggcaattcatttatggtatctgctgccccccaccgcaagcatttcacgggctctgagtatgtatgaagaagccttccagaatacgagcgactccgaccgctacgcatgctcccctcttcctagctatttggagggatcaggctgtgtgattgcagaagaacagaacagccagacaccccttcgtgacgtgtgttttcatttgctgaagctttactccgattctattcgcgagaaggccgtcagagaactgctgactcgtcactgccagctactggaaacccccgagtcatgggcaaaggagacatttttgactcagaagctacgtgtgcctgctaaatggatacacgaggctaaagccgttcgcgcccacatggaaagcgataagcatttagaggcattgtgcctgttcaaggccgagcactggaatcggtgccataaactaattattagacacctggcctccgatgccattatcaatgaaaattacgactatttgaaaggcttcctggaggacctcgctcctccagaaaggtcatcgctcatccaggactgggagacctcaggcttggtctaccttgattacattagggtgattgagatgctgcggcacattcagcaggtggattgctccggtaatgacttagagcagctgcatatcaaggtcacttcactttgtagtcgcattgagcaaattcaatgttatagcgctaaggatcgtctagcccaaagcgatatggccaagcgggtcgctaatctgcttcgcgtcgttctctcactgcaccacccccctgatcggacatctgacagcacaccagacccacagagggtgccgctccgactgctggccccccacattggtaggttgcccatgcctgaggattatgccatggacgaactcagatccctcactcagagctatctacgggagctcgccgttgggtccctttag

SEQ ID NO: 127171 - DNA, 4917 bp, synthetic construct
  misc_feature 1..4917: note = Description of Artificial Sequence: Synthetic coding sequence
  source 1..4917: mol_type = other DNA
atgttcaataaatcctttggaacgcccttcggtgggggtaccggaggttttggaaccacgtccacgttcgggcagaataccgggtttggcacaactagtggcggcgcttttggcacttccgcattcggatcctctaacaataccggcggactgtttggcaattcccagaccaagcccggaggtttgttcggcacctctagtttcagccagcccgcaacatccacaagcacgggctttggatttggaaccagcaccggcaccgccaatactctatttggaacagcatcgacaggcacctcccttttttcttcccaaaacaacgcattcgcacaaaacaagccaaccgggttcggtaacttcggaacatcaacttccagtggcggtctgttcgggacgactaacaccacgtccaacccttttggctctacctctggcagtttattcggtccctcctcattcactgcagctcccacagggacaactatcaaattcaatccccctacaggtactgatacgatggtgaaagccggtgtttcaacgaatattagcacaaagcatcagtgcatcaccgcaatgaaggagtacgagtccaagtccttggaagaattgcggctggaagactaccaggcgaatcgcaagggtccacagaatcaagtaggcgccggcacaaccacaggcttattcgggagcagtcctgccacgtcatctgcaactggcttattttcctcttctacaaccaattcaggatttgcttacggacagaacaagactgccttcggtactagtactactggatttgggacaaaccccggcgggctctttggccagcaaaaccaacagacaacgtctctcttttccaaacctttcggccaggcaaccacaacacagaacactggcttttccttcgggaacacatctacaatcggtcagccatctaccaacacgatgggactgttcggcgtaacccaggcaagccagcccggaggccttttcgggacagccaccaacacctccactggaaccgccttcgggaccggcactggcctgtttggacagaccaatacaggttttggcgctgtaggctctaccttattcggtaacaacaagttgaccacttttggcagctccaccacatccgccccaagttttggtaccaccagtggcggtctctttggatttggcactaatactagtggcaatagcatctttggctccaagcctgccccaggaacgctgggaaccggactgggagcaggctttggtactgccctgggcgcaggacaggccagcctgtttggaaacaatcagcccaagatcggtgggcccctaggaaccggggcttttggcgcccccgggtttaacaccaccaccgccacactcgggttcggggccccacaagctcccgtcgctctaacagatcccaacgcttctgctgctcagcaggccgtcctgcagcaacacattaattctttgacctattcccccttcggtgactcccccctcttccgtaatccaatgtcggaccctaaaaagaaggaggagagactgaagcctaccaacccagctgcccagaaggccctaacaacacctacccactataaactgacccctaggccggccacaagggtccggccaaaagcgctgcagaccactggcactgccaagtcacacctgttcgatgggttggatgacgacgagccatctctcgccaacggggcttttatgccgaaaaaatctatcaagaaactggtattgaagaatcttaataattcgaatctctttagcccggtgaaccgcgattcggagaatttggcgtcaccgtccgagtaccctgagaacggtgagcggttcagttttctcagtaagcccgtggatgaaaaccatcaacaagatggcgacgaggacagcctggtttctcacttttacacaaaccctatcgccaagccgatccctcagacccccgagtctgctggtaataagcatagcaacagtaatagcgtggatgacactattgtcgctctcaatatgcgcgctgccctaagaaatggcctggagggaagctccgaagaaacctcattccatgatgagagtctgcaggatgatcgggaagagatcgagaacaactcttaccacatgcatcccgctgggatcatcctgactaaggttggttattatactattcccagcatggatgatctggcaaagatcaccaacgagaaaggcgaatgtatcgtcagcgacttcacaattggacggaagggatatggtagcatatatttcgaaggtgacgtgaatcttactaacctcaatctagatgacattgtacatatcaggcgcaaagaagtcgtggtatatctagacgacaatcaaaaaccacctgtaggagaagggctgaataggaaggccgaagttacactggatggggtgtggcctaccgacaaaactagtaggtgtctcataaaatcgccggaccggttggccgacattaattacgaggggcgcctggaagccgtcagtaggaagcagggcgcccagtttaaggagtatcggcccgaaaccggcagctgggtgttcaaggtttctcacttcagcaaatacggcctgcaggacagcgatgaagaagaggaggagcatccgtctaaaacatccaccaagaagctgaagacagcacccctgccacccgcatcccaaactactccattacagatggccctaaatggtaagcccgccccaccaccccagtctcagagtcctgaagtcgaacagctgggacgagtcgtagagctagactctgatatggtggacatcactcaggagccagtgctcgatacgatgctggaagagagtatgcccgaggatcaggagccagttagcgcatctacgcacatcgcaagcagcctaggtattaacccacacgtcctacagataatgaaggccagccttcttaccgatgaggaggatgtcgacatggcactggaccaacgctttagccgcctgccaagcaaggcagatacctcccaggaaatctgctctccccggttacctatctctgcatcccacagctctaagacaaggtcgttggtaggtggactcctgcaaagcaaattcacatctggagcattcttgtccccctccgtctccgttcaggaatgccgcaccccccgggcagcctctctgatgaatattccgtccacttcctcttggtccgttccgccacccctaacctccgtctttacaatgccctcacccgcgcctgaggttccattgaaaaccgtcggaacccgaaggcagcttgggctggtgccccgcgagaagtccgtgacatatgggaaaggcaagctgctgatggacatggctctatttatggggcgctccttccgcgtgggatgggggcccaattggaccctggctaatagcggggaacagctgaatggcagccacgagttggaaaaccaccagatcgccgatagcatggagtttggttttctccccaacccagtcgccgttaagccactcacagaaagtcccttcaaagtgcatttagagaagttaagcttacgacaaaggaaacccgatgaagacatgaagttatatcagactcctcttgaactgaaactgaagcactccacagtccacgtggacgagctgtgtcccctaattgttcctaatttgggtgtcgccgtgatacatgactacgccgactgggtgaaagaggcgagtggtgacttgccagaagcgcaaatcgtcaaacactggtctctcacctggactctgtgcgaagctctttggggtcacctgaaggaactggacagccaactgaacgagcctagagagtacatacaaattttagaaagacgacgcgccttctcacgttggctgtcatgcacggccactccgcagatcgaagaggaggtgagcctgactcagaagaactcacccgtggaagcggtgttttcatatctgaccggcaagaggatctcagaggcctgcagtctcgcccagcagtctggagaccatcggctggcccttcttctctctcagttcgtgggtagtcagagcgtgcgagagctcttgacaatgcagttagtggattggcatcaattacaggctgacagctttatacaggatgaacgcctacgcatattcgccctcttggctggaaagcccgtgtggcaactcagcgaaaagaaacaaatcaacgtgtgcagccaattggactggaagaggtcgcttgcaattcacctgtggtacctcctcccacccacagcctcaatctcaagggctttgtccatgtatgaagaagcttttcagaacaccagtgactccgaccggtacgcatgttctcctctgccatcatatctcgagggatccggatgcgtgattgcggaggaacagaattctcagaccccgctcagagatgtctgcttccacctccttaagctatatagtgatagcattagagagaaagccgtgcgagaacttctgacccgtcactgtcaactgcttgagacgcctgagtcctgggctaaggagacatttttaacgcagaaacttcgcgtgcctgccaagtggatacatgaggctaaagccgtgagggcccacatggagagcgacaagcatctggaagctctgtgtctgttcaaagccgaacactggaatcggtgccacaagctgatcatccggcatctggcgtcggacgcaatcattaacgagaactacgattacctgaaaggctttctcgaggacctcgcaccccctgagaggagctccttgattcaggactgggagaccagtggactggtgtacttggattatatccgcgttatagaaatgctgcggcacatccagcagatagccctcttctgtgtggaatggatcgcccaagtcatgacctggagttcttatacttccaaatag

SEQ ID NO: 127172 - DNA, 2763 bp, synthetic construct
  misc_feature 1..2763: note = Description of Artificial Sequence: Synthetic coding sequence
  source 1..2763: mol_type = other DNA
atgttcaacaaatcttttggaaccccattcggaggcggcactggaggatttgggacaacgagcacctttggtcagaatactggctttggaaccacatctgggggggcattcggaaccagtgcctttgggagctctaataacacaggtggactgttcggtaatagccaaaccaaaccgggaggtctgttcggcacttcttccttctctcaaccagccacaagcacctcaaccggatttggattcggaacatccaccggtacagctaataccctcttcggcacggcttccacgggcacgtcccttttttcctcacagaataacgccttcgcgcagaataaacccacagggttcgggaactttggcacatcaacctcttcaggcgggttgtttgggaccactaacaccactagcaacccattcgggtctacctccggcagcctcttcggacccagctctttcactgcggcgcccacgggcacaacgattaagtttaatccacctactggaaccgataccatggtaaaggccggcgttagtacaaacatctccacaaagcaccaatgtataactgcaatgaaagagtatgaatctaaatccttggaagagctccgtttggaagattatcaggccaatcgaaaggggccacagaatcaggttggcgctggcaccacaaccggactgttcgggagttcacccgctacatccagtgccacaggcttattttcatcctccaccactaacagtggattcgcctacgggcagaacaagacggccttcggaacttcaacgactggatttggaaccaaccctggggggttgtttggccaacagaatcagcagactacgtccctcttttctaagccctttggacaagcgacaactactcaaaataccggatttagcttcgggaacacttcaaccataggacaacctagcaccaacacgatgggtctgtttggcgttacacaagcatctcagcctggcggcctgttcggcacagccaccaacactagtacaggcactgcctttggcactggtactggattatttggccagactaatactggatttggcgccgtaggctctactttatttgggaacaacaagctcaccacattcggctccagcacaaccagcgccccaagctttggcaccacttctggcggattgtttggcttcgggactaatactagcggcaattcaatttttggtagcaagcctgcaccaggaacactcggcaccggactgggggctggattcggaacggccttgggggccgggcaagcgtcgctctttgggaataatcagcctaagattgggggtcctctgggcacgggcgcattcggtgcccccgggttcaacactacaaccgcgacactgggattcggtgccccgcaggctcccgtggcattaactgaccctaacgcctccgctgcgcagcaggctgtgttacagcaacacatcaacagtctgacttatagccccttcggcgactcgcccctattccggaatcccatgtcagatcccaaaaagaaagaggagaggttgaagcccaccaacccagcagctcagaaggcactgaccacaccgacccactacaagctcacaccccgccccgcaaccagagtgcgtccaaaggcgctccagacaaccggtactgccaaatcccacttgtttgacgggctggacgatgatgagcccagcttagcaaacggcgcttttatgcccaagaagagcatcaagaagttggtgctgaagaaccttaacaattcaaatcttttcagcccagtgaaccgcgatagtgagaacttggcttctccttccgaataccctgagaacggagaaaggtttagctttctctcaaagcctgtggatgagaaccatcagcaggacggggatgaagacagcctggtgagtcacttttacacgaaccccatagccaaaccaataccacagacaccagaatctgcagggaataagcattccaactccaactccgtcgacgacaccattgttgctctcaatatgcgggcagccctgaggaacggcctggaaggatcgagcgaagagacatcattccatgatgagtcactccaggatgatagagaagagatcgaaaacaacagctaccacatgcatccagcaggaattatcttgaccaaggtgggctactacaccattccaagcatggatgatctcgcgaagatcacaaacgagaaaggagagtgcatagtcagtgactttaccattgggcggaagggatatggaagcatctacttcgaaggggacgtgaacctgaccaatctgaacctagacgatattgtccacatccgccgtaaagaagtggtggtctatctagatgacaatcaaaaaccccccgtaggagaaggactgaaccgaaaggctgaagtcaccctggatggagtgtggcccacagataaaacctcacggtgtctgataaagtctcctgatcgactggcagacatcaattacgaaggccgcctggaagctgtgtcaaggaagcagggagctcaatttaaagagtacagaccagagacaggctcatgggtgttcaaggtgtcacacttcagtaagtacggcttgcaagattctgacgaggaagaggaggaacacccgtctaagactagtaccaaaaagttgaaaactgccccacttccccctgcatcgcagactactcctctacagatggctctgaacggaaagcccgcaccaccaccccaggtggagaagaagggacaatag

SEQ ID NO: 127173 - DNA, 2814 bp, synthetic construct
  misc_feature 1..2814: note = Description of Artificial Sequence: Synthetic coding sequence
  source 1..2814: mol_type = other DNA
atgtttaataaatcattcggcactccgtttggaggcggtaccggcggatttgggactacgtccacgtttggccaaaacaccggctttggaaccacgagtggtggagccttcggtacaagcgccttcggatcctcaaataatacaggcgggctatttggaaacagtcagaccaaacccgggggtctctttggtacaagcagcttctcccagccagccacttccacaagcaccggctttggatttggaacatccacagggacggctaacacacttttcgggaccgcgagtactggtacttcactcttttcgagtcagaataacgcctttgcccagaacaagcctacggggttcggaaactttgggacaagcaccagctccggcgggcttttcggcactacgaatacaacctctaatcccttcggcagtactagtggctctctctttggccccagtagcttcacggccgcacctacaggaaccacaattaaatttaacccaccaacaggcacggatactatggtgaaagcaggcgtgtcgaccaacatttcaactaagcaccagtgtatcacagcgatgaaagagtacgagtccaagtcccttgaggagctcaggctggaagattatcaggcgaataggaagggacctcaaaaccaggtcggtgcaggaacgacgactggcttgtttggcagttcacctgccacctccagcgccaccggccttttcagttcttcgaccaccaattctggcttcgcttacggtcaaaacaagacagcctttggtacatccactacaggattcggcacgaaccctggcgggcttttcggtcagcagaatcagcaaacaaccagcctcttctctaaaccatttggacaggcaaccacaacacagaacactggcttttcattcggcaacacctcaacaataggccagccttcaactaacaccatggggctgttcggtgttacacaggcaagccagccaggaggcctgttcggtactgccacgaatacctccacaggcaccgcattcgggactggcacagggctatttggtcaaacaaataccggcttcggggccgtggggagcaccctttttggaaataataagctgaccacatttggctcatctactacatcagcaccttcattcggtacgactagcggtggactgtttggcaacaaacctaccctgacgcttgggactaacactaatacatccaatttcggattcgggactaacacatcaggcaacagcatttttggcagcaagcctgctcccggcacgctcggaactggcctcggtgcaggattcggaaccgctttgggtgctggccaggccagcctgttcggaaataatcaacctaaaattgggggaccacttggtactggagcttttggggctcccggattcaatactactacagccacactaggctttggagcccctcaagcccccgtggccctcacagaccccaatgcaagcgcggcacagcaagcagtactgcagcagcacattaatagccttacatactccccttttggtgactctcctctattcagaaacccgatgtcagatcccaagaaaaaggaagaacggctcaaacccaccaaccctgccgcgcagaaggccttgacaacgccaacacattacaagctgacgcccagacccgctaccagagtcaggcccaaggccctgcagaccacaggcactgcgaagtcgcacttattcgacggattggacgacgacgagccctctctggccaacggggcctttatgcctaagaagagtatcaagaagctggtgcttaaaaacctgaataactcgaacttgttcagccctgtgaatagagattctgagaacctcgctagtccaagtgaataccctgagaacggagagcgcttttcctttttgtccaaacctgttgacgagaatcaccagcaggacggggacgaggacagcctggtttctcacttctataccaaccccattgcaaaaccgatccctcagacccccgaaagtgcgggaaataaacattctaacagtaactccgtggacgacacaattgtcgcactgaacatgcgagctgcactgaggaacggcctggaaggtagcagcgaagaaacgtcgtttcatgacgaaagcctccaagacgatcgggaagagatcgagaacaattcttatcacatgcaccccgccggcatcattcttaccaaagtcggctactatacgattccatccatggatgacctggccaagatcacgaatgagaaaggcgaatgcatcgtttctgactttaccatcggacgcaagggttatggtagtatatactttgagggcgacgttaacttgactaacctgaacctagacgatatagtccatatacggcggaaagaggtggtggtgtatctcgacgataatcaaaaacctccagtgggagagggcttaaatcggaaggctgaggtgacgttggacggagtatggccaacggacaagacatcccgatgccttatcaaatcacccgacaggttggcggacattaactatgaggggcggctggaagcggtgagtcggaagcagggtgcccaattcaaggaatatcggcctgagactggttcatgggtgtttaaagtgtcccatttttccaaatacggtttacaggatagtgatgaagaagaggaggagcacccaagtaaaacaagcaccaaaaagctaaaaactgctcccttgcctcccgccagccagaccacccctcttcaaatggcacttaacggcaaaccggctccacccccgcaagtcgagaaaaaggggcagtag

SEQ ID NO: 127174 - DNA, 1731 bp, synthetic construct
  misc_feature 1..1731: note = Description of Artificial Sequence: Synthetic coding sequence
  source 1..1731: mol_type = other DNA
atgtctaccgggtttagctttggaaccggggcttcttctaatcctagtgttggactaaatttcggaaatctcggcagcacgagcacccccgcgactacctccgcaccatcaagcggttttggaaccggactgtttggttcgaagcctgccaccggcttcacactggggggtaccaacaccggaatcgcaactacaattactacgggactgaccctgggtacgcccgcgacaacctctgcagctactacgggcttctccctgggctttaataaacctgctgcctcggccacaccattcgctctgcctatcacaagtacaagcgcttccgggctcactttgagttctgctctgacctcaacccccgctgctagcactgggtttacactgaataacctgggcgggacaacagctactacaactactgcgtcaacagggctgtctctggggggtgctcttgccggccttggcggaagcctgttccagtccacaaatactggaacctcaggacttggccagaatgcccttggtcttactttaggaaccacggcggcgacctcaaccgccgggaacgaagggcttggtggcattgacttctccagctcttcagacaagaaatctgacaagacgggcactagacccgaagatagcaaagccttgaaggacgaaaaccttccccctgtgatttgtcaggatgtggagaacctgcagaagtttgtgaaagagcagaaacaggtgcaagaggagattagccgaatgtccagtaaagccatgctgaaagtgcaggaggacattaaggcgttgaaacagctgctgagcctggctgctaatgggatccaacggaatacccttaatatagataagctaaagatcgaaacagcccaggaactaaagaacgctgagatcgctctgcggacccagaagacaccccctgggctacaacatgagtacgccgctcccgctgactatttcaggatcctggtgcagcagtttgaagtgcagttacaacagtaccggcaacaaatcgaggaactcgaaaaccatctggccacccaggcaaataacagtcacatcacccctcaggacctctctatggctatgcagaagatttaccagacctttgtggctctggccgcccagctccagagcattcacgaaaacgtcaaggtcttaaaggagcaatatctgggctataggaagatgttccttggggatgcagtcgacgtgtttgaaacaagaagagcggaagcaaaaaagtggcagaacaccccaagagtcacgacaggtcctacacccttcagtactatgccaaacgccgctgcggtggctatggccgcgactctgacacaacaacaacagccagccacaggtccccagcctagcctgggcgtatcatttggaaccccttttggatcagggattggcacagggcttcagtcctctggactcggatcctctaatctcggcggttttggcaccagctccggctttggatgctctaccactggagcctcgaccttcggatttggtacaactaataagccatccggctctctctcagccggctttggaagttcctctacatccggatttaacttctctaaccccggcatcacagcctctgccggcctgacctttggggtctcaaatcctgcatcagcaggctttggtactgggggtcagctgttgcagctgaaaaaaccccctgctgggaacaagaggggaaagcggtag

SEQ ID NO: 127175 - DNA, 1764 bp, synthetic construct
  misc_feature 1..1764: note = Description of Artificial Sequence: Synthetic coding sequence
  source 1..1764: mol_type = other DNA
atgtctaccggttttagtttcgggtcgggaacactgggctccactacagtggcagccgggggcacgagcacagggggagtattcagcttcggcactggagccagttctaatccatcggtcggtctcaactttgggaaccttggctccacctcaaccccagctaccacatctgccccatcgagcggattcggtacaggcttattcggctcgaagcccgctactggttttacattgggtggaactaacacaggaaccccggccaccactagcgccgcaaccactggcttcagtcttggttttaacaaacccgccgctagtgcgacaccgttcgctctccctatcaccagtaccagtgctagtggactgactctcagctctgccctgacgtccaccccagccgcaagtaccgggttcacactgaataatctcggcgggacaacggctaccaccacaactgccagcaccggcttatcactcggcggagccctggccggcctgggagggtcgctgttccagtccacaaatactggcacttcagggctgggccagaacgcactggggcttacgctgggcacaacagccgccacaagcaccgccggaaatgaaggactcggaggcatcgacttctcatcgtcttcagacaaaaaatctgacaaaactggcacgcgcccggaggacagcaaagctctgaaggacgaaaatctgccacccgtcatatgccaggacgtcgaaaacctgcaaaagtttgtcaaggaacagaaacaggtgcaggaagagatcagcaggatgtctagtaaagctatgctgaaggtacaagaggacattaaggccttgaaacagctactgtccctcgcagctaacggtatccagagaaacactttaaacatagacaaactgaaaattgagacagcccaggagttaaaaaacgccgagatcgcgttgcggacccagaaaacaccaccaggattacaacatgaatatgccgctccggcggactacttcaggatcctcgtgcagcagttcgaagtccagctgcagcagtatcggcagcaaatcgaggaactcgagaaccacctcgctactcaggcgaacaactcacatatcacccctcaggatctatctatggctatgcagaaaatctaccagacatttgtggccttggccgcacagctacaaagtatccatgaaaacgtcaaggtcttaaaggagcagtacctggggtataggaagatgttcctgggggacgccgtggatgtgttcgaaacccgcagggccgaggcaaagaagtggcaaaacaccccacgagttacgaccggcccaactccattttctacaatgcctaatgccgcagctgtggctatggctgccacgctcacacaacagcagcaaccagcgactggcccccagccgtcactgggcgttagctttggtacaccgttcggatctggcatcgggacaggcctgcagtcctccggcttgggctcttctaacctgggaggctttggcacttctagtggcttcggttgtagtactacgggcgcaagcactttcggatttggtacaaccaacaagccatctgggagcctgagcgccggatttggatcatcaagcacatccggattcaatttttccaatcccggaatcactgcctcagccggtttgacatttggggtctcgaatcctgctagcgctggattcggcaccgggggtcagctcctccagctcaagaagccccccgccggcaacaaacgaggaaagaggtag

SEQ ID NO: 127176 - DNA, 1800 bp, synthetic construct
  misc_feature 1..1800: note = Description of Artificial Sequence: Synthetic coding sequence
  source 1..1800: mol_type = other DNA
atgtcaactgggtttagcttcggcagtggcacacttggttctactactgtggcagctggcggtacctccactggtggagtatttagttttgggactggagcctccagcaacccatcggtaggcctgaacttcggaaatctcggaagtaccagcacccctgccaccaccagtgcccccagctcaggatttggaactggactgttcggaagcaagcctgctaccggattcactctgggaggcacaaacaccgggatcgcaacgaccatcactacaggcttgaccctgggcactcctgccactacttccgctgccacaacagggtttagtctaggcttcaataagcctgctgcgagcgccacaccattcgccctccccataacgtcaacgtccgccagcggcctgactctgtcaagcgccctgaccagtaccccggccgcttcaactggattcaccctgaataatttgggagggacaaccgcaactactacaactgccagcacaggcctgagcctgggaggcgctctggctggattagggggctcactatttcagtccacaaacaccgggacatccggacttggccagaatgctttgggccttacacttggcaccactgcggccacctctactgccggaaacgaagggctcggaggtattgatttttcctcctcctccgataagaagagcgacaaaactggaacacgaccagaggatagtaaagcgttgaaagacgagaatctgccccctgtaatctgccaggacgttgaaaacctgcaaaaatttgttaaggaacagaagcaggtgcaggaggaaatttctagaatgtctagtaaagcaatgctgaaggtgcaagaagatattaaagcactaaagcagcttctgagtctcgccgcaaacggaatccagcggaataccttgaatatagacaaattgaaaatcgagaccgcccaggaattaaaaaacgctgagatcgctctaaggacacagaaaacacctccgggtctgcagcacgaatatgcggcgccagcagactactttcgcattctggtacagcagttcgaggtgcagttgcagcagtaccgccagcagattgaggaactcgaaaaccatttggcaacccaggccaataattcacatattacgccccaggacctgtcgatggcaatgcaaaaaatttaccagacgtttgttgcactggcggcccagctccagtccatccatgaaaacgtgaaagtcctcaaggagcaatatctgggttaccgcaagatgtttttaggtgatgcggtggatgtttttgaaactagaagggccgaagcaaagaagtggcagaacacgccgagggtcaccaccggacctacaccttttagcacaatgccaaatgccgccgcagtcgccatggcagccacattgacccaacagcagcagcccgcaactggcccccagccgagcctgggcgtatctttcggaactccatttggatcagggatcgggaccggactgcagagtagtggcctcggcagctctaatctcggtggctttggcaccagcagcgggttcggctgtagtaccactggggcaagcacattcggcttcgggacgaccaataagccctcggggtctctgtctgccggctttggatcgtcaagcacatctggctttaatttttcaaatcctggcatcaccgcctctgcggggctcacgttcggcgtttcaaacccagcttccgccggttttgggaccggaggacagctgttacagcttaagaagccaccagccgggaataagcgcggaaagcgatag

SEQ ID NO: 127177 - DNA, 1515 bp, synthetic construct
  misc_feature 1..1515: note = Description of Artificial Sequence: Synthetic coding sequence
  source 1..1515: mol_type = other DNA
atgtccactggcttcagtttcggttcaggaactctgggcagcaccactgtggcagccggcggcacctcaacaggaggcgtgttctcctttggaactggcgcgtcttcaaatccttctgtgggccttaactttggcaatttgggctccacaagcactcccgccaccacaagtgcaccatctagcggatttgggactgggctttttggctccaagcccgccacggggtttactctgggtgggaccaacactggaactccagcaactacgagtgccgccactactggcttctctctgggctttaataaacccgccgctagcgccactccattcgctctgcctatcacttcaaccagcgcgtccggactcacactctcttctgcattgacgtcaacacctgccgcaagtactgggtttacactgaacaacctgggaggtaccactgcaactaccacaacggcgagtacaggtttgagcctcggcggggctcttgccggcctgggcggctccctctttcaaagtactaacacaggcacgagtgggcttggtcagaatgctctcggattaactctaggcactactgccgcaacctctaccgccggaaacgaaggcctgggtggtatcgacttctcttctagcagcgacaaaaagtcagataaaacggggacaagacccgaggactcaaaggccttgaaggacgagaacctgccaccggtgatttgccaggatgtcgagaacctgcagaagttcgttaaagaacagaaacaggtgcaggaggagattagcagaatgagttctaaagcaatgctcaaggtgcaagaagacatcaaggcattaaaacaactgttgagcctggcagcaaatggcatacagcggaatacattgaatatcgacaagcttaagatcgagacggctcaggagctcaaaaacgccgagatagccttacgcactcagaagaccccaccagggctgcagcacgagtatgccgcaccagccgattactttcgcatcctcgtgcaacagttcgaggtgcagcttcaacagtaccgtcagcagattgaagagctagaaaaccatctggccactcaagccaataactctcacatcactccacaggacctgtcgatggcaatgcagaagatttatcagacgtttgtcgcattggccgcacaattgcaaagtatccatgaaaatgtaaaagtgctgaaagagcagtacctaggctaccgcaaaatgtttttaggcgatgccgtggatgtgttcgaaacaagacgtgcggaagctaagaaatggcagaacacaccgagagtcactactggccctactccgttttcaaccatgcctaatgccgccgcagtggccatggccgcaactctcacgcagcagcaacagccagctaccggagataagtggtgtaacgttgccgaactcaaaaaccgcacacagctgagtctctttgtgaacaaactggaattatcctgttactgcgtgatcgacctgctctacaacgaacagtag

SEQ ID NO: 127178 - DNA, 1458 bp, synthetic construct
  misc_feature 1..1458: note = Description of Artificial Sequence: Synthetic coding sequence
  source 1..1458: mol_type = other DNA
atgtcaacgggattcagctttgggtccggaacactaggctctaccactgttgccgccggaggaacatctaccggtggggtgttctcttttggtaccggggcctcttctaatccttccgtgggtttaaacttcgggaacctcggtagcaccagcacacctgccacaacaagcgcgccaagctccggctttggaacaggactctttggtagtaagccggctacaggcttcaccttggggggcacaaacaccggaatagccaccacaattactacaggactgacgctgggaacgccagccacaacatccgcagccactactgggttcagtctggggttcaataagcccgccgcctctgcaacacccttcgcgctacccattacctctacctcggccagcggtttgactctctcttctgcattgacctctaccccggccgcttctacaggcttcactctgaacaatctcggagggacaacagccaccaccactaccgcttctacaggactgagcctcgggggcgctctagctggtctcggcggctctctctttcaatccactaacactggcaccagcggacttggtcaaaacgctctcgggctcacgctgggcacaactgccgccacttccaccgcaggtaatgagggcctcggggggattgatttcagctcaagtagcgacaaaaagtctgataaaaccggaactcgccccgaggattctaaggctctgaaagacgagaatctaccgcccgtcatctgccaagacgtggaaaatttgcagaaattcgtcaaagagcagaagcaggtgcaggaagaaatctctcggatgtctagcaaagccatgctcaaggtgcaggaagatattaaggcccttaagcagctgctgtccctggccgccaacggaattcagaggaatactcttaatatcgataaactgaaaattgaaacagcacaggagctcaagaatgcggaaatcgctcttagaacccagaaaacccctccgggcctgcaacacgagtatgcagccccagccgactatttcagaattctggtccagcagtttgaagtgcagcttcagcagtataggcaacaaatcgaggaactggaaaaccaccttgccacgcaagccaacaattcccatatcaccccacaggacctgtcgatggccatgcagaaaatttaccagacctttgttgctctggccgcgcagcttcagagcattcacgaaaatgtcaaagtcttaaaggaacaatatctgggatatcggaagatgttcttgggcgatgccgtggacgtctttgagacccggcgtgctgaggccaagaagtggcagaataccccaagagttaccacaggccctactcctttttctactatgccaaacgccgctgccgtggccatggccgccactttgactcaacagcagcaacctgctaccgggttaaacgcgttcaaactgtag

SEQ ID NO: 127179 - DNA, 1308 bp, synthetic construct
  misc_feature 1..1308: note = Description of Artificial Sequence: Synthetic coding sequence
  source 1..1308: mol_type = other DNA
atgtccgggttcctggaagaactcctcggggaaaagctcgtgacaggtggtggcgaagaagtggatgtgcactctttaggtgcaagaggaatcagcctccttggcctctacttcggttgctccctttccgccccgtgtgctcagctgagcgcaagccttgccgcattctacgggcggcttagaggcgatgctgcggccggcccggggcccggcgctggggccggtgccgccgcagagccggaacctcggagaaggctcgagatcgtcttcgtctctagtgaccaagatcagcgtcagtggcaggatttcgttcgcgatatgccatggcttgcgctcccatataaagaaaagcaccgcaaactgaaactgtggaacaaatatcgcatttctaacatcccaagtcttatattcctggacgccacgacaggtaaagtcgtgtgtcgcaacggacttctggtcatacgagatgatcctgaaggcctcgaatttccatgggggccaaaaccctttagggaggttatcgcaggaccccttcttcggaataacggccagtctcttgaaagcagctccctcgaaggaagccacgtaggggtttatttttctgcccactggtgccccccgtgtcgatccttaacacgggtgcttgtcgagtcataccggaaaattaaggaggcaggccagaatttcgagatcatcttcgtgagcgctgatcgatcggaggagtcttttaagcagtacttctccgaaatgccttggcttgccgtgccctacacagacgaggcccgcagatcaaggctgaacagactctatggtatccaaggcatccctacgctgatcatgctcgacccccagggggaagtgattacccgccagggccgtgtggaggtcctcaacgacgaagactgtcgcgagttcccgtggcaccctaagcccgtcctggaactctccgacagtaatgctgcacaactcaacgaggggccctgcctggtcttgttcgtggattcagaagatgacggggagagtgaggccgccaagcagctgatccagcccatagctgaaaaaatcatcgcaaaatacaaagcaaaggaggaagaggcacctctgctcttctttgtggctggcgaagacgacatgactgacagcctgcgtgactacacgaatctgccagaagccgccccgctactaactatcttagatatgtctgccagagcgaagtacgtgatggacgtggaggaaatcactcccgcaatcgttgaggcctttgtgaatgactttctggccgagaaactgaaacctgaaccaatttag

SEQ ID NO: 127180 - DNA, 984 bp, synthetic construct
  misc_feature 1..984: note = Description of Artificial Sequence: Synthetic coding sequence
  source 1..984: mol_type = other DNA
atggcggatgtgagcctccatagaaatccagcgacactgaaattatggaacaaatataggatctccaatatcccttcactgatattcctggacgctaccaccggcaaggtcgtttgtcggaatgggctccttgtgatccgggacgaccctgagggcctggaatttccatggggccctaaaccatttcgggaagtgatcgccgggccacttctgcggaacaacgggcagtccctggagtcttcctctctagaaggcagccacgttggggtctattttagtgcccattggtgcccaccttgcagatcactgaccagagtcttagttgagagctacaggaagatcaaagaagcagggcaaaacttcgagattatcttcgtgtcagccgaccgtagtgaagagagtttcaagcagtacttcagcgaaatgccctggctggctgtcccttataccgatgaggccaggcgctcacggctgaacaggctctatggcattcagggaatcccaaccctcataatgctggatccacagggagaagtgataactaggcaggggagggtggaagtcctgaacgacgaagactgtagagagtttccttggcacccaaagcctgttctggaattgtccgattccaatgccgcacagctcaacgagggtccctgcctggtcctctttgttgactctgaagacgatggcgaatctgaagcagctaagcaactgatccaacccatcgcagaaaagataatcgctaagtacaaagccaaggaggaagaggcacctctactattcttcgtcgctggggaggatgacatgacagactccttgcgggattacactaatctccccgaggccgcccccctccttacgatcctagacatgtccgcgcgcgcaaagtatgtgatggacgtggaagaaataacgcccgctattgtggaagcattcgtcaatgattttctggctgagaagctgaagcctgaacctatctag

SEQ ID NO: 127181 - DNA, 381 bp, synthetic construct
  misc_feature 1..381: note = Description of Artificial Sequence: Synthetic coding sequence
  source 1..381: mol_type = other DNA
atgccttggctcgccgtgccatataccgacgaagcccgacgtagcagactcaaccgactgtacggcatccaagacagcgaggatgacggcgagtctgaggctgcgaaacagctgatccagcccatcgcggagaagatcatcgcgaaatacaaggccaaagaagaggaagcccccctcctgtttttcgtcgccggggaagacgatatgactgacagcttaagagactacacgaacctgccagaggctgccccattactaacgatcttggacatgtccgctagagccaaatacgtgatggacgtggaagagatcacgcccgcgatagtcgaagcctttgtgaacgatttcctagctgagaaactcaaacccgaaccaatctag

SEQ ID NO: 127182 - DNA, 984 bp, synthetic construct
  misc_feature 1..984: note = Description of Artificial Sequence: Synthetic coding sequence
  source 1..984: mol_type = other DNA
atggccgacgtctctctgcaccgtaacccggccactctcaaactgtggaacaaatatcgcatcagcaacattccaagcttgatcttcctggatgcgacaacaggaaaggtggtgtgccggaatggactgcttgttatccgtgacgatcctgaagggttagagtttccctggggtcccaagccattcagggaggttatcgccgggccactgcttcgcaacaatggccagagtctcgaatctagtagcctcgagggaagccacgtcggcgtttacttctctgcccactggtgtcctccatgtcggtccctgacccgggtgctggtcgagagctatcgcaagatcaaagaggccgggcagaacttcgagattatcttcgtaagcgcagaccgctcggaggagtcgtttaaacagtatttcagcgaaatgccatggctggccgttccttataccgacgaagccagaagatcaagattgaaccgcctgtatgggatccagggaataccgacactgataatgctcgacccccagggcgaggttattaccaggcagggccgggtggaagttctgaacgatgaagactgcagagaatttccatggcacccaaagcccgtactggagcttagcgacagcaacgccgcacaattaaatgagggtccctgtctagtgttgttcgtggatagtgaagacgacggtgagagcgaagccgctaaacaacttattcaacccattgctgagaagataatcgccaagtataaggccaaagaagaagaggcccctttgttgtttttcgtggcaggggaggatgatatgacagacagtctacgggattacacaaacctgcccgaggctgccccactcttgacaatcttagatatgagtgcccgggctaaatacgttatggacgtagaggaaataacccctgcgatagtcgaagctttcgtgaatgattttttggccgagaagctgaagccagaaccaatttag

SEQ ID NO: 127183 - DNA, 1176 bp, synthetic construct
  misc_feature 1..1176: note = Description of Artificial Sequence: Synthetic coding sequence
  source 1..1176: mol_type = other DNA
atggctgatatcgataacaaggagcaaagcgagttggaccaggacctggatgacgtcgaggaggttgaggaggaggagaccggggaagagaccaagctgaaagccaggcagctgactgtgcagatgatgcagaatccccagatcctggccgcacttcaggaaaggctcgatggtttggtggaaacccctacaggttatatcgagtctcttccaagagtggtcaaaaggagggtgaatgcgcttaagaatctgcaggtaaaatgcgcccagatagaggccaagttctacgaggaagtgcacgacctggaaaggaaatacgccgtgctgtaccaacctctgttcgacaaacgttttgaaatcatcaacgctatctatgagccgacagaagaagagtgtgaatggaagcccgacgaagaagatgagatctccgaagaacttaaggaaaaggctaagattgaggacgaaaaaaaagatgaagaaaaggaggaccccaaaggtattcccgaattttggctgacagtctttaagaatgtggacttgctgtcagatatggttcaggagcatgatgagcccattttgaaacacctgaaggacatcaaggtgaaatttagtgacgccggccaaccaatgagtttcgtcctcgaattccattttgagccgaatgagtacttcactaacgaagtgctgaccaagacgtaccgtatgcgctcagaaccagacgacagtgatcccttctctttcgatgggccggagattatgggctgtaccggctgtcaaatcgactggaagaaagggaagaacgtaacgctgaagactatcaagaagaaacagaagcataaagggagaggtaccgtgagaactgtaaccaagacagtgagcaacgattcattttttaactttttcgcgcctcctgaagtgccagaatcaggtgaccttgacgatgatgccgaagctatactggcagctgactttgagatcgggcattttctccgtgaaagaatcattccacgttcagtattgtatttcacaggcgaggctatcgaagatgatgatgatgactacgatgaagagggggaagaggcggacgaagagggagaggaagagggtgatgaggaaaatgaccctgattatgatccaaagaaagatcagaatcccgccgaatgtaagcagcaatag

SEQ ID NO: 127184 - DNA, 1176 bp, synthetic construct
  misc_feature 1..1176: note = Description of Artificial Sequence: Synthetic coding sequence
  source 1..1176: mol_type = other DNA
atggccgacatcgacaacaaggagcagagcgagctcgatcaggatctcgacgacgtggaagaggtcgaagaagaggagactggagaggaaacaaaactgaaagctaggcaattaaccgtgcagatgatgcaaaacccgcagattctcgctgcactgcaagaacgcctggacggactggtggaaactccgactggatacattgagagccttccacgcgttgtgaagcgtcgcgttaacgcactaaaaaatctgcaggtgaagtgcgcgcagatcgaagcaaaattctatgaagaagtgcacgacttagagcggaagtacgccgtactgtaccaacccctctttgacaagcgattcgaaatcattaacgccatttacgagcccacggaagaagagtgcgagtggaaacctgatgaagaggatgagatctccgaagagttaaaagaaaaagccaagatagaggacgaaaagaaagacgaggagaaggaggatccaaaagggatacctgagttctggttaacggtctttaaaaacgtggatctgctgtctgatatggtgcaagaacacgatgagcccattctaaaacatctgaaggacatcaaggttaaatttagcgacgccggacaaccgatgtcatttgtattggaattccattttgagcccaacgagtatttcacaaatgaagtgcttaccaagacatataggatgagatccgagcccgacgactccgatcccttttcctttgatgggccggaaatcatgggctgcaccggttgtcagatcgactggaaaaaaggaaaaaacgtgacacttaagactatcaagaagaagcagaaacataagggcagggggaccgtcagaacggtgacaaaaacagtcagcaacgatagcttctttaatttctttgcaccccccgaagttcctgaaagcggtgacctggatgatgatgcggaggctatattggcggccgactttgagattggccatttcctacgtgagaggattattcctagaagcgtgctctacttcacaggcgaggcaatcgaagacgatgatgacgactatgacgaggaaggagaagaagccgacgaagagggtgaggaagagggtgatgaagagaatgacccagattatgacccgaagaaggatcagaatcccgccgaatgcaagcaacagtag

SEQ ID NO: 127185 - DNA, 972 bp, synthetic construct
  misc_feature 1..972: note = Description of Artificial Sequence: Synthetic coding sequence
  source 1..972: mol_type = other DNA
atgatgcaaaaccctcagatcctggctgcgcttcaagaacgcctcgacggcctggtagaaacaccgacaggctatatagagagcttgccccgggtcgtgaagcgacgcgttaatgccctgaagaacctgcaggtcaaatgtgcccagatagaagctaagttttacgaggaggttcacgacctagagagaaagtacgccgtgctgtatcaaccactttttgacaaggaggagcttaaggaaaaagcaaaaattgaagacgaaaagaaggatgaagagaaggaagaccctaagggaattccggaattttggctgacagtttttaaaaatgttgacctcctttctgacatggtgcaggaacacgatgaacccatcttgaaacatttgaaagatattaaagtcaaattttccgatgcaggccagcccatgagcttcgtgcttgaattccattttgagccgaacgaatacttcactaacgaggtcctcactaaaacatataggatgcggagtgagccagacgacagcgaccctttctctttcgacggccctgaaattatgggatgcacaggatgccagatcgattggaaaaaaggcaagaatgtcaccctcaagaccatcaagaagaagcagaagcacaaaggaagaggaaccgttaggacagtgactaagacggtgtccaacgatagtttctttaacttcttcgcccccccagaggtgcccgaatctggagacctcgatgatgacgccgaagccatcctagctgccgacttcgagatcggtcacttcctgagagaaagaattattccgcggtctgttctgtactttaccggcgaggccatagaggatgacgacgatgattatgatgaagaaggagaagaggccgacgaggaaggcgaagaggagggcgatgaagagaatgaccccgattacgaccctaagaaagaccagaatcccgctgaatgtaagcagcaatag

SEQ ID NO: 127186 - DNA, 1050 bp, synthetic construct
  misc_feature 1..1050: note = Description of Artificial Sequence: Synthetic coding sequence
  source 1..1050: mol_type = other DNA
atgatgcagaatccgcaaatcctggccgccctgcaggagcgtctggacgggctcgtcgaaacacccactgggtacatcgaaagcttaccacgtgtggtgaagagaagggtgaatgcccttaaaaacctgcaagtgaaatgcgcccagatcgaggcaaaattctacgaggaggttcatgacttggaaagaaagtatgctgtgctgtatcagcctctgtttgacaaacgtttcgagattattaatgctatctatgaaccgaccgaggaggagtgtgagtggaagcccgacgaggaggacgagatttccgagcttaaagagaaagccaagattgaagacgaaaaaaaggacgaggagaaagaagaccctaaggggatccctgagttttggttgacagtctttaagaatgttgacctgttgagcgacatggtgcaagaacatgacgagccaatcctaaagcatcttaaggatatcaaagtcaagttcagtgatgccgggcagcctatgtccttcgtgttggaattccatttcgaacctaacgagtattttacaaatgaggtgctgacaaagacttaccgtatgcggtcggagccagacgatagcgatcctttctcattcgacgggccggaaatcatggggtgcaccggatgccagattgactggaagaaagggaaaaatgtcaccctcaaaactattaaaaaaaagcagaagcacaagggaaggggaacagtgaggactgtgaccaaaaccgtgtccaatgatagctttttcaatttcttcgccccccctgaggtgcctgagagcggcgatctcgatgacgacgccgaggctatcttggcagcggattttgagataggccatttcttgagagagagaattattcctcggagtgtgctttattttacaggcgaagctatcgaggacgacgatgatgattacgacgaagaaggcgaagaggccgatgaagaaggagaggaagaaggtgacgaggagaacgaccctgattacgatcccaagaaagatcaaaaccctgctgagtgcaagcagcagtag

SEQ ID NO: 127187 - DNA, 627 bp, synthetic construct
  misc_feature 1..627: note = Description of Artificial Sequence: Synthetic coding sequence
  source 1..627: mol_type = other DNA
atggtccaagagcacgacgaacccatattgaaacatttgaaagacatcaaagtgaaattctccgacgccggccaacctatgagctttgtgctggaattccactttgagccaaacgagtatttcaccaacgaggtgctgacaaagacatacaggatgaggtcagaaccagatgatagcgatcccttcagcttcgacggccctgagattatgggctgcacgggctgtcagatcgactggaaaaaaggtaagaatgttacactcaaaaccataaagaagaagcagaagcacaagggaagaggaaccgtcaggacggtgacgaaaactgtaagcaacgattccttttttaattttttcgcccccccagaggtgcctgaatccggcgacctggacgacgatgctgaggctatcctggccgcggatttcgaaatcggccacttccttcgcgaacggattatcccccgctcagtgctgtattttacaggcgaggcaattgaagacgacgacgatgattatgatgaggagggcgaagaggctgacgaagaaggggaggaagaaggcgacgaggagaacgaccccgattacgaccccaagaaagaccagaatccagccgagtgtaagcaacaatag

SEQ ID NO: 127188 - DNA, 987 bp, synthetic construct
  misc_feature 1..987: note = Description of Artificial Sequence: Synthetic coding sequence
  source 1..987: mol_type = other DNA
atggcagatatcgacaatttaccaagggtcgtgaaacgaagagtaaatgcactgaagaatctccaggtgaaatgtgcacaaattgaggctaaattttatgaggaagtgcatgatctggagaggaaatacgcagtcctatatcagcccctgttcgacaagcgatttgagataatcaatgctatttatgaacctactgaggaagaatgcgagtggaaaccagatgaggaggacgagatctctgaggagctcaaagagaaggcaaagattgaggacgaaaagaaggatgaagagaaagaggatccaaagggtatacccgaattctggttgaccgtgtttaagaatgtagacctgctctctgacatggtccaggagcacgatgagccgattctgaagcacctcaaggacataaaggttaaattcagcgatgcgggtcagcccatgtcttttgtgcttgagtttcacttcgagccaaatgagtattttactaatgaggtcctgaccaagacataccgcatgagatcagaacccgacgacagcgaccccttctctttcgacggccctgagatcatggggtgcactggctgccaaatcgactggaaaaagggcaagaatgtaacactcaaaactataaagaagaaacagaaacataaggggagggggacggtacgcaccgtcaccaaaacggtgagcaacgattctttcttcaattttttcgccccccccgaggtgcctgagtctggagacctggacgacgacgccgaggcgattctcgccgccgacttcgaaattggccattttctgcgcgagcggatcatcccaaggtccgtcctgtactttacgggcgaggccattgaggatgatgacgacgattacgacgaggagggggaggaagcggacgaggagggggaggaagagggagacgaggaaaacgatcccgattacgaccccaaaaaggaccagaatcccgcagagtgcaagcaacaatag

SEQ ID NO: 127189 - DNA, 1107 bp, synthetic construct
  misc_feature 1..1107: note = Description of Artificial Sequence: Synthetic coding sequence
  source 1..1107: mol_type = other DNA
atggccgacatagataataaggaacagagtgaactcgaccaagatcttgacgatgtggaggaagtggaggaagaggagaccggggaagagaccaagctgaaggctagacaattaacggtgcagatgatgcagaatcctcagatcctggcggcgttgcaggagagactcgatggtcttgtggagaccccaaccggctatatcgagagtctcccgcgggttgtaaagcggcgggtcaatgcccttaagaatctccaggtaaagtgtgctcagatcgaagcaaagttctatgaagaagtccacgatctcgaacgcaaatatgccgtcttataccagcccttattcgacaaaagattcgagattataaacgctatctacgagccaacggaagaggaatgcgaatggaagccagatgaggaagacgagatctccgaggagctgaaggagaaagccaaaatagaagacgaaaaaaaagacgaagaaaaggaggaccccaaagggattccagagttttggctgaccgtgttcaagaatgtcgacctgctttccgacatggtgcaagagcatgatgaaccaatactgaagcatctgaaggatattaaagttaaatttagtgacgccgggcagccaatgtccttcgtcctcgagttccatttcgagccgaatgagtactttacaaacgaagttctgacaaaaacctacagaatgagaagtgaaccagacgatagcgatccattctcctttgacgggcctgagattatgggctgtactggctgccaaatcgactggaaaaaggggaaaaacgtgactctcaagactatcaagaaaaagcagaaacacaaaggcagaggaaccgtgcgaaccgttactaagactgtgtccaatgactctttcttcaatttcttcgccccccccgaagtgccagaaagtggggacctggacgacgatgcagaggccatccttgctgccgattttgaaatcggtcacttcctgcgggaaaggatcattcctcgctccgtgctgtactttaccggtgaggcaattgaagacgacgacgacgactacgatgaagagggggaagaggcagacgaagtgatgtttactaaatag

SEQ ID NO: 127190 - DNA, 795 bp, synthetic construct
  misc_feature 1..795: note = Description of Artificial Sequence: Synthetic coding sequence
  source 1..795: mol_type = other DNA
atggccgatatcgacaacaaagagcaaagtgagctggaccaggatctggatgatgtggaggaagtcgaagaggaggagactggtgaggagacaaaactcaaagcccggcaattgactgtacagatgatgcagaatccacaaatcttggctgcgcttcaggagcggctggatggactcgtggagacaccaacgggttatatcgagtctctcccccgagttgtaaaacgcagggtgaacgctttgaaaaatctgcaagtaaaatgcgcccagattgaagcaaagttttacgaagaggtgcatgacctggagcggaagtacgcggtattatatcaacctttgttcgacaaacgatttgaaattatcaatgccatctatgagccaactgaagaagaatgtgagtggaagcccgatgaagaggacgagataagtgaagagcttaaagaaaaggccaagatcgaagacgaaaaaaaggatgaggaaaaggaggatccaaaaggtattccagagttctggctcacggtgtttaagaacgtcgacttgctgtcagatatggtgcaggaacacgacgagcccatcctgaaacacttaaaggatatcaaggtgaagttcagcgacgctggacagccgatgtcgttcgtgctcgagttccacttcgagccaaacgagtatttcacaaacgaggtcctaacaaaaacatatcggatgcgcagcgaacccgacgactctgatcccttttctttcgatggaccagagatcatggggtgcaccggatgccaaatcgactggaaaaagtag

SEQ ID NO: 127191 - DNA, 1158 bp, synthetic construct
  misc_feature 1..1158: note = Description of Artificial Sequence: Synthetic coding sequence
  source 1..1158: mol_type = other DNA
aaggagcaaagcgaactagatcaggatttggatgatgtagaggaagtggaggaggaagagacaggagaggaaaccaaactgaaggcacgccagctgaccgttcagatgatgcaaaatccccagattttggcagccctgcaagagagattggacggacttgttgagacccccacgggctatatcgaatccttgccacgggttgtgaagcggcgcgtgaatgctcttaagaacttgcaggtgaagtgcgcgcagatcgaggccaagttttacgaggaagtacacgacctggaaaggaagtacgcagttttatatcagcccttatttgacaagcggtttgaaattattaatgcaatctacgagcctacagaggaggaatgtgagtggaagcccgatgaagaagacgagataagtgaagagctgaaggaaaaagcaaagatcgaggatgaaaagaaagatgaggaaaaggaggatccaaaagggattcctgagttctggttgactgtgtttaaaaatgtggacttgctgtctgacatggttcaggaacacgacgaaccgatcctcaagcacctgaaggatatcaaagttaaattcagcgatgccggtcaaccaatgtcctttgtgctggagttccacttcgagccaaatgagtacttcacgaacgaagtgttgaccaaaacttatcgtatgagatcagagccagacgattccgatcccttttctttcgatggcccggaaattatggggtgtaccggatgccaaattgattggaagaagggtaaaaacgtgacccttaagactattaaaaagaaacagaagcacaagggccgtgggacagtgagaacagtgacgaaaactgtcagtaacgactctttctttaatttttttgcccctccggaggtcccagagtctggagacttggatgacgatgccgaggcgatcttggcggcggattttgagattggacacttcttgcgcgaacgaattatcccccggagtgtgctctacttcacaggggaggcaatcgaggatgacgatgacgactacgacgaggaaggcgaggaggcggacgaagagggtgaggaagaaggagacgaggagaatgaccctgactacgacccaaaaaaggatcagaatcccgccgagtgcaaacagcagtag

SEQ ID NO: 127192 - DNA, 1521 bp, synthetic construct
  misc_feature 1..1521: note = Description of Artificial Sequence: Synthetic coding sequence
  source 1..1521: mol_type = other DNA
atggccgaagcagacttcaagatggtcagtgagcccgtcgcgcatggggtggcggaggaggaaatggccagcagtactagcgacagcggcgaggagtctgactcttcaagctcttccagttccacttctgactcatcgagttcatcttctacatccggtagctcctcgggaagcggtagctcttcctctagctccggcagtacttcaagccgttcccgcctgtataggaagaagcgagttcccgagccctcccgcagagcgcggcgtgcccccctagggaccaacttcgtggatcggctgccccaggccgtcagaaaccgtgttcaggctctcaggaacattcaggacgagtgcgacaaggtggataccctgttcctgaaggccatccatgatttggagcgcaaatatgccgagctaaacaaacccctctatgataggaggtttcaaattatcaatgcagagtacgaacctaccgaggaggaatgtgagtggaattccgaagacgaagagttcagcagtgacgaggaggtgcaggacaataccccaagcgagatgcccccattggaaggggaagaggaggaaaaccctaaggaaaatcctgaggtgaaagccgaggagaaagaggtcccaaaggaaattcctgaggttaaagatgaagagaaagaggtgcccaaagagataccagaggtgaaagcagaagaaaaggcagattctaaagattgcatggaggccaccccagaggtcaaggaggacccaaaggaggtgccccaagtgaaagctgatgacaaagaacagccaaaagccacagaagcaaaagcccgagccgccgttcgcgaaacacataagagggtccccgaggagcgcctgcaggacagcgtcgacctgaagcgggcgagaaaaggtaagcccaagcgggaggacccgaagggcatccccgactactggctgattgtcttgaaaaacgtagataagctcggacctatgatccagaagtacgacgagcccatcctgaaattcctgagcgacgtgtctctgaagttctccaaacccgggcaaccggtatcatatacattcgaatttcactttctacctaacccctattttcgcaatgaagtcctggttaagacgtacattattaaagctaagcccgatcataatgatccctttttcagctggggctgggagattgaggattgtaagggttgcaagatagactggcgaagaggcaaagatgtgacggtcaccactacacagtctcgcaccactgctaccggggaaatcgaaattcaaccaagagtggtgcccaacgcatcatttttcaacttcttctctcctcctgagatacctatgataggcaagctggagcccagagaagacgccatacttgatgaagatttcgagatcggccaaatcttgcacgacaatgtgatcttaaaatccatctactactacactggcgaagtgaacggaacctattatcagtttggcaagcattacggaaacaagaaataccgcaaatag

SEQ ID NO: 127193 - DNA, 1500 bp, synthetic construct
  misc_feature 1..1500: note = Description of Artificial Sequence: Synthetic coding sequence
  source 1..1500: mol_type = other DNA
atggtgtccgagcctgtagcacacggggtagctgaggaagagatggcctccagtacatcagactcaggcgaggaaagcgacagttccagttcgtcctcttccacctcagactcctcctcctcctcatcgacaagcggttcttcatccggtagcggttccagcagctcatcgtctggaagtacaagcagccgttctagactttatcgcaagaaacgcgtgcccgaaccctcacgacgcgcccgacgcgcccctctaggaacaaattttgttgatcggctgccccaggcggtgaggaacagggtacaagccctgaggaatattcaagacgaatgcgacaaagtagacacgctgtttctgaaggctatccatgatcttgaaagaaagtatgccgaactcaataagccactgtacgacagacgatttcagatcatcaatgctgaatacgagccaacggaggaggagtgtgaatggaacagcgaagatgaggagttctccagcgacgaagaggttcaagacaataccccttctgagatgccgcccctcgagggagaggaagaggaaaaccccaaagaaaatcccgaggtgaaggccgaggagaaggaagtgccgaaggaaataccagaagtaaaagacgaggagaaggaggtgcccaaagaaattccagaagtaaaggcagaagagaaggcggactccaaagattgcatggaggctacccccgaagtcaaggaagatccaaaagaagtgccccaggtgaaggcggatgacaaagagcagcctaaagccacagaggccaaagctcgtgccgcggtgagggagacccataagcgcgtgcctgaggagagattgcaggactccgtggacctgaaaagggccaggaaaggcaaaccaaaacgggaggatcctaagggaattcctgattactggctaatagtcctgaagaatgtcgataaactgggccccatgatacagaaatacgatgaaccaatcctgaagtttttgtccgacgtatccctgaagttttccaagcctggccagcctgtgtcgtacacctttgaattccattttttgcccaatccatattttagaaatgaggtgctggtgaagacttacatcatcaaagccaaacctgatcacaacgatcccttctttagctggggctgggaaattgaggattgcaaaggctgcaaaattgattggcgcagaggaaaggatgtgacagtcactacaacccagtcccggacaactgctacaggggaaatcgaaattcagcctagggtcgtgcccaacgcctcattcttcaacttcttcagcccaccagagatccccatgatcggaaaactggaaccaagagaagacgccattctagatgaggatttcgaaatcgggcaaatccttcatgacaacgtgatcctaaaaagtatatactattacactggggaagttaacggaacatattaccaattcgggaagcattacgggaataagaaatatcggaagtag

SEQ ID NO: 127194 - DNA, 1128 bp, synthetic construct
  misc_feature 1..1128: note = Description of Artificial Sequence: Synthetic coding sequence
  source 1..1128: mol_type = other DNA
atggccgaccactccttttccgacggtgttccgagcgacagtgttgaagctgcaaaaaatgcctcgaacactgaaaaactgactgatcaggtgatgcagaacccacgggttttagccgccctgcaagaaaggcttgacaatgtgccccacaccccatcaagctacattgagacacttcccaaagcagttaagagacgcattaatgcactgaagcagctgcaggtaaggtgcgcccacatcgaggcgaaattttatgaagaggtccacgatctggaaaggaagtacgccgcactgtatcaacccctctttgacaagcgaagagaattcattaccggtgatgttgagcctacggacgctgaatccgagtggcattccgagaatgaggaagaagagaagctggccggcgacatgaagtcaaaagtggtggtgactgaaaaagccgcggccactgcagaggaacccgacccaaaaggcattcccgagttctggtttacaatatttcgaaacgtggacatgctttctgaattggttcaggagtatgacgagccgatcctgaaacatctgcaggacataaaagtgaagttctcagaccccggtcagcccatgagttttgtgctagaatttcatttcgagcctaacgactacttcaccaacagtgttctgacaaagacctacaaaatgaaatcagagcctgataaagccgacccattttcattcgagggcccagaaattgtggattgcgatggatgtaccatcgattggaaaaagggcaagaatgtgaccgtaaagaccatcaagaaaaagcagaagcataagggtcgtggcacagtgaggacaatcaccaagcaagttccgaatgagtccttcttcaacttcttcaaccccctcaaggcttcaggggatggagagagcctagacgaggacagtgaattcacccttgcttccgacttcgagatcggccacttcttccgcgaacgcatagtgcctagggctgtgctctacttcaccggagaagccatcgaggatgatgataactttgaagagggtgaggaaggcgaagaggaggaattggagggggacgaggaaggggaggacgaggatgatgcggagataaatcccaaagtgtag

SEQ ID NO: 127195 - DNA, 1161 bp, synthetic construct
  misc_feature 1..1161: note = Description of Artificial Sequence: Synthetic coding sequence
  source 1..1161: mol_type = other DNA
atggcagatcacagtttttctgatggcgtgccttcagactcagtggaggccgccaaaaacgcgtcaaacactgaaaagctaacagaccaggtgatgcagaatccaagggtcttagcagctttgcaggaacgactagataacgttccccatacccccagtagctacattgagactcttcctaaagctgtcaaaaggagaattaacgcgttaaagcaactgcaagtaagatgtgcccatattgaggcgaagttctacgaggaggtacatgatctggagcgcaagtatgccgccctctaccagcctctgtttgataagcgtagagaatttatcaccggagacgttgagcctactgacgccgaaagcgagtggcactcagaaaacgaggaggaagagaagttggccggggatatgaagtccaaggtggtggtgaccgagaaagcagccgcaaccgccgaagagcccgatcctaagggcatcccggagttctggttcacaatcttccgcaacgtagacatgttgagcgagctggtgcaggagtacgacgagccgattctcaagcacctgcaggacattaaggtgaaattcagcgatccaggccagcctatgtcttttgtgctcgagtttcacttcgaaccaaatgattacttcaccaattccgtcttgacaaaaacatacaagatgaaatctgagccggataaggcagatccgttcagctttgaggggccagagattgtggattgcgatggttgtacaattgattggaaaaagggcaaaaacgtgactgtgaagaccataaaaaaaaagcagaaacataaaggccgcggcaccgtgcgaactattaccaaacaagtgccaaacgaaagtttctttaacttttttaaccccctgaaggggaaagggcagtcgaagtcgaaggatgaagattccgaatttacactggccagtgactttgaaataggccatttcttcagagagagaatcgtgccgcgtgccgttctctatttcacaggtgaagccatcgaagacgacgacaatttcgaagaaggcgaggaaggcgaagaagaagagctggaaggcgatgaggagggggaagacgaggatgatgctgagataaaccctaagaaagagccatcgcagccggcggaatgcaagcaacagtag

SEQ ID NO: 127196 - DNA, 537 bp, synthetic construct
  misc_feature 1..537: note = Description of Artificial Sequence: Synthetic coding sequence
  source 1..537: mol_type = other DNA
atggctgaccactccttttccgatggtgtacccagtgacagtgttgaagccgcgaagaatgcatctaataccgaaaaacttactgatcaggtcatgcaaaatccaagagtactcgctgctctgcaagagaggctcgacaatgtgccacatacaccatcgtcctacattgagaccctgccgaaggccgtcaaacgcagaattaacgccctgaaacagctacaagtccgatgtgcacacatcgaagctaaattttacgaagaggttcacgatctggaacggaagtacgccgccctgtatcagcctctgtttgacaagcggagagagtttataacgggtgatgtggaacccaccgatgcagaatcagagtggcattctgagaatgaagaagaagagaagcttgcaggcgacatgaaatccaaagtcgtggtcacagaaaaagctgccgctaccgcggaagaacccgatcccaagggaatccccgagttctggtttacgatattcaggaatgttgatatgctcagcgaactggttcaatag

SEQ ID NO: 127197 - DNA, 1161 bp, synthetic construct
  misc_feature 1..1161: note = Description of Artificial Sequence: Synthetic coding sequence
  source 1..1161: mol_type = other DNA
atggccgatcacagttttagcgacggggtccctagcgacagcgtggaagcagcaaagaacgcttcaaacactgaaaaactgacagaccaagtgatgcagaatccacgtgttctggctgcactccaggaaaggctggataacgtcccccatacacctagctcctatatcgagaccctccccaaggccgtgaagcgacggatcaatgctctgaagcagttgcaagtccgctgtgcccacatcgaggccaaattctacgaggaggttcacgacctggaacgaaaatacgcagccctttaccagcccctatttgataaaagacgcgaattcatcacaggtgatgtggagcccaccgacgccgagtccgaatggcatagtgagaatgaagaagaagaaaagctggcgggcgatatgaaaagcaaagtggttgtgaccgagaaagcggccgcgaccgccgaggaaccagacccaaagggcattcctgaattctggtttactatcttccgcaatgtagatatgctcagcgagctggtgcaagagtacgatgagcccatccttaagcacctacaggatatcaaagttaaattctccgatcccggacagccaatgagctttgtcctggaatttcacttcgagccaaacgattatttcactaatagcgttctgacaaagacctacaagatgaaaagcgagcccgataaggccgatccattttcgtttgaaggccccgaaatcgtagactgcgatgggtgcaccatagattggaagaagggcaagaacgttacagtaaagaccattaaaaagaagcagaagcacaagggcaggggtactgtccgcactatcacaaagcaggtgccaaacgagtccttttttaactttttcaacccattgaaagcctcgggagatggggagagcctagacgaagacagtgagttcaccctggcctctgacttcgaaatcggtcatttctttcgggaaaggattgttccacgtgccgtactgtatttcaccggagaggcaatcgaagacgatgataacttcgaggagggagaagagggtgaggaggaagagctcgaaggcgacgaagaaggggaggacgaagacgacgccgaaatcaaccctaaaaaagagccttcccagcctgccgaatgtaagcagcagtag

SEQ ID NO: 127198 - DNA, 387 bp, synthetic construct
  misc_feature 1..387: note = Description of Artificial Sequence: Synthetic coding sequence
  source 1..387: mol_type = other DNA
atggcggaccacagtttttcagacggagtgccctcagactcagtggaagctgctaagaatgctagtaacaccgagaaactgacagaccaggtgatgcagaatcctagggtgctggccgcactacaagagaggctagataatgtgccccatacaccttcttcatatatcgaaaccctcccaaaggcagtcaagagacggataaatgcgctcaagcagcttcaagtaagatgcgcccacatcgaagccaagttctatgaggaagtgcacgacttagaaagaaagtatgctgctctttatcaaccactgtttgacaaacgacgcgagttcattactggagatgtggaacctactgacgctgagagcgagtggcattcagagaatgagtag

SEQ ID NO: 127199 - DNA, 423 bp, synthetic construct
  misc_feature 1..423: note = Description of Artificial Sequence: Synthetic coding sequence
  source 1..423: mol_type = other DNA
atggccgaccatagctttagcgatggcgtgccttctgattctgtggaggccgccaaaaacgcgagtaacacagaaaaattaacagaccaggtgatgcagaatcccagagttctggctgctctacaagaacggctagacaacgtgccacacactccttcctcctacatcgaaacactccccaaggccgtgaaacggcgcatcaacgccctgaagcaactccaagtgagatgtgcccatattgaagcaaaattctacgaggaggttcacgacctagagcgaaagtatgccgccctttatcagcccctgttcgataaacgccgcgaattcatcacaggagatgtggaacctaccgatgctgaatccgaatggcactccgagaacgaagaggaagagaaactggccggagatatgaagtcaaaatag

SEQ ID NO: 127200 - DNA, 402 bp, synthetic construct
  misc_feature 1..402: note = Description of Artificial Sequence: Synthetic coding sequence
  source 1..402: mol_type = other DNA
atggcagatcatagctttagtgatggcgtcccatccgacagtgtggaggctgcaaaaaacgccagcaacactgagaaattaacggaccaggtgatgcagaatcctcgagtcctcgcagcactgcaagaaaggctggacaatgtacctcatacgccctcttcgtatatcgaaactctacccaaggccgtgaaacgtcgtattaatgccctaaagcagctccaggttcggtgtgcgcatattgaagcaaaattttacgaggaggtgcacgacttagaacgcaaatatgcagccctgtaccaaccactgttcgataaacggcgggagtttatcacaggtgatgttgaacctactgacgctgagagcgaatggcactccgagaacgaggaagaggagaaactatag

SEQ ID NO: 127201 - DNA, 324 bp, synthetic construct
  misc_feature 1..324: note = Description of Artificial Sequence: Synthetic coding sequence
  source 1..324: mol_type = other DNA
atggctgatcactcctttagtgacggcgtcccaagtgattctgttgaagctgcaaagaatgcgagcaacaccgagaagttgactgatcaagtgatgcagaatccacgcgtgctggctgcccttcaagaacgtcttgataatgtgccacacaccccatcgtcttatatcgagacactgcctaaggctgtgaagcggcggatcaatgccctgaaacaactgcaagttcggtgcgcacatatcgaggcgaagttctacgaggaggtgcatgatctggagagaaaatacgctgccctataccaaccactgttcgataagagacgttag

SEQ ID NO: 127202 - DNA, 237 bp, synthetic construct
  misc_feature 1..237: note = Description of Artificial Sequence: Synthetic coding sequence
  source 1..237: mol_type = other DNA
atggctgaccattcctttagcgatggtgttccatctgactcagttgaggctgctaagaatgcaagcaacaccgagaaactgaccgaccaagtgatgcaaaacccacgggtattagccgcgttgcaagaacggctggataacgtgccccatacacctagtagttacattgaaaccttaccgaaggctgttaagagacgaattaatgcactgaaacagctgcaagtcagatgtgcttag

SEQ ID NO: 127203 - DNA, 549 bp, synthetic construct
  misc_feature 1..549: note = Description of Artificial Sequence: Synthetic coding sequence
  source 1..549: mol_type = other DNA
atggcagattcagagaatcaagggccggcagaaccttctcaggcggccgcagccgccgaggcagctgccgaggaagtgatggctgaaggcggtgcacagggtggtgactgcgacagtgctgctggagatcccgattctgctgccggccagatggccgaggaaccccaaaccccagctgagaacgctcctaaacccaaaaacgatttcatagagagtctgcccaacagcgtgaaatgtcgggtgctggcgctgaaaaaacttcagaagcggtgtgacaagattgaggccaagtttgataaagaattccaagcacttgagaagaagtacaatgatatctacaagcctttgctagcaaaaattcaggaactcacaggagagatggaggggtgtgcctggacgctggaaggcgaagaagaagaggaagaggaatatgaggacgatgaagaggagggggaggacgaggaggaggaggaggccgccgccgaggctgcagcgggggctaagcacgacgacgctcacgctgagatgcctgacgatgccaagaagtag

SEQ ID NO: 127204 - DNA, 438 bp, synthetic construct
  misc_feature 1..438: note = Description of Artificial Sequence: Synthetic coding sequence
  source 1..438: mol_type = other DNA
atggctgattcagagaatcagggccctgccgaaccaagccaggcggcggcagcagctgaggccgcagccgaggaggtgatggcagagggtggggcccaaggaggggactgtgacagcgccgccggcgaccctgactcagccgccgggcagatggccgaggagcctcagaccccagcggaaaatgcgcccaagcctaagaatgatttcattgaatcactccctaattccgttaaatgtcgcgtattagccttgaagaagctacagaaacggtgcgataaaattgaggctaagtttgataaagaattccaagctctggagaaaaaatacaatgacatctacaaacccttactggcaaagatccaggagctgacaggggagatggaaggctgcgcctggactttggaaggcgaggagagacgtaagcgagtaaggggctag

SEQ ID NO: 127205 - DNA, 963 bp, synthetic construct
  misc_feature 1..963: note = Description of Artificial Sequence: Synthetic coding sequence
  source 1..963: mol_type = other DNA
atggaggaagtgccacatgattgccccggggctgacagcgcccaggctggcaggggcgcctcctgtcaaggctgcccaaaccagcggctgtgcgcctcaggagctggtgctacccccgacacagcaatcgaagagataaaagaaaagatgaaaaccgttaagcataaaatcttagtcctgtctggcaaaggcggcgtgggtaagtctacatttagcgcccacttagcccatggcttagcagaagatgaaaacactcagattgcacttctggacatagacatctgcgggccatctatccccaaaataatgggccttgagggggagcaggtccatcagagcggttcgggctggtctccggtttacgtagaagataatctgggagtgatgtccgtgggctttctgctgtcttcccccgatgatgccgttatttggcgcgggcccaagaagaacggaatgattaagcaattccttagggatgtcgactggggggaggtggattacctgatcgttgatactccccccggtacatcggatgaacatttgtccgtggtgaggtacctcgctacagcccatatcgatggtgccgtaatcataaccacgccccaggaggtgagcctgcaggatgtcaggaaagaaattaacttctgcagaaaggtgaagcttccaataataggcgtggtagagaacatgtctggattcatctgccctaaatgcaagaaggagtcccagattttccccccgacaaccggaggggctgaactgatgtgtcaggatctggaggtgcccctcctcgggcgagtccccctcgatccattgataggcaagaattgcgataaaggtcagagcttcttcatcgacgcacctgactcgcctgctactctggcgtatagatccatcattcaacgcatacaagagttctgcaacctgcatcagagcaaggaggaaaatttaatctcaagctag

SEQ ID NO: 127206 - DNA, 930 bp, synthetic construct
  misc_feature 1..930: note = Description of Artificial Sequence: Synthetic coding sequence
  source 1..930: mol_type = other DNA
atggaagaggtgccccatgactgtccaggcgcagactctgctcaagctggtcgaggagcgtcgtgccaaggctgccccaatcagagattatgtgcaagcggcgccggggccactccagacacggcgatcgaagaaatcaaagagaaaatgaagacagttaagcataaaattctggtgctgtccggcaagggaggggtcggcaaatcaaccttctctgcccacctggcccatgggttagcagaagacgagaatactcaaattgccctactggatattgatatatgtgggcctagtattcctaagattatgggcttagagggagagcaatatgtggaggataacctgggcgttatgtctgtagggtttttgttgtccagtcccgatgatgccgtgatctggcgcggcccaaagaagaacgggatgatcaagcagttcctgcgggatgtggactggggggaagtagactacctgattgttgacactccaccagggaccagcgacgagcatctgagcgtagtaaggtacctggcaaccgcgcatattgacggagccgttattatcactacgccacaggaagtgagtttgcaagacgtgcggaaagagatcaacttctgtagaaaagttaagttgccaatcataggtgtggttgagaacatgtccggattcatatgccctaaatgtaagaaggaaagtcagatcttccctcccacaactgggggagctgagctgatgtgtcaggatttagaggtgccattacttgggagagtgcccctggaccctttgatcgggaaaaattgtgataagggccagagcttcttcatcgacgcccctgactcacccgccacccttgcttacaggtcaattatccagcgcattcaggagttttgtaatcttcaccagagcaaagaggaaaacttaatcagtagttag

SEQ ID NO: 127207 - DNA, 816 bp, synthetic construct
  misc_feature 1..816: note = Description of Artificial Sequence: Synthetic coding sequence
  source 1..816: mol_type = other DNA
atggaggccgcagccgagcctgggaacctcgctggagtccggcatataatcttggtgctgtccggtaagggtggagtcggcaagagcactatttctaccgaactggctctggcacttagacatgccggtaaaaaagtgggtatcctagacgttgacctttgcggccctagtatccctcggatgctgggagctcagggccgagcagttcaccagtgtgaccgcggttgggctcctgtattcctcgaccgcgagcagtctatttcactcatgagcgtggggttcctgctggagaagcccgatgaagcggttgtttggcgtggaccaaagaaaaatgcacttatcaagcaattcgtgtctgatgtcgcctggggagaattagactacctggtagtggacacaccccccggaacttccgacgaacatatggccacaattgaagccctgcggccatatcagcccctgggggcattggtggttaccaccccacaggcggtctcagttggagacgtaaggagagaactgactttctgtaggaagacagggctccgcgtgatgggaatagtcgaaaatatgagtgggttcacttgccctcactgtactgagtgtacgtctgtcttctctcgtggtggaggcgaagagctggcccagctggcaggtgtgcctttcctcggaagtgtccccctcgaccctgcacttatgcgaacactggaagaagggcacgatttcatacaggagtttccggggtcacctgccttcgctgcacttacaagcatcgctcagaagatcctcgatgcgacccccgcgtgtcttccttag

SEQ ID NO: 127208 - DNA, 393 bp, synthetic construct
  misc_feature 1..393: note = Description of Artificial Sequence: Synthetic coding sequence
  source 1..393: mol_type = other DNA
atggccactatagaggcactgcgtccataccagcccctgggcgcacttgttgtgactacaccccaggccgtctcagtgggagacgtaaggagagaacttacattctgtcgaaaaacaggacttcgcgtgatgggcatcgtcgagaatatgagcggattcacatgcccgcactgcacagaatgcacttccgtcttcagccgcggtgggggagaagaactggcccagctcgccggggtgccatttctcggcagtgttcctctcgaccccgcactcatgaggactctggaagagggacacgacttcattcaagaattccctggttcacccgcgttcgcagccctgacctcaatagcccagaaaatcctggacgctactccagcttgtctgccttag

SEQ ID NO: 127209 - DNA, 960 bp, synthetic construct
  misc_feature 1..960: note = Description of Artificial Sequence: Synthetic coding sequence
  source 1..960: mol_type = other DNA
atgggcatttggcaaaggctcctcctcttcgggggcgttagcctccgcgcgggggggggggcgaccgctccgttaggcggttccagggccatggtgtgcggcagacaactgtccggggcaggatccgagaccctcaaacagcgcagaacgcagatcatgagcaggggcctgccaaaacagaaacccatcgagggagtaaaacaggtgatagttgtagccagcggaaaaggaggagtcgggaagtctaccacagcagtcaatttagccctggccctcgctgctaatgattccagcaaagcaatcggcctgcttgatgtggatgtgtatgggcctagtgtgcctaaaatgatgaatctgaaaggaaacccggaactctcccagtcaaacctgatgcggcctctcttgaattatggcatcgcttgtatgtctatgggattccttgtagaggagagtgagccagtggtatggcgcggcctgatggtcatgagcgctatcgaaaagctgctacgccaggttgactggggacagctggattatctggtcgttgatatgccaccaggcactggtgacgtgcaactgtccgtgtcacaaaacattccaattacaggagctgttatcgtgtccacgcctcaggatatagccctgatggacgcccacaagggcgctgagatgttccgtcgcgtacacgtcccagttcttggactcgttcagaacatgtccgtttttcagtgtcctaagtgtaagcacaaaacgcatatctttggtgccgacggagcccgcaagcttgcccagacattgggtctagaagtgctaggcgacatccctctgcatctgaacatccgtgaagcatccgatacaggccagccaatagtcttttcccaaccagagtcagatgaggctaaggcctaccttaggattgcggtggaagttgtgagaagacttccttctcctagcgagtag

SEQ ID NO: 127210 - DNA, 672 bp, synthetic construct
  misc_feature 1..672: note = Description of Artificial Sequence: Synthetic coding sequence
  source 1..672: mol_type = other DNA
atgtctaaagccatcgggctcctggacgtggatgtgtacggaccgagtgtcccaaaaatgatgaatctgaaagggaacccagaactcagtcagtccaacctgatgaggccgttgctcaactacgggatcgcctgcatgagcatgggcttcctggtagaggagtccgagcctgttgtgtggcgggggttgatggtgatgtccgccattgaaaagctcctgcgccaggtggactggggacagctggattatctcgtggtcgacatgcctcctggcacaggggatgttcagctctccgtttcccagaatattccaatcaccggggccgtcattgtgagcacacctcaggatattgcgctgatggatgcccataagggcgcagaaatgttcagacgcgtgcatgtacccgtgctgggcctggtccagaacatgtctgtttttcaatgtccaaagtgcaagcacaagacacatatattcggagccgatggcgctagaaaactggcgcagaccctggggcttgaagtcctcggcgatataccattgcatctgaacatcagggaggcatccgacacagggcagcctattgtgttctctcagcccgaaagcgatgaagcaaaggcctatttgaggatagcagttgaggtcgtgcgacgactcccttccccctctgaatag

SEQ ID NO: 127211 - DNA, 3123 bp, synthetic construct
  misc_feature 1..3123: note = Description of Artificial Sequence: Synthetic coding sequence
  source 1..3123: mol_type = other DNA
atgggggaggaagggggctccgcatctcacgacgaagaggagagggcctctgtgctgctcggacacagccccggttgtgagatgtgcagtcaggaagcatttcaggcacagagatcacagctggttgagttgctggttagcggatctctggagggcttcgaaagtgtgctcgactggctgctgtcttgggaagtgttatcatgggaggattatgagggcttccacttactcgggcaacctctcagccacttagccagacgactactcgacaccgtttggaataagggcacatgggcctgccaaaaactcattgcagctgcgcaagaagcacaggctgattcgcaaagccccaagcttcacggctgttgggacccccacagtcttcaccctgctcgcgacctgcagtcacatcgcccagccatcgtgcggcggcttcattcacacgtcgagaatatgcttgacttggcttgggagcgtggctttgtctcacagtacgaatgcgacgaaatccgactgcccatctttactccatcgcagcgggcgcggcgtctgctggacctagcaacagtcaaggccaatggattggccgcctttctgctccaacatgtacaagagttaccagtgccccttgctctgccactggaggccgcaacatgtaagaaatacatggcaaagttacgcaccacagtttccgcccagtcccgctttctgtccacctatgacggcgctgagaccctgtgcctggaggacatatacaccgaaaacgtcttggaggtctgggcggatgttggaatggcaggacctccccagaagtcccctgccaccctcggcctagaagagttgttctctactccgggccaccttaacgacgatgctgacacagtgctggttgtcggagaggcagggtctgggaagagcacactcctgcagcggctgcatctcttgtgggctgccggccaggacttccaagagttccttttcgtattccctttttcctgccggcagttacagtgcatggccaagccactctccgtgcgaacattgctcttcgagcactgctgttggcccgatgtcggtcaggaggatatttttcagcttcttctcgaccaccccgatcgcgtactgttaacctttgacggcttcgacgaattcaaattccgcttcacagacagagagcggcattgcagccccaccgaccccacatctgtacagaccctgctcttcaatctgctgcagggaaacctgttgaagaatgcccgtaaggttgtcactagccgacccgccgctgtctcagcattcctgcgcaaatacatccgtacagagttcaacctgaagggattctcagaacagggcatcgagttgtacctgagaaaacgccaccacgagccaggcgtggctgacagactgattagacttctgcaggagacctccgctctgcacggcctgtgtcatttgcctgtctttagctggatggtcagcaagtgtcaccaggaactactgcttcaggagggcggctctcctaaaactacaacagatatgtatttactgattctccaacacttcctactccatgccacacctcctgactctgcatcccagggtctgggcccctctcttctgcgaggtaggctacccacactgcttcatcttggccggttggctctgtggggcctcgggatgtgctgctacgtatttagcgcccagcagctccaggccgcccaggtttcccccgatgacattagtctcgggtttctggtgcgcgcaaagggggtggtacccggctctactgcccctctggaattcctgcacattacattccagtgtttcttcgctgcgttctatcttgctctttctgctgatgtcccccctgccctgttgaggcaccttttcaattgtggccggcccggaaactctccgatggcacgactgctcccgactatgtgcatacaggcttcggaggggaaagactccagcgtcgctgccctgctgcagaaggctgaacctcacaatttacagataaccgctgctttcttagctggtttactgtccagggagcattggggcctccttgccgaatgtcagacaagcgagaaagctctcttacggaggcaagcttgtgctaggtggtgtcttgcacggagcctgcgtaagcacttccactcaatcccacctgctgcacctggcgaagcaaagtcggttcacgcaatgcccggtttcatatggttgatccgcagcttgtatgaaatgcaggaggagaggctagcaaggaaggctgcaaggggactgaacgtgggccatctgaagctgaccttctgctccgtcggaccaactgagtgtgccgccctggcctttgtgctccagcacctcagacgccccgttgcactccagctggactacaacagtgtaggcgacatcggagtggaacagttactcccctgtctcggcgtgtgcaaagctctgtatttgcgggacaataacatttccgatcgtgggatttgtaaactgattgaatgcgccttgcactgtgaacagctgcagaagctcgccttgttcaacaacaagctgactgacgggtgtgctcactctatggcaaagttactggcctgtagacagaattttctggcattgagactcggcaataattatatcactgcagccggcgcacaggtgttggccgaaggacttcgggggaatacgtccctacagtttctgggcttttggggcaatagagttggcgacgaaggcgctcaggctttagctgaggcgcttggcgaccaccagagcctgcggtggctgagtctcgtggggaacaacatcggctctgtgggcgcacaagcgctggctctgatgctcgcaaagaacgtgatgttagaagagctgtgtctggaagaaaaccacctgcaggacgaaggcgtctgtagcctcgccgagggtcttaagaagaactctagcctgaagatcctcaaactgtctaataattgcataacatatttgggtgctgaagccctcctgcaggcccttgagagaaacgatactatcctcgaggtatggctgcgagggaatacattcagcctagaagaagtagataaactcggctgccgcgacactcgtttacttctgtag

SEQ ID NO: 127212 - DNA, 543 bp, synthetic construct
  misc_feature 1..543: note = Description of Artificial Sequence: Synthetic coding sequence
  source 1..543: mol_type = other DNA
atgtggctcctgccccccggtcaagtgtttaatgccttctttccgagtcgactaggcaataattatatcacagcagccggcgctcaagtgcttgctgagggtttgaggggcaatacctcacttcaatttcttgggttttggggcaacagggtgggggatgaaggagcccaagccctcgccgaggctttaggtgaccaccagtcgctccgctggctgtccctggttggtaacaacattggttctgtgggggcccaggcgctcgccctgatgcttgcaaagaacgtgatgttagaggaactctgtctggaggagaaccatctgcaggacgaaggggtgtgctcactggcagagggccttaaaaagaacagctccctaaagatcctgaagttaagcaataactgcatcacatacctgggcgctgaggctttgctccaagccctcgaaagaaatgatactatcctggaagtgtggctgcgcggaaacacgttctcacttgaagaggttgataagctgggctgtcgtgatacaagacttcttctgtag

SEQ ID NO: 127213 - DNA, 1008 bp, synthetic construct
  misc_feature 1..1008: note = Description of Artificial Sequence: Synthetic coding sequence
  source 1..1008: mol_type = other DNA
atggaagacagcggcaagacatttagctctgaggaagaagaagcaaactattggaaagacctagctatgacatataagcagcgtgccgagaacacgcaggaggaattgcgcgaattccaagaaggatctagggagtatgaagctgaactggagactcagttgcaacagattgagaccagaaatcgtgatctcctgagtgagaataatcggttgaggatggaactggagactatcaaggagaaattcgaggtccagcacagcgagggataccgccaaatatccgcactggaggacgatctggcacagactaaagctatcaaggatcagctgcagaaatatatcagggaactggagcaggccaacgatgaccttgaaagagcaaagcgcgccaccataatgagcctggaagattttgaacagcgacttaaccaagcaattgagcggaacgctttcctggagagcgaactggacgagaaagaaaacctgctggaaagtgtccagcgcctgaaggatgaagctcgcgacctgagacaggaactggccgtccaacagaaacaggaaaaaccgcggactccaatgccttccagtgtggaggcagagcgcactgatactgccgtgcaggctacaggctcagtgccatcgaccccaattgcccatcggggaccgtcctccagccttaatacacctggctcctttcgccgggggttagatgactctacaggaggcacccccctgaccccggctgctcgtatttcagcactaaatatcgtgggagatctgcttcggaaagtgggggcgctggagtccaaattagcatcatgccgcaatttggtgtatgaccagagcccaaataggacgggcgggcccgcatctgggcgttccagcaagaacagagatgggggagaaaggcgaccaagctcgactagtgtgcccttgggagataaaggcctggacacatcatgtagatggctatccaagagtactacaagaagctctagctcctgctag

SEQ ID NO: 127214 - DNA, 1041 bp, synthetic construct
  misc_feature 1..1041: note = Description of Artificial Sequence: Synthetic coding sequence
  source 1..1041: mol_type = other DNA
atggaggactccggaaaaactttcagttccgaggaagaggaagcgaattactggaaagaccttgccatgacgtataagcaacgggccgagaatacccaggaagaactcagggagtttcaggagggaagtcgagagtacgaggctgaattggagacacagttgcaacagattgagacacgtaaccgggacttgctttctgaaaataatcgactgaggatggagctggaaactataaaggagaaatttgaggtgcagcactctgagggttacaggcaaattagcgccctagaggacgatttggcccagacaaaggccataaaagatcagctgcagaaatacatcagagagttagagcaagcaaacgacgacctcgagagggctaagcgcgccactatcatgtccctggaagattttgagcagcgtctgaatcaggcgattgagaggaacgcctttctggaatcggagctcgacgaaaaggaaaatctcctggagtcggtgcaaaggctcaaggatgaggccagagatctcaggcaagagctggctgtccagcagaagcaagagaagccaaggactcccatgccctcatccgtagaagcagaacgtacagacacggctgtgcaagctaccggcagcgtccccagtacaccaatcgcccatcgtggtcccagctctagtcttaacacccccggctctttcaggagaggcctggatgacagcaccgggggaactcctctgactccagccgccagaatctctgcattgaatatcgtcggggaccttctgcgcaaagtgggggcactggaaagcaaactggcttcctgcagaaatctcgtatacgatcagagtcccaaccgcaccgggggaccagcatcaggcaggagctcgaagaaccgggacgggggagagcgtcgccccagctccacatctgtacccttgggggataagggattaggtaaaagactggaatttggaaaacctccttcccatatgtcaagctctcctctccctagtgctcagggggttgtgaaaatgctgctctag

SEQ ID NO: 127215 - DNA, 1008 bp, synthetic construct
  misc_feature 1..1008: note = Description of Artificial Sequence: Synthetic coding sequence
  source 1..1008: mol_type = other DNA
atggaagattcaggaaaaactttctccagtgaagaagaagaggctaattactggaaggatttggcaatgacgtacaagcagagagctgagaacacacaggaggaacttcgcgagtttcaggaggggagccgggagtatgaagctgaactcgagactcaactgcaacaaattgaaactcgtaaccgggatctgctgtcagaaaacaaccgactccgaatggaactcgagacgattaaagagaagttcgaagtccagcatagcgagggctaccggcaaatatccgctctggaggacgatttggctcagaccaaagccattaaggaccagctgcagaagtacattcgcgagctggaacaggccaatgacgatttggagagggccaagagagcaacaatcatgagcctcgaggactttgagcaaagattgaaccaggcgatcgaacgcaacgcctttttggagtccgaactagacgaaaaggagaatcttctggaatccgtccagcgcctcaaggacgaggctcgcgacctccgacaggagctggccgtgcagcagaaacaggagaagcctaggacccccatgccttcctcagtagaagcagagcggaccgatactgccgtccaggccactggctccgtcccatccaccccaatcgctcaccgcggaccgtcaagcagtctcaatacacccgggtcttttcgaagggggcttgacgactctacaggaggcacccctttgactcctgctgcgcgaataagtgcccttaacattgtgggcgacctgctcagaaaagtcggcgcgctcgagtccaagctggcatcttgcagaaacctggtctatgaccaatctccgaacaggacagggggtccggcctctggccgttccagtaaaaaccgagatggtggggagaggagacctagtagcactagcgtacccttgggggacaagggcttggacactagctgtaggtggttgagcaaatctacgacacggtcatcttcctcgtgctag

SEQ ID NO: 127216 - DNA, 1008 bp, synthetic construct
  misc_feature 1..1008: note = Description of Artificial Sequence: Synthetic coding sequence
  source 1..1008: mol_type = other DNA
atggaggacagcggtaaaactttcagtagcgaggaagaagaggcaaactactggaaggacctcgctatgacatacaagcagcgggccgagaacacacaggaggagctaagagagtttcaggagggaagtcgggagtatgaggcggagctggagacccaattgcagcagatagaaacacgcaaccgtgatctgctgtccgagaataatagactccgaatggagctggagaccattaaggaaaagtttgaagtgcagcactccgaaggttatcgccagatttctgcgctggaagacgaccttgcgcaaactaaggccatcaaggatcagctccagaaatacatccgggagctggagcaggcgaacgatgatctcgaacgcgccaagcgggcgaccatcatgagcttggaagactttgagcagcgtctgaatcaggctatagaacgaaacgcatttctagagtctgaactagacgaaaaggagaatctgctggagtccgttcaacggttaaaggacgaggcccgtgacctgagacaggagttggctgtccagcagaagcaagagaagccgcgaactcctatgccttcaagtgtggaagctgagcggactgatacagcagtccaggccaccggcagtgtccctagcactcctattgctcaccggggcccctcatcatccttaaataccccgggaagtttccgacgaggattggacgattcaaccgggggaacaccactcacacctgcagctcggatcagcgctctaaatatagtcggtgacttgttgaggaaagtgggggccctcgagtccaagctagccagctgtagaaatctggtgtatgaccagagtccaaatagaaccggagggcctgctagcgggcgtagcagcaaaaaccgggatgggggggagagaagaccgagctctacctcagtccccctgggagacaaaggtctggatacttcctgtcggtggctgtccaagagtactactcgctcaagctccagttgctag

SEQ ID NO: 127217 - DNA, 471 bp, synthetic construct
  misc_feature 1..471: note = Description of Artificial Sequence: Synthetic coding sequence
  source 1..471: mol_type = other DNA
atgggagcctcccggctctatacattagttctcgtgctgcagccccagagagttctgctaggcatgaaaaagcggggttttggagctggaagatggaacggtttcgggggcaaagtgcaggagggagaaaccattgaggatggtgctagacgggagcttcaggaagagagtggacttacggtagacgctctccacaaggtagggcagatcgtgtttgagttcgtgggagaacccgagcttatggacgtccacgtgttctgtactgattctattcaggggacgcccgtggagtccgacgagatgagaccctgctggttccagctggatcaaatcccgttcaaagacatgtggccagatgactcatattggttccccctgctgctgcagaagaagaagtttcatgggtatttcaaatttcagggacaggacacgattctagattacaccttgcgcgaggtggacacagtgtag

SEQ ID NO: 127218 - DNA, 540 bp, synthetic construct
  misc_feature 1..540: note = Description of Artificial Sequence: Synthetic coding sequence
  source 1..540: mol_type = other DNA
atgagcgggattagcccccagcagatgggcgaaccagaaggaagctggagcggtaagaatcccggtacgatgggcgcctccaggctgtacactctggttctcgtcctgcagcctcaaagagtgctgctgggcatgaagaagcggggcttcggtgcggggcgctggaatggattcggcggtaaggtccaggaaggggagactatagaagacggagctaggcgcgaactgcaggaggaatccggactcacggtggatgcactgcacaaagtcggccagattgtgtttgaattcgtgggggaaccagagctgatggacgttcacgtattttgtaccgatagtatccagggtacgccggtggaatctgacgaaatgcggccatgttggtttcagctggaccagatccctttcaaagacatgtggccagatgattcatactggttccctctccttctccagaagaagaaattccatggctatttcaagtttcaagggcaggacaccatactggactatacattacgggaggtggatacagtgtag

SEQ ID NO: 127219 - DNA, 471 bp, synthetic construct
  misc_feature 1..471: note = Description of Artificial Sequence: Synthetic coding sequence
  source 1..471: mol_type = other DNA
atgggagctagcagattatatactctggtacttgtgctgcagccacagagggtattactcggcatgaaaaaacgcggattcggagcgggcagatggaacggatttggaggcaaggtacaggaaggagaaaccatcgaagacggagcaagacgggagttgcaggaggagtcaggcctcacggtggacgccctgcacaaggtaggccagatagtcttcgaatttgtaggggaacctgagctgatggatgtccatgtgttctgtaccgactcaattcaggggactcccgtcgaaagtgatgagatgagaccatgctggtttcagctagatcagattccatttaaagacatgtggcccgacgattcgtactggttcccactcttactgcagaagaagaagtttcacggatattttaaatttcaaggccaggatactattttggattacaccctgcgggaagttgatacagtgtag

SEQ ID NO: 127220 - DNA, 471 bp, synthetic construct
  misc_feature 1..471: note = Description of Artificial Sequence: Synthetic coding sequence
  source 1..471: mol_type = other DNA
atgggtgcctcgaggctgtacacactggtgctggtccttcagcctcagagggtgctcctggggatgaaaaagcgcggcttcggtgccggcagatggaatggattcggcggaaaggtgcaagagggtgaaacaatcgaggatggagcaagaagagagttgcaggaggaaagcggactgaccgtggacgctttacataaggtgggacaaatcgtcttcgagttcgtcggcgaaccagagctcatggacgtccatgtgttttgcacagacagtattcagggaactccagtcgagagcgatgaaatgagaccctgttggtttcaacttgatcagattcccttcaaggatatgtggcccgacgactcatattggtttcctcttttgcttcagaaaaagaagtttcacggctatttcaagttccagggccaggataccatcctcgattacaccctgcgcgaggtcgacactgtttag

SEQ ID NO: 127221 - DNA, 540 bp, synthetic construct
  misc_feature 1..540: note = Description of Artificial Sequence: Synthetic coding sequence
  source 1..540: mol_type = other DNA
atgtctggcataagcccgcagcaaatgggagaacctgagggctcttggagtggcaaaaaccccggtactatgggcgcctctcggttgtacacgttggtactggtcctacagcctcagcgcgtattactcggcatgaagaaaagggggtttggagcggggaggtggaatggctttggcggaaaagttcaagaaggcgaaacaatcgaagatggcgccaggcgcgagcttcaggaagagtctggactgacagtggatgccctacataaagtcggccagattgtctttgagttcgtgggagagcccgagcttatggatgtacatgtcttctgcaccgacagtattcagggaacgcccgtggaaagtgacgagatgcgcccctgttggttccagctggaccaaatcccttttaaagatatgtggcctgatgactcatactggttccctctgctattgcaaaagaagaagttccacggctattttaagttccaggggcaggatacaattctggattataccttgagagaagtcgacaccgtgtag

SEQ ID NO: 127222 - DNA, 540 bp, synthetic construct
  misc_feature 1..540: note = Description of Artificial Sequence: Synthetic coding sequence
  source 1..540: mol_type = other DNA
atgtccggaatttctccccagcagatgggcgaaccggagggtagctggtccggcaagaatccaggaactatgggagcttcgaggctgtacactcttgtgcttgttttgcagcctcagagagtgcttcttggtatgaagaagcggggattcggcgcgggtcgatggaatggctttgggggcaaggtacaggagggggagaccattgaggacggagccaggcgtgagcttcaggaagaatccggactaaccgtagatgccctccacaaagtgggacagatcgtgtttgagttcgtgggagagcctgaactgatggatgttcacgtcttttgtactgactccattcaaggcacaccagtggagtcagatgagatgagaccttgctggtttcagctcgaccagattcctttcaaagacatgtggccggatgactcgtattggtttcccttgctgcttcagaagaagaagtttcacggctactttaaattccagggtcaggacaccattcttgattacactctgagagaggtggatacagtgtag

SEQ ID NO: 127223 - DNA, 114 bp, synthetic construct
  misc_feature 1..114: note = Description of Artificial Sequence: Synthetic coding sequence
  source 1..114: mol_type = other DNA
atgggagccagcaggctatacaccttagtgctcgtgctgcagcctcagcgcgtcctgctgggcatgaagaaacgaggtttcggggccgggagatggaatggcttcggagggtag

SEQ ID NO: 127224 - DNA, 495 bp, synthetic construct
  misc_feature 1..495: note = Description of Artificial Sequence: Synthetic coding sequence
  source 1..495: mol_type = other DNA
atgaagtgcaaaccaaaccagacaagaacctatgaccccgagggctttaagaagagggccgcttgcctctgctttagaagtgagcgtgaagatgaagttctgctcgtttcttcaagcaggtatccggaccgctggatagtgccaggaggaggcatggagcccgaagaagaacccggtggggccgcagtccgggaggtctatgaagaggcaggcgtcaaaggtaaactgggacgcctgcttggcgtttttgaacaaaaccaagatcctaaacaccggacgtacgtttatgtcctgacggttacggaactcctcgaagactgggaagactctgtgagcattggcagaaaacgggaatggtttaaggtcgaggacgcaatcaaagttctgcagtgccataaacccgtccacgccgagtacctggagaagctgaagctgggaggatctcctaccaatgggaattccatggccccatctagccccgattccgatccctag

SEQ ID NO: 127225 - DNA, 495 bp, synthetic construct
  misc_feature 1..495: note = Description of Artificial Sequence: Synthetic coding sequence
  source 1..495: mol_type = other DNA
atgaagtgcaagcctaaccaaacgcgcacctatgaccctgagggctttaagaagagagcagcgtgcttgtgctttcgctcagagcgggaggacgaagtgctgctggtttcaagctctcgctacccagaccggtggatcgtgcccggcgggggtatggaacctgaagaggaacccggcggtgccgctgtgcgtgaggtgtatgaggaagccggagtgaaagggaagctaggacggctcctgggcgtgttcgaacagaatcaggaccctaagcatagaacctacgtgtacgttctgacggtaacagaattactggaagattgggaggattctgtttcgataggacgtaagagagaatggtttaaggtggaagacgctatcaaagtcctgcaatgccacaaacctgtccatgcagaatatctggagaaactgaaacttggagggtcaccaaccaatggaaacagtatggctccgtctagcccagactcggatccttag

SEQ ID NO: 127226 - DNA, 444 bp, synthetic construct
  misc_feature 1..444: note = Description of Artificial Sequence: Synthetic coding sequence
  source 1..444: mol_type = other DNA
atggccctgcgggcctgcggtctaattatttttcgccggtgcctgatccctaaagttgataataacgctatagagtttctactgctgcaagcgtcagatggaatccaccactggacacccccaaagggccacgtggagcctggcgaagatgatctggaaacagccctccgcgagacacaggaagaggccgggattgaagctggacaactgacgataatcgaaggattcaagcgcgagctgaactacgttgcacgcaacaaacccaagactgtgatatactggcttgcggaagtcaaggactacgacgtggagatacgactgtcccatgaacatcaggcctatcggtggctgggccttgaggaggcatgccagcttgcccaatttaaagagatgaaagctgccttgcaagaggggcatcagttcctgtgttctatcgaggcgtag

SEQ ID NO: 127227 - DNA, 444 bp, synthetic construct
  misc_feature 1..444: note = Description of Artificial Sequence: Synthetic coding sequence
  source 1..444: mol_type = other DNA
atggctttgagagcctgcgggctcattatcttccgccgatgtttgattccaaaggttgataataatgctattgaatttctccttctccaggcatccgatgggatacaccactggaccccccccaaagggcacgttgaacctggagaagatgacctggaaactgctctgcgagagacacaggaggaggcagggatcgaggctggacagctgaccatcatagagggattcaagcgagagttgaactatgtggcgcgcaataagccaaaaactgtcatttactggctggctgaggttaaggactatgatgtggagatccggctgtctcacgagcaccaggcttacaggtggctgggtctcgaagaagcatgtcagttagcccagttcaaggagatgaaagccgctcttcaggaaggtcatcagtttctgtgttccattgaggcttag

SEQ ID NO: 127228 - DNA, 444 bp, synthetic construct
  misc_feature 1..444: note = Description of Artificial Sequence: Synthetic coding sequence
  source 1..444: mol_type = other DNA
atggctctccgagcctgtggtctgatcatcttccggcgctgtctgatcccgaaggtcgacaacaatgccattgaatttttgcttttacaagccagcgacggtattcaccactggacccctccaaagggtcacgttgagccaggcgaggacgaccttgagacagccttgcgagaaacccaggaagaggccggtattgaggcaggtcagctgacgatcatcgagggctttaaaagagaactcaactatgtggccaggaataaacctaagaccgtgatttactggctggctgaagtgaaagactacgacgtggagatacggctgtctcacgaacatcaggcataccgttggttaggtctcgaagaggcgtgccaactcgcccagttcaaagagatgaaagctgcacttcaggagggccaccagttcctgtgctcgatagaggcttag

SEQ ID NO: 127229 - DNA, 444 bp, synthetic construct
  misc_feature 1..444: note = Description of Artificial Sequence: Synthetic coding sequence
  source 1..444: mol_type = other DNA
atggccttgagagcatgtggactgataatctttagaaggtgtctgattccaaaagttgacaataacgccatcgaatttctactgttgcaggcctctgacggaatccaccactggaccccccccaagggtcacgtggagccgggagaggacgacctcgaaactgctctccgcgagacccaggaggaggcagggattgaggctggacagcttacaattatcgaaggatttaagagagagcttaattatgttgctagaaacaaaccgaaaaccgtaatttattggctggcggaggtgaaggattacgacgtcgagattcgtctgtcgcacgagcatcaggcgtataggtggttggggctcgaggaggcctgccagctggcgcagtttaaagaaatgaaagcggcactgcaagagggacaccagtttctgtgcagcatagaggcctag

SEQ ID NO: 127230 - DNA, 444 bp, synthetic construct
  misc_feature 1..444: note = Description of Artificial Sequence: Synthetic coding sequence
  source 1..444: mol_type = other DNA
atggctttgagggcctgcggccttattatttttcgtagatgtctcatccctaaagttgataataatgcaatcgaatttctgcttctgcaggcttctgacggaattcaccattggactccacctaaggggcacgtagagccaggcgaagatgacctggagactgccctacgggagactcaggaagaggccgggatagaagccggacagctaaccattatcgagggttttaagcgggagctgaactacgtcgcccgtaacaagccaaaaaccgtgatttactggctggccgaagtcaaggactatgacgtggagatccgcctctctcacgaacatcaagcgtaccggtggctgggtctcgaagaggcctgccagctggcacaatttaaggagatgaaggctgctttacaggagggccaccaatttttgtgcagtatcgaagcatag

SEQ ID NO: 127231 - DNA, 1395 bp, synthetic construct
  misc_feature 1..1395: note = Description of Artificial Sequence: Synthetic coding sequence
  source 1..1395: mol_type = other DNA
atggagactctgtcttttccccgatataacgtggctgaaattgtaatccacatacggaataagatcctgacaggagccgacggtaagaatttaaccaagaatgatctgtaccccaacccaaaacctgaggtgctccatatgatctatatgcgtgctctccaaattgtttacgggatcagactagaacacttctatatgatgcctgtcaattcagaggtgatgtacccccacctcatggaaggatttctgcccttttcgaatttggtgacccacctcgattcctttctgccaatctgccgtgtgaatgactttgaaactgcagacattctgtgtccgaaagcaaagcgcacaagcaggttcctgtcgggcatcatcaatttcatccacttccgtgaggcctgccgagagacttacatggaatttctctggcagtacaaaagttctgccgataagatgcagcagctcaatgctgctcaccaggaggctctgatgaagttggaaagactcgactccgtgcccgtggaagaacaggaggaattcaaacagctttcagatggcattcaggaactccaacagtcactgaatcaagactttcaccagaaaacaatcgtgctgcaagaagggaattcacagaagaagtctaacatttctgaaaaaaccaaacgcctgaacgagctgaagctgagcgtggtcagtctcaaagagatacaagaaagtttaaagacgaagatcgtagactcacccgagaagctgaagaactacaaggaaaaaatgaaggacacagtacagaagcttaagaacgccagacaggaagtggtggagaaatatgagatatatggggactctgtggattgcctcccttcgtgtcaactcgaggtccagctgtaccagaagaagatccaggatctgtctgacaatagagagaaactggcctcgatcctcaaggaatccctgaatctagaggatcagatcgagagcgacgaatccgaactcaaaaagctcaagactgaggaaaattcattcaagagactgatgatcgtaaagaaagagaagctcgccacagcccagtttaagataaataaaaaacatgaagacgttaagcagtataaacgaaccgttatcgaagattgcaacaaggtgcaggaaaaacgcggggcagtctatgagcgcgttaccacaatcaaccaagaaatacaaaaaatcaagttgggaatccaacaactcaaggatgccgcggagagggagaagctcaagtctcaggagatctttcttaatttgaagactgcactagagaaataccacgacggcatcgaaaaagctgctgaagactcctacgctaagattgacgagaagaccgctgaattgaaacgcaaaatgttcaagatgagtacatag

SEQ ID NO: 127232 - DNA, 1395 bp, synthetic construct
  misc_feature 1..1395: note = Description of Artificial Sequence: Synthetic coding sequence
  source 1..1395: mol_type = other DNA
atggagaccctttcctttcctagatataacgtggccgagatcgttatccatattcgtaataagatccttactggtgccgacgggaagaatctcactaaaaatgacctctaccccaaccccaagccagaagttctgcacatgatctacatgcgggctctgcagatagtgtatggtattcgccttgagcacttctatatgatgccagtgaactccgaggtcatgtatcctcacctgatggaaggatttctgcctttctctaatctggttacacatctggacagcttcttaccaatctgtcgagtaaacgactttgaaactgctgatatcctgtgtcccaaagctaaacgaacaagccggttcctctccggtattatcaattttatacatttccgcgaggcctgcagggagacctatatggagttcctgtggcagtacaagagttctgctgacaagatgcagcaacttaatgccgctcatcaggaggcacttatgaagctggagagactggactctgtgccagtcgaagaacaagaggaattcaagcagctctctgatggaatccaggagctccaacagtctctgaaccaggatttccaccaaaaaactattgtactgcaagaaggcaactcccagaaaaagagcaacattagtgaaaagaccaaacgcctgaatgaactcaagctctccgtggtgtccttgaaggagattcaagagtctctgaaaactaagatcgtagacagtcccgagaaactcaagaattacaaagagaaaatgaaagatactgtccagaagctgaagaacgccaggcaagaagtggtagaaaaatacgagatctatggagactcagtggactgtctaccaagctgccagctcgaggtacaattgtaccagaagaagatccaggacctgtctgataatcgggaaaagttggcctcaatacttaaggagagcttaaacctggaggaccagattgagtccgatgagagtgagctcaagaaactgaaaactgaggaaaattcattcaaaagactgatgattgtgaagaaggaaaaacttgccacagctcaattcaagattaataaaaaacacgaggatgtaaaacaatacaagagaacagtcatcgaagattgtaataaggtgcaggaaaaacgcggggccgtgtacgaacgggtgactacgatcaatcaagagattcagaagatcaaactgggcatccagcagctgaaggacgctgcagagcgagagaagttgaagagccaggaaattttcctgaacctcaaaacagcactggaaaagtaccacgacggaatcgaaaaggccgctgaagatagctatgccaaaatagacgagaagaccgccgagctcaagcgcaagatgttcaaaatgagtacttag

SEQ ID NO: 127233 - DNA, 609 bp, synthetic construct
  misc_feature 1..609: note = Description of Artificial Sequence: Synthetic coding sequence
  source 1..609: mol_type = other DNA
atggaaaccctttctttcccccgatacaacgttgccgagattgtgatccatatccgcaataagattctgacaggagccgacggtaagaaccttaccaagaacgatctgtatccaaatcccaaaccagaagtcctccatatgatatacatgcgggctctgcagatcgtttacggcattcggttggagcacttttatatgatgccagtcaactctgaagtgatgtacccccatctgatggaaggtttcctccctttttctaatctcgttacacatctggatagctttttaccgatctgtagggtcaacgacttcgagaccgcagacattttatgcccgaaggctaagcggaccagtcgttttctctctggaatcatcaacttcattcacttccgggaggcctgtcgtgaaacctatatggagttcctgtggcagtataagtctagtgctgacaaaatgcaacaattgaacgccgcacatcaggaggccctgatgaagctggaaagacttgactccgtgcccgtggaagagcaggaagagtttaaacagctgagtgacggcatccaggagctgcaacagtccttgaatcaggacttccatcaaaaaacgtag

SEQ ID NO: 127234 - DNA, 438 bp, synthetic construct
  misc_feature 1..438: note = Description of Artificial Sequence: Synthetic coding sequence
  source 1..438: mol_type = other DNA
atggaaacattatctttcccccggtacaacgtggccgagattgtcatccacatcagaaataaaattttgacaggggccgacgggaagaatctcaccaagaacgatttgtatccaaaccccaagcccgaagtactgcacatgatttacatgagggcactgcagatcgtgtatggtatcaggttagagcacttttatatgatgccggtgaacagcgaggtgatgtacccacacttgatggagggatttctgccatttagcaacctagtcacccacctcgattcattcctgccaatctgcagggtgaacgactttgaaacagccgatatcctctgtccaaaggctaaaagaacatccaggttcttgagcggaatcatcaacttcattcacttccgagaggcctgcagagaaacatacatggagttcctttggcagtattag

SEQ ID NO: 127235 - DNA, 666 bp, synthetic construct
  misc_feature 1..666: note = Description of Artificial Sequence: Synthetic coding sequence
  source 1..666: mol_type = other DNA
atggagacgctgtcgttcccgagatacaatgtagccgaaatcgtgatccatatccgcaacaagatcctgactggcgcggatggcaaaaatctgacaaagaatgatctgtatcccaacccaaaacctgaggtgctacacatgatctacatgcgggcccttcagattgtttatggaatcaggcttgaacacttttacatgatgcccgttaactctgaagtcatgtatccacacctaatggagggatttcttcccttttctaacctggtgacgcacctagactcgttcctcccaatctgccgtgtgaacgactttgagaccgcggatattttgtgtccaaaggcgaaacgtacctctcgtttcctttctgggatcatcaattttatccactttcgagaggcttgtagggagacctatatggaatttctgtggcagtacaaaagctctgcagataaaatgcagcagcttaatgccgctcaccaggaggcgctgatgaaactcgaacggcttgattctgtcccagtggaggagcaagaagagtttaagcagctgagtgatggaattcaggagctgcagcagagtctcaatcaggacttccaccagaaaacgtgttgtaagcgggaaattcccaagagatcccagatcttccagcgaaaacctagcgtttag

SEQ ID NO: 127236 - DNA, 1254 bp, synthetic construct
  misc_feature 1..1254: note = Description of Artificial Sequence: Synthetic coding sequence
  source 1..1254: mol_type = other DNA
atggagaccctgtccttccctcggtataatgttgccgagatcgtgattcacattagaaacaagatcctcaccggggcagatggcaagaatctgacgaagaatgatctgtatccgaacccaaaacccgaggttctgcatatgatatatatgcgggcactgcagattgtgtacgggatacggctggaacatttttatatgatgcctgtcaattcggaggtgatgtaccctcatcttatggaggggtttttgcccttttcaaacctcgtcacccacctcgactcctttctgccaatatgccgggttaatgacttcgaaactgccgacatactgtgccccaaggcgaaaagaacatccaggtttttaagcgggatcattaatttcatacattttagggaagcttgccgtgagacctacatggagttcctttggcagtacaaatccagcgccgacaagatgcaacagctgaatgccgcgcatcaggaggcgctgatgaagctggagcgcctagattcagtgcctgtggaggagcaagaagaatttaagcagttgtccgacgggatccaagagctgcagcagagcctgaatcaggacttccaccagaaaactatcgtcctgcaggagggcaactctcagaaaaaatccaacatctctgaaaagaccaaacggctgaacgagctcaagttatctgtggtttcccttaaagagatacaggaaagcctgaagacaaagatcgtagatagcccagaaaagctcaagaattacaaagaaaaaatgaaggatactgtgcaaaaactaaaaaacgccaggtctctgaatctcgaagatcagatcgaatctgatgagagcgagttgaaaaagctcaagacagaagagaacagcttcaagcgcctgatgatcgtgaaaaaggaaaaacttgcaacagcacagtttaaaatcaacaaaaagcatgaagatgtgaagcaatataaacggaccgtcattgaggattgtaataaggtgcaggagaaaaggggggccgtgtacgagcgagttactacaataaaccaggagattcaaaaaatcaaacttggaatccaacagctcaaagatgcagcggagcgggagaaattgaagtctcaggaaattttcctaaacctcaagaccgctttagaaaagtatcacgacgggatcgaaaaagctgcggaggatagttatgccaagatagatgagaagaccgctgaactgaaacggaaaatgttcaagatgtcaacatag

SEQ ID NO: 127237 - DNA, 375 bp, synthetic construct
  misc_feature 1..375: note = Description of Artificial Sequence: Synthetic coding sequence
  source 1..375: mol_type = other DNA
atggaaacactgagtttcccaaggtataacgttgccgagattgttatccatatccgtaacaaaatcctcacaggggccgacggaaagaatctaacaaagaatgacctgtaccccaacccaaaacccgaggttttgcatatgatttacatgagagccctccagatcgtttacggcattagattggagcatttctacatgatgcccgtgaactccgaggtgatgtaccctcatctcatggaaggattccttcctttttcgaatctggtgactcatctcgacagctttctccctatttgcagggttaatgacttcgaaaccgccgacatcctatgcccaaaggcgaagagaacctcaagattcttaagcggcatttag

SEQ ID NO: 127238 - DNA, 702 bp, synthetic construct
  misc_feature 1..702: note = Description of Artificial Sequence: Synthetic coding sequence
  source 1..702: mol_type = other DNA
atgaacaaactgcgccagagctttcgacggaaaaaagatgtttatgttcccgaagcgagccgaccacaccaatggcaaacggacgaggaaggggtgaggaccgggaaatgttcgtttccagtcaaaacaggtaagaaagcagttaaagccgtgctgtgggtatccgccgatggcttgcgagtggtggacgaaaagaccaaagacctgattgtggatcagaccatcgaaaaagtctctttttgtgctcccgaccgcaacttcgaccgcgctttcagctatatatgtcgagacggaaccacccgccgctggatttgtcactgtttcatggcagtcaaagacactggcgaacgattaagtcacgccgtcgggtgtgcttttgccgcctgtttagaaaggaagcagaaacgggagaaagaatgtggcgttactgctactttcgacgcctcaaggacgacgttcactagagagggaagctttcgggtgacaactgcaactgaacaagcagagcgggaagagatcatgaaacagatgcaagacgctaagaaggcagaaacagataaaatcgtagtaggctcgtcggtcgcccccggtaataccgcacctagcccgtcctcccctacctctcccactagcgacgccacaacctccttggaaatgaacaacccacatgcgatccccagacggcatgcaccaatcgagtag

SEQ ID NO: 127239 - DNA, 1956 bp, synthetic construct
  misc_feature 1..1956: note = Description of Artificial Sequence: Synthetic coding sequence
  source 1..1956: mol_type = other DNA
atgaataaactgagacagtcattccgcagaaagaaggatgtatatgttcccgaagcgagccgaccacaccagtggcagacagatgaagagggtgtcaggaccggtaagtgcagtttcccagtgaagtatctcggacatgtggaggtagacgagtccaggggcatgcacatttgtgaggatgcggttaaacggctaaaagccgaacggaagttttttaaaggtttctttggtaaaaccggaaaaaaagcagtgaaagcagtactatgggtgagtgcagatggtttgagagtggtggacgagaagacgaaggacttgattgtggatcaaaccatcgaaaaagtatctttctgcgcacccgatcggaacttcgatcgcgcgtttagctatatctgccgtgatgggacaaccaggcggtggatttgtcactgcttcatggcagtcaaggataccggcgagaggctgtcgcatgcggtgggctgcgcttttgccgcatgcctggaaaggaaacagaaacgcgaaaaagaatgtggcgttactgctaccttcgatgcctctcgcaccacgtttaccagggaggggtcattccgggtgactactgccacagaacaggcagagcgagaggagatcatgaaacaaatgcaggacgcaaagaaagctgagacggataaaatagtcgtgggatctagcgtggctcccgggaatacagcccccagcccttcctcacctacaagcccaacttccgacgcaacgacatccctcgagatgaataatcctcatgccatccctagacggcatgcgcccattgagcagctagccaggcaggggagctttagaggtttcccggccttaagtcagaagatgagcccattcaaacggcagctgtccctgcgcatcaacgagctcccttccaccatgcagcgcaaaaccgacttcccgatcaagaacgccgtgcccgaagtagagggcgaagccgagagtataagtagcctatgcagccagataaccaatgcgttctccacaccagaggatccattttcatcggctcctatgactaagccagtgactgttgtagcaccacaaagcccaacgttccaggcaaatgggactgactctgccttccatgtcctggctaagcctgcacacactgccctggcacccgtggccatgccagtgcgggagacaaacccttgggcacacgcacctgacgccgccaataaggaaattgccgcgacatgttccggcactgagtgggggcaaagttcaggggcagcctcacctgggctttttcaagccgggcacaggcgcactccaagcgaagctgaccggtggctcgaggaagtctcgaaatcagtccgggcacagcagccacaggcgtctgccgccccactccagcctgtactgcaaccccctccccctacagctattagccagccagctagtccattccaaggtaacgcattcctgacaagccaacccgtgccagtgggcgtagtaccagccctgcagcccgcattcgtgccagctcaaagctatcccgtcgcgaacggcatgccataccctgccccaaacgtacctgtcgtaggcatcacaccttcccaaatggtggctaacgtcttcggcacagctgggcaccctcaggccgcgcatccacatcaatccccaagccttgtccgtcagcagacatttccacattacgaggcctcctccgcgactaccagccctttcttcaagcccccagctcagcatctgaacggttcggcggcatttaatggcgtggatgatggacgattggccagcgccgatcgacacacagaggtgcctactgggacctgccctgtggaccctttcgaagcccagtgggctgcattggagaataaaagcaagcagagaaccaatccaagcccaactaatcccttttcatctgatctccagaagacctttgagattgaactttag

SEQ ID NO: 127240 - DNA, 1812 bp, synthetic construct
  misc_feature 1..1812: note = Description of Artificial Sequence: Synthetic coding sequence
  source 1..1812: mol_type = other DNA
atgaataagctgcggcagtcttttagacgcaagaaagacgtatacgtccccgaagcctcaagacctcaccaatggcagaccgatgaggagggcgtccgtacaggaaagtgctcatttcctgtgaagtacttggggcacgtggaggtcgacgagtcgcgcggaatgcatatctgcgaagacgcagtcaaaagactgaaggctgagagaaagtttttcaaggggtttttcgggaaaaccggtaaaaaggcagtcaaggccgtcctttgggtttctgccgacgggctgcgggtggtagatgagaagactaaggacctgatagtcgatcagactattgaaaaggtttccttctgcgcgccggacaggaacttcgatagggccttttcatacatctgtcgggacggaactacacgcaggtggatttgtcactgcttcatggctgtcaaagacacgggcgagcggctgtctcatgccgtggggtgcgctttcgcagcctgtctggaaaggaaacagaagcgcgaaaaggagtgcggagtgaccgccacgttcgatgcttcacgaaccacttttacgcgggagggctcctttcgcgttacaacggccactgagcaggcggaacgcgaagagattatgaaacaaatgcaggatgcaaaaaaggccgagacagataagattgtggtagggtctagcgtggctcccggcaataccgccccaagtcccagttcccctacaagccccacatctgacgccaccactagtctggaaatgaataaccctcatgctatccctcgccggcatgcgccaatcgaacagctcgcccgccagggctcttttcggggatttcccgcactttctcagaagatgtccccctttaagcgacagctctctcttcgcataaatgaattgcctagtaccatgcagaggaagactgactttcccattaagaacgccgtgcctgaggtggaaggcgaagcggagtcaatctctagtttatgttcccagattaccaatgctttttccaccccagaagaccctttctcgtccgctcccatgaccaagcccgtgacagtggtcgcacctcaatctcctaccttccaaggcactgaatggggccagagctccggtgctgcttcccccggactgtttcaggccgggcataggcggacaccgtccgaggccgatcgttggctggaagaagtgtcaaagtctgtgcgcgcgcagcaaccacaagcgagcgccgcgcccctgcaaccagtgctgcaaccgcctccaccaaccgcaatatcacagcctgcctccccctttcaaggaaacgcttttctaacttctcagccggtcccagttggagtcgtgcctgcattacagcccgccttcgtccctgctcaatcctatcctgttgcgaacggaatgccatacccagctcctaacgttcccgtggtgggcatcacaccaagccagatggtagccaacgtgtttggaaccgcaggtcacccccaagctgctcatccccatcagtctcctagtctggtcaggcagcagacattcccgcactacgaagcctcatccgcaaccacttccccgttctttaagcctcccgcgcagcacctcaatggtagcgcagccttcaatggagtcgacgatgggaggttggccagtgccgaccgtcacacagaagtgcccacagggacctgtccagtggacccatttgaggcccagtgggcagccctcgagaataaatccaagcagcggacgaatccttcccccactaatccattttcttctgatctccagaaaacattcgaaattgagctgtag

SEQ ID NO: 127241 - DNA, 1923 bp, synthetic construct
  misc_feature 1..1923: note = Description of Artificial Sequence: Synthetic coding sequence
  source 1..1923: mol_type = other DNA
atgaacaagcttcgtcagagctttaggcgaaaaaaggacgtgtacgttccagaggctagtcggccgcaccagtggcaaactgacgaggagggggtgagaacagggaaatgctcttttccagtcaagtacctcggtcatgtcgaggtagacgaatctcggggcatgcacatttgcgaggatgccgtgaagcgactgaaggctaccgggaagaaggcagtgaaggctgttctttgggtgtccgccgatggacttcgtgtggtggacgagaaaacaaaggacctgattgtagatcagacgatcgagaaggtgagcttctgtgcaccggatcgcaacttcgatagggctttctcttacatttgccgggacggcacaacccgcagatggatttgccactgtttcatggcagtgaaagacacaggagagcgcctgtcacacgccgtgggctgcgccttcgcagcctgcctggagcggaagcagaagcgggaaaaggaatgcggggtgaccgcgactttcgatgcctcacggacaacctttactcgtgaaggcagttttcgcgtgacgaccgccaccgaacaagcggagagggaggaaattatgaagcagatgcaggacgccaaaaaagcggagacagataagatagtggtaggatcctcagttgccccgggcaacaccgcccctagtcccagtagtcccacgagccctaccagcgacgcaacaacatccctggaaatgaataatccccatgctattcctaggagacatgcaccaattgagcaacttgccaggcagggttctttccgtgggtttcctgcgttgagccaaaaaatgtctccatttaaacggcagttatcccttcggatcaacgagctccccagcaccatgcagcgtaagacggactttccaattaaaaatgccgttcccgaggtggagggcgaggctgagagcatcagttcactgtgtagccaaatcactaacgcattctctacccctgaagacccattcagtagcgcccctatgacaaaaccggttaccgtggtcgctcctcagtcccctaccttccaggccaacgggacggatagtgcgttccatgtgctggccaaacctgcccataccgcccttgcccccgtcgcaatgccagtccgggagaccaacccatgggcacacgccccagacgcggccaacaaggaaatcgctgctacttgttctggcaccgaatgggggcagtcttcaggggccgcctcaccaggcttgtttcaggcaggacaccgtcgaaccccatcagaagcagacaggtggctggaggaagtctctaagtctgtgcgcgcacaacagccgcaagcctcggccgcccccttgcagccggttctccaaccacctcccccaaccgccatctcacagcctgcctccccttttcaagggaacgccttcttgaccagtcagcctgttcctgtaggcgtcgtgcctgccctgcaaccggcgtttgtcccggcgcagtcatatccggtggctaacggaatgccttacccagctccgaacgtgcccgtcgtgggaatcacccccagccagatggttgctaacgtgttcggaaccgcaggccatccccaagctgcccacccccaccagagtccctcactggtcaggcagcagactttcccacactatgaggcctcaagcgcaactacatcacctttttttaaaccgcctgcgcagcatctaaatggatccgcagccttcaacggggtggacgacggtcgcctggctagcgctgacagacacactgaggtgccgaccgggacatgtccagtcgatcccttcgaggcccagtgggccgcgttagagaacaaatctaagcaacggacaaaccccagccccaccaaccccttcagtagcgatttacagaagacctttgagatcgagctgtag

SEQ ID NO: 127242 - DNA, 1518 bp, synthetic construct
  misc_feature 1..1518: note = Description of Artificial Sequence: Synthetic coding sequence
  source 1..1518: mol_type = other DNA
atgaacaagctgcgacagtctttcaggaggaagaaggacgtatacgttccggaggcttcccgaccccatcaatggcaaactgacgaggagggtgtgcggactggcaaatgcagctttccagttaagtatctgggccatgttgaagtggatgagagtcgaggaatgcacatttgtgaggacgctgtcaaaagattgaaagcagaaaggaaattttttaagggcttcttcggaaagaccggaaagaaggccgttaaagccgtcctgtgggttagtgcagacggacttagggtcgtggacgagaaaactaaggacttgatagtggaccaaactatcgaaaaagtgtctttttgcgctccggatcggaacttcgatcgggccttcagttatatctgccgtgacggtacgacaagacgctggatctgtcattgctttatggccgtgaaggacacaggggaaaggctaagccatgccgtgggctgcgcttttgcggcttgcctggaacggaagcagaagcgtgagaaggagtgcggcgtcaccgccaccttcgacgctagccgcacaacgtttacccgggagggcagtttccgggtcactaccgccacggagcaggccgagcgggaggagatcatgaagcagatgcaagatgcaaaaaaagtgcccgaggtggaaggcgaagctgagtccatctcttcactttgtagccagattacaaatgcctttagcactcctgaggatcctttttcttcagctcctatgacaaagcctgtaacggtggtggcaccacagagtcccacattccagggcacagagtgggggcagtcctccggcgccgcgtcccccgggctgttccaagcgggccaccgtaggaccccatcggaggctgaccgttggcttgaagaggtgtccaagagcgtcagagcccagcaaccacaggcctctgccgcccccctgcagccagtgctgcagccgcccccacccactgccattagtcagccggcttcacccttccagggaaatgcattcctgaccagtcaaccagtgcctgtcggcgttgttcctgccctgcaacccgctttcgtacctgctcaatcctacccggtggccaatggcatgccctatcctgcacctaacgtaccagtggtgggtataacaccgagtcaaatggtagcgaacgtcttcggcaccgccggtcaccctcaggcagcccatccacaccagagtccctccttagttcgtcagcagacctttccgcattatgaggctagttcagctacaactagtcctttcttcaagcctcccgcgcagcatctgaacggatccgcagcctttaatggtgttgacgatggccgactagccagcgctgacaggcacactgaggtacccaccgggacctgcccggtggatccctttgaggcacaatgggcagcgctggagaataagtccaagcagcgcaccaatccatcccccacaaaccctttttcaagtgatctccagaagaccttcgagatcgaactctag

SEQ ID NO: 127243 - DNA, 1923 bp, synthetic construct
  misc_feature 1..1923: note = Description of Artificial Sequence: Synthetic coding sequence
  source 1..1923: mol_type = other DNA
atgaacaaactaagacagagttttcgccgaaaaaaagatgtctacgttcctgaggctagtaggccacaccaatggcagactgacgaggaaggtgtcagaaccgggaaatgcagctttccagtcaagtatctcggacacgtcgaggtagacgagtcgagaggaatgcacatatgcgaggatgcggtgaaaagattgaaggctacaggtaagaaagccgttaaagccgttctttgggttagcgcagacggcctgagagtagtggacgaaaaaaccaaggacctaatagttgaccagaccatagagaaggtgtccttttgcgcaccagacagaaatttcgacagagcatttagctacatctgccgtgacggtaccacacgcaggtggatctgccattgtttcatggctgtgaaagatacaggtgaacggctgtcgcatgccgtgggctgcgcctttgcggcatgtttagaacgcaaacagaaacgcgagaaggaatgtggagtcactgccacgttcgacgccagcagaacaacattcacccgggaaggatccttccgcgtcaccaccgctaccgaacaggccgaacgcgaagagattatgaagcagatgcaagatgccaagaaagccgagaccgataagatcgtggtcggctcaagcgttgcccctggtaacaccgccccatcacctagctcacctacttcccccacgagcgacgcaacaacttcactcgagatgaacaatccccacgccatccctagaagacacgccccaatcgaacagttagccagacaaggctcattccgcgggtttcccgccctttcccagaagatgagccccttcaaaagacagctgagcctacgaattaatgagctgccctccaccatgcagcgcaaaactgacttcccgataaagaatgccgtccctgaagtcgagggagaagcagagagcatctcttcactctgttcccaaattaccaatgccttctccacacccgaggacccgttcagctccgcgcccatgaccaagcccgtaactgtggtagcaccacaaagtccaactttccaagccaatggcacagattctgccttccacgttctcgctaagccagcacacaccgccttggctcccgtcgctatgccggttcgggagacaaacccctgggcgcacgctcccgacgcggcgaataaagagatcgctgccacatgttcaggcacggaatggggacagagttccggcgccgcttctcccgggctattccaggctggccaccggaggacgccttctgaagctgaccggtggctcgaggaggtaagcaagagtgtgcgggcacagcaaccccaggcctccgcagcgcccctgcagccagtgctgcagccaccaccccccacagctattagccaaccggcgtcccccttccagggcaatgctttcttgacgagccagcctgtaccggtgggcgtggtcccagccctgcaaccagcctttgttcctgcgcagtcttacccggtggctaatggaatgccttatcccgcccccaacgtaccggtggtgggtataacaccatcacaaatggtcgccaatgttttcggcaccgccggccacccccaggctgcgcatcctcaccagtctccttctctcgtgagacagcagactttccctcactacgaggcgtcctctgcaaccacgagcccttttttcaagccgccagcacagcatcttaatggtagtgctgcattcaacggcgtagatgacggtagacttgcctctgcagatcggcatactgaagtaccgacaggcacctgccctgtcgatccattcgaagcccaatgggcggcgctggaaaataagagcaagcagcggacgaaccccagcccaactaacccctttagcagcgatctccagaaaacgttcgagattgagctttag

SEQ ID NO: 127244 - DNA, 1371 bp, synthetic construct
  misc_feature 1..1371: note = Description of Artificial Sequence: Synthetic coding sequence
  source 1..1371: mol_type = other DNA
atgaataaactccgtcagtcttttagaaggaagaaggacgtctacgtgcctgaagcttcacgacctcaccagtggcagaccgatgaggagggcgtgagaactggcaagtgctcattcccagtgaaatatcttggccacgtcgaggtagacgagtcccgtgggatgcatatctgtgaggatgccgttaagcgcctcaaagctgagcgaaagttctttaaaggcttcttcggtaagaccggcaaaaaagccgtgaaggccgtactgtgggtgagtgcagatggcttgagagtagttgatgagaagacaaaagatctgatcgtcgatcagaccatagagaaggtcagcttctgcgcgcctgataggaacttcgatcgagctttttcttatatttgcagggatggcacaaccaggcgctggatttgccactgtttcatggccgtgaaagacacgggtgagaggctaagccatgccgtagggtgtgcatttgccgcctgtctcgaacgcaaacagaaaagagaaaaggagtgtggagtgactgccaccttcgacgcctcaaggacgacgttcaccagagagggctcatttcgcgtgactaccgccaccgagcaagccgagcgggaggaaattatgaaacaaatgcaggatgccaagaagggtacagagtgggggcaatccagtggcgccgcatccccaggcttgtttcaggccgggcaccgccgtacaccctccgaggcggaccggtggttggaggaggtttcaaaatccgtccgcgcacaacaaccgcaggctagtgcggctcccttacagcctgtgctgcagccgcctccccccacagccatctctcagccggccagccccttccagggcaatgctttcctgacgtcgcagcccgtgcctgtgggagtggtgcccgccctccagcccgctttcgtaccggctcaatcttatcctgtagccaatggaatgccataccccgccccaaatgtgcccgtggtgggcattacgcccagtcagatggtcgcgaatgtcttcggcacggcaggccatccccaagcagcccatccacatcagtcacccagcctggtcagacagcagacgttcccgcactacgaggcttcctccgcaactacctctcccttcttcaaacccccggcccagcatctgaacgggagcgcggctttcaacggtgtagacgatgggcggctggcttccgcagatcggcacacagaagtcccaacaggtacatgtccagtcgacccttttgaagcccagtgggccgctctcgaaaacaagagcaagcagcggaccaatccttcgcctactaatcctttctctagtgacctgcagaagacttttgagattgaattatag

SEQ ID NO: 127245 - DNA, 777 bp, synthetic construct
  misc_feature 1..777: note = Description of Artificial Sequence: Synthetic coding sequence
  source 1..777: mol_type = other DNA
atgaacaagttgcggcagtctttcagacgaaagaaggatgtttacgtgcctgaagcctcccgtcctcaccagtggcagacagacgaagagggtgtccgcaccggtaagtgctctttcccagtaaaatatcttgggcacgtggaggttgatgagtctcggggaatgcacatctgcgaggacgcagtgaagaggctgaaggctgagagaaaatttttcaaaggcttctttggaaaaaccggaaagaaagcggtgaaggccgtcctgtgggtaagcgcagacggtctccgggtggttgacgaaaagactaaggatctcatcgtggaccagacaattgaaaaggtgagcttttgtgccccggaccgaaattttgatagggcattctcctacatatgccgggatgggacgactcgacggtggatttgtcactgcttcatggcagtgaaggacactggggagaggctgagtcacgccgttgggtgtgcttttgctgcttgcctggagaggaagcagaaacgcgagaaggaatgtggggtgacggcaacattcgacgctagccggaccacctttacacgggagggatcatttagggtgaccactgccacggagcaagcagagcgagaggagattatgaagcagatgcaggatgctaaaaaagccgagaccgataaaattgttgtgggttccagtgtggctcctggaaataccgccccaagccccagttctcccacctctcctactagtgacgctaccacctctttggagatgaataacccctag

SEQ ID NO: 127246 - DNA, 1779 bp, synthetic construct
  misc_feature 1..1779: note = Description of Artificial Sequence: Synthetic coding sequence
  source 1..1779: mol_type = other DNA
atgaataaactgaggcagagttttagacgcaagaaggacgtatacgtgccagaagcttcaaggccgcaccagtggcagacagacgaggaaggagtgcggacggggaaatgcagctttcctgttaaatacctcggtcacgtggaagttgacgagagtcgcggaatgcatatctgcgaagacgccgtgaaaagactcaaggctactgggaagaaggccgtcaaggctgtgctttgggtctcagctgacggattacgtgtcgtagacgagaagacaaaagacctcattgtggatcagactattgaaaaggtgagtttctgtgcccccgatcggaattttgatagggcctttagctatatttgccgggatggcaccacccgacgctggatttgtcactgcttcatggccgttaaagacactggagagcgcctaagtcatgccgtggggtgcgcgtttgcagcctgcctggagcggaagcaaaagagagaaaaggagtgtggcgttaccgcaacattcgacgcctctcgtaccacattcactagggaaggcagttttagagtgactaccgccactgagcaggctgagagagaagagattatgaagcagatgcaggatgcgaaaaaggcggaaaccgacaaaatagtggtgggcagttctgtggcaccgggcaataccgcgccaagcccgtcttcccctacgtctcccacgtctgacgcaaccacctctctagagatgaataatccccatgctatacccaggagacatgcaccgattgagcagctcgcccggcagggatctttccgtggattccccgcgctttcacagaagatgagtccctttaaaagacaactcagcttgcgcattaatgagctgcccagtactatgcagcggaaaactgattttcctatcaaaaacgccgtgccagaagtggagggcgaggccgagtcaatctcttccttatgtagtcagatcaccaatgccttttcaactcccgaagaccccttctcttcagcccccatgactaagcctgttaccgtggtcgcaccgcaaagccccacctttcagggaacggagtggggccaatcatccggagcagcctctcctggactttttcaggccggtcaccggagaacgccttctgaggcggatcgatggctggaggaagtgtctaaatccgtccgcgctcaacagccgcaggcctctgccgcacctttacaacctgttttgcagccgccccctcctacagctatcagccaacccgcctctccttttcagggtaatgccttcctcactagccagcccgtgccagtgggggtggtaccagcactgcagcctgcatttgtgccagctcaatcttatccagtcgcaaatggaatgccctaccccgctccaaacgtgcccgtggttggcatcacgcctagccagatggtggctaacgtctttgggactgccggtcacccacaggctgcccacccacatcagagccctagccttgttaggcagcagactttcccacattatgaggcctcaagcgcaacgacgtccccattttttaagcccccagctcagcatctcaatggcagtgccgcatttaacggcgttgatgacggcagactcgcctctgccgacagacacaccgaggttcctacaggaacctgtcctgtggatccttttgaggcccagtgggccgctttagagaataagagtaagcagagaaccaatccttcacctacgaatccattttcaagtgacttgcagaagaccttcgaaatcgagctgtag

SEQ ID NO: 127247 - DNA, 204 bp, synthetic construct
  misc_feature 1..204: note = Description of Artificial Sequence: Synthetic coding sequence
  source 1..204: mol_type = other DNA
atgaacaagttaaggcagtcttttaggcgaaaaaaagacgtgtatgtacccgaggcctctcgacctcaccagtggcaaacagatgaagaaggtgtgaggacaggcaagtgcagctttccagtcaagtatctcggccacgtggaggtggacgagtccagaggtatgcacatctgcgaggacgccgttaagaggctgaaagcttag

SEQ ID NO: 127248 - DNA, 1956 bp, synthetic construct
  misc_feature 1..1956: note = Description of Artificial Sequence: Synthetic coding sequence
  source 1..1956: mol_type = other DNA
atgaataagctacgacaatcatttcggaggaaaaaggacgtctacgtgcctgaagcatctcgcccccatcaatggcagactgatgaagaaggagtgagaaccggcaagtgctcctttcctgtgaagtatcttggacacgttgaggtcgacgagagccgtgggatgcatatttgcgaggatgccgtcaagaggcttaaagctgagagaaagttctttaagggtttcttcggcaaaacgggcaaaaaagcagtgaaagccgtcctttgggtgagtgctgatgggttgagggtggtggacgaaaagacgaaggatctgatcgtcgaccagacgatcgagaaagtcagcttctgtgctcccgacagaaactttgatcgagctttctcttatatatgccgtgacgggacaacgcgtcgctggatctgtcactgtttcatggctgtgaaggatacaggtgagcggctgagtcacgctgtcggatgtgccttcgctgcgtgcctggagagaaagcagaagcgcgaaaaagaatgtggggtgaccgctacatttgatgcatctcggacaacattcacccgcgaggggtccttccgggtcaccacagcgacagagcaagcggagcgcgaggaaatcatgaagcagatgcaggacgctaagaaggctgagacagataagatagtggtgggatcctctgttgctcccggtaacaccgctccttcaccgagttcccctacatcccccaccagtgatgcgaccaccagtctggagatgaacaacccgcacgctatcccaagaagacacgcgcctattgagcagctggcccggcaaggcagcttccggggtttcccagccctctctcagaagatgtcaccttttaaacgccagctctcattacgcataaatgagctcccctccaccatgcagaggaagactgacttccctattaagaatgcagtaccagaagtggagggcgaggctgaatctatctcaagtctgtgcagccaaataactaatgccttcagcacccccgaggatccgttctcctctgcaccgatgactaagcccgtgaccgtagtagcccctcagtctccaacttttcaggccaacggcaccgatagtgctttccacgtcctggccaagccagctcacactgccctggcccctgtagctatgcccgtgagagagacaaacccatgggcacacgctccagacgcggcgaacaaggagatcgccgctacttgctcaggaaccgaatggggacaatccagcggagctgctagcccgggcctgttccaggcgggacataggaggaccccatctgaagcggacaggtggctggaggaggtcagcaaatctgtccgggctcaacagcctcaggcatcagccgcgcccttgcagccagtactccagccaccaccacccacggccatatctcaaccagcttcaccatttcagggcaacgctttcctgacgagccaacccgtgcctgtcggggtggtcccagctttacagcctgctttcgtacctgcccagagctatccagtggccaatgggatgccttatcctgctcccaatgtacccgtggtggggattactccctctcaaatggtggccaacgtgtttgggaccgcaggacaccctcaggccgcacaccctcatcagtccccttccctcgtcagacaacagacatttccacattacgaggctagctcagctaccactagtcctttttttaaaccacccgcccaacatctgaacggctctgccgcatttaatggggtcgacgacggccgcctcgctagcgcggaccgacacaccgaggttccaaccggcacctgtcctgttgatcctttcgaagcccagtgggccgctttagagaataagtctaagcagcggaccaatccctctcctactaatcccttcagctccgacttacaaaaaacttttgagatagaactgtag

SEQ ID NO: 127249 - DNA, 777 bp, synthetic construct
  misc_feature 1..777: note = Description of Artificial Sequence: Synthetic coding sequence
  source 1..777: mol_type = other DNA
atgaacaagcttcggcaatctttccgcaggaaaaaggacgtttatgtgccggaagcctcaaggccacaccaatggcagaccgatgaggagggggtgcgcaccgggaaatgctcattccccgtgaaatacctggggcatgtggaggttgacgagtcaaggggaatgcacatctgcgaggacgcggtgaaaagattaaaggccgagcgcaaattctttaaaggcttcttcgggaaaactggtaagaaagccgtgaaggctgtactctgggttagcgccgatggcctgcgcgtggtggacgagaagactaaggatctgattgtggaccagaccatagagaaggtgagcttttgcgccccagataggaacttcgaccgcgccttttcgtatatctgtcgagatggaaccacccgccgttggatttgccattgcttcatggctgtgaaggacactggggagcgcctgtctcacgccgtgggatgcgctttcgcagcatgcttagagaggaagcagaaaagggagaaagagtgtggggtgaccgccacttttgatgcttctcgcaccacatttacaagggaagggtcattccgggttacaacagcaacagaacaggccgaacgggaagagatcatgaagcagatgcaggacgccaagaaggctgaaactgataaaattgtggtgggttcaagtgtcgctccaggcaacacagctccgtccccgtcttcccctacaagcccgacaagtgacgcaaccacctcattggagatgaacaatccctag

SEQ ID NO: 127250 - DNA, 1812 bp, synthetic construct
  misc_feature 1..1812: note = Description of Artificial Sequence: Synthetic coding sequence
  source 1..1812: mol_type = other DNA
atgaataagctgcgtcagagcttccgaagaaaaaaagatgtgtacgtgccagaggcatctcggccgcaccaatggcagactgatgaggagggcgtgcgaaccgggaagtgctcctttcccgtgaaatatctgggccatgtggaagttgacgagtctcgaggaatgcatatttgtgaggacgccgtcaagaggttgaaagctgagcgcaaattcttcaagggttttttcggcaagactggtaagaaagctgttaaggcagtcctctgggtatccgccgatgggctgagagttgtggatgaaaagacaaaggatctaattgtggaccagaccattgagaaggtgtctttttgtgcacctgataggaattttgacagagcattcagctacatctgccgggatggtactacaagacgatggatatgccattgcttcatggcagttaaagacacaggagagagattgtctcacgcggtcggatgcgccttcgcggcttgcttagaacgaaagcagaaacgggagaaggagtgcggtgtgacagcaacatttgatgccagccgcacaactttcacacgggaaggttcttttagggtcaccacggccacggagcaggccgagcgagaagagattatgaaacagatgcaggacgcgaaaaaggccgaaacagataaaatcgtggtcggcagctccgtggctccaggcaacacagccccctctcccagtagccccacgagccctacatctgacgctaccacctccctggaaatgaacaaccctcacgccattcccaggcggcatgccccaatcgaacaactagcaaggcagggttcctttcggggttttcccgctctctcacagaaaatgagcccgttcaaacggcagctgagtctgcgaatcaatgagcttcccagcaccatgcaacggaaaaccgatttcccaatcaaaaatgcagtacctgaagtagaaggcgaagctgagtcaatttcgtctctgtgttcacagataactaacgccttcagcacgccagaagatcccttctcctcagctccaatgacaaagcccgtgaccgtggtagctccccagagtcctactttccagggaactgagtggggccagtccagcggggctgcatctcctgggctctttcaggctggccaccggaggaccccgtctgaggccgaccggtggctggaggaagtatctaagtcggtgagggctcagcagccccaggcctctgccgccccgttgcagcccgtactgcagcctccgcctcctacagcgatcagccagcctgcttctccttttcaggggaatgcattcctgacaagccagccagtacctgtgggtgtcgtacccgcactccaacccgctttcgtgcccgcacagtcatacccagtcgcgaacggaatgccatatcccgctccaaacgttcctgtcgtcggcatcacgccttcacagatggttgcaaatgtattcggcaccgcaggacatccccaggccgcccacccccatcagtcaccaagtctggtgcggcagcagactttcccccactacgaggcaagttctgccacgactagtcccttcttcaaaccacccgctcagcacttaaacggttcggcggccttcaatggcgtggatgacgggcgcctcgcgagcgcagaccgccatactgaggtgcccactggaacctgccccgtagacccatttgaggcacagtgggccgctctcgagaataagagcaagcaacggactaacccaagcccaactaatccctttagttccgacttacagaagacctttgagatagaattatag

SEQ ID NO: 127251 - DNA, 1923 bp, synthetic construct
  misc_feature 1..1923: note = Description of Artificial Sequence: Synthetic coding sequence
  source 1..1923: mol_type = other DNA
atgaacaaactgcgacagtcttttcgacgcaagaaagacgtatacgtccctgaagcttcaaggccacaccagtggcaaacagatgaggagggagttagaactggcaagtgcagtttcccggtgaagtaccttgggcatgttgaggtcgacgaatcccgcgggatgcatatatgtgaagatgcagtcaaaaggttaaaagctacaggaaagaaagcagtgaaagctgtgttatgggtttccgccgatgggctgagagtcgtggacgaaaagaccaaggacctcatagtagatcagacaatcgaaaaggtgagtttttgcgcccccgataggaatttcgacagagccttttcctacatctgccgtgacggaaccacgaggcgctggatttgccattgtttcatggccgtcaaggatactggagaacgactgagccatgccgtggggtgtgcatttgcggcctgtctagaacgaaagcagaagcgcgaaaaagaatgtggcgtcacagcgacatttgatgcttcaagaacaactttcactcgtgaaggctcctttcgagtgaccaccgcaacagaacaagccgaacgagaagaaatcatgaagcagatgcaggacgctaaaaaggccgaaacggataagatcgtggtggggagtagcgtagcccctggaaatactgctccctccccttcatcaccaacaagccccacatccgacgcgaccacaagcctggagatgaacaaccctcacgcaatacccagaagacacgccccgattgagcagttggccagacaggggtcattcagaggatttcccgccctgagtcaaaagatgtcccctttcaagcgacagttatccttacgcatcaatgaactccctagcaccatgcaacgtaagactgacttcccaattaagaatgcagtgcccgaggtggaaggcgaggccgagtctatcagcagcttatgcagtcagattacaaatgctttttcaactcccgaggacccgttctccagcgcccccatgactaaacccgtcacagttgttgccccacaaagtcctaccttccaggcaaacggcacagacagtgcctttcatgtgctggccaagcccgcccacacggcattagctcccgttgcaatgcctgtcagggaaacaaacccctgggcccacgcgcccgatgccgccaataaagagatagccgcaacctgcagcgggactgagtggggacagtccagtggcgccgctagtcccggcctgttccaggcagggcatagaaggaccccaagcgaagccgataggtggttggaggaagtgtcgaagtctgttagggcacagcagcctcaggcaagcgccgcccccctgcagccagtcctgcagccgccccctcctactgccattagtcagccagctagccccttccaggggaacgccttcctcaccagccagcctgtgcctgttggagtggtccccgctctgcagcctgcatttgtgcccgcccagagttacccagtagctaatggcatgccatatccagcccccaacgtgcccgttgtaggtatcaccccatcacaaatggttgccaatgtgtttgggaccgcaggtcaccctcaggccgcacaccctcatcagtccccttcactcgtgaggcagcagacgtttcctcactacgaagctagctcagccactaccagcccttttttcaagcctcctgctcagcacctgaatgggagcgctgccttcaacggagttgacgatgggcgtctggcatctgctgatagacacaccgaggtgcctacaggcacctgcccagtggacccttttgaagcccagtgggcagcgctggagaacaaaagcaaacagaggaccaatccaagccctacgaatcccttctccagcgacttgcagaaaaccttcgaaatcgaactctag

SEQ ID NO: 127252 - DNA, 1830 bp, synthetic construct
  misc_feature 1..1830: note = Description of Artificial Sequence: Synthetic coding sequence
  source 1..1830: mol_type = other DNA
atgtcacgatcagcagctgcctctggcggtcctaggcgccctgagaggcatctgcctccggccccgtgtggagccccgggcccaccagaaacttgtcgcaccgagcccgatggggccggcaccatgaacaaattgcgacagtcactacgacggcggaaacctgcgtatgtgcccgaggccagccgaccacaccagtggcaagctgacgaagacgctgtgcggaaaggcacgtgttcctttcccgtacggtatctggggcacgtagaggtggaggaatcccgcggcatgcatgtttgtgaggacgctgtgaaaaagctgaaagctatggggcgtaagtccgttaagagcgtgttatgggtctccgccgacggtctgcgcgtggtggatgacaaaaccaaggacctacttgtcgatcagaccattgaaaaggtgtcattttgcgctcccgatcgaaatctggacaaagctttctcttacatctgtcgggacggtactactcggcgttggatctgccattgtttcctcgcactgaaggacagtggagaaaggttaagccacgccgtgggctgcgcatttgccgcctgtctcgagagaaaacagcgccgcgagaaggagtgcggcgtcactgccgcctttgacgctagtaggaccagctttgcacgagaagggtcatttcgcctatcaggaggcgggcgacccgcagagcgtgaggcccccgataagaagaaggccgaagccgccgcagcacccaccgtcgctccaggcccggcacagcctgggcacgtttcccccacgcctgcgactacctcaccaggagagaaaggtgaagctggcactccagttgccgctggcactaccgcagctgcaatccccagaagacatgctcccctcgagcagctcgttcgccagggctcctttcgcggatttcccgccctttcccagaagaattcaccttttaagcggcagctgtcactcaggttgaacgaactgcctagcacactgcagcggagaaccgactttcaggtgaaaggcacagtgccagaaatggaaccgcctggagccggtgactcagactccatcaacgccttgtgcacccagataagctcctctttcgcctccgcaggtgcaccagctcctggcccgccacccgcaactactggtacttccgcctggggggagccctccgttcccccagccgctgcttttcagccagggcacaaaaggaccccttccgaggcggagcgttggctcgaggaagtatctcaggtggctaaggcacagcagcaacaacaacagcagcagcagcagcagcagcagcagcagcagcagcagcagcaggccgccagcgtggcccctgttcccacaatgccgcccgccctgcaaccattccccgcccccgtgggacccttcgacgccgcgcctgcacaggtggctgtgttcctccccccgcctcacatgcagccacccttcgtaccagcttatccgggcctgggttatcccccaatgcccagagtgcctgtcgtcggcatcacgccctcccagatggttgccaacgcattttgtagtgctgcacagctgcagccacagcccgccaccctgctcggcaaagccggtgcctttcctccacccgccatccccagcgccccaggatcacaggcaaggccacgccccaacggagccccctggcccccagagcctgcccccgcacccgctcccgagctggatccatttgaagctcagtgggccgctcttgaaggtaaagctactgtcgagaagccctctaatccattctctggggatctccagaaaactttcgaaattgagttgtag

SEQ ID NO: 127253 - DNA, 1707 bp, synthetic construct
  misc_feature 1..1707: note = Description of Artificial Sequence: Synthetic coding sequence
  source 1..1707: mol_type = other DNA
atgaataagctgcgtcaatccttacgccggcggaaaccagcatacgttcctgaagcgagtagaccccatcagtggcaagcagacgaggatgccgtgcggaaaggcacatgttccttcccggtgcgatatctcggacacgtggaagtggaggagagcagaggcatgcacgtatgtgaagacgctgtcaagaaactgaaggccatgggccgcaaatctgtgaagtctgttctttgggtttcggccgatgggctgcgtgtcgtagatgacaagacgaaggacctgcttgtcgaccagacaatcgagaaggtctctttctgtgcacccgaccgaaacttagataaagcctttagttacatctgccgcgatggaacaactagaagatggatctgtcactgtttcttagcactgaaggactctggagaaaggctttcccacgccgtgggatgcgcctttgccgcctgtctcgagagaaagcaaagaagggagaaagagtgcggagtgactgccgctttcgatgcttcacggacctctttcgcccgtgaaggctcgtttagactatccggcggcggccggcctgccgaaagagaagctccagataaaaagaaagcagaggccgcagctgcccccaccgtcgccccgggtccggcccaacctgggcacgtgtcgccaacccccgctaccaccagcccaggagaaaaaggggaggcaggcacccctgtagccgccggcaccactgcagccgctattcctagaaggcatgcaccactggagcagctcgtccgccaggggtctttccgtggatttccagctctgagtcagaaaaactcccctttcaagaggcagttgtctctgaggctgaacgagttgccgtccaccctccaacggcgtacagacttccaggtcaagggtactgttcctgaaatggagcctcccggagccggggattctgattctatcaacgccctgtgcacccagatctcttcgagctttgccagcgcaggtgctcctgcaccaggtcctccacctgcaaccaccggcacgtctgcctggggcgagcctagcgtgccgccagctgcggcctttcagcctggacacaagcgcaccccatcagaggctgaaaggtggttagaagaagtttcacaggtagctaaggcacagcaacagcagcaacagcagcagcagcagcagcagcagcagcaacagcagcaacaacaagctgcctccgtagcccctgttcccactatgcctcctgcactccagccattccccgcacctgtgggccctttcgatgctgcccctgcacaggtcgccgtgttcctgcctcctccacacatgcagcctcccttcgtgcccgcttatcccggcctgggttatccacctatgcctagagtccccgtcgtcgggataaccccgtctcagatggtagcgaatgccttctgttctgccgcacagctccaaccacagcctgctaccctgctaggtaaggcgggagcattccccccccccgcaatcccaagcgcccctggctcccaggctcgtccccggccgaacggggccccatggccaccagaaccagcccctgccccagcaccggagcttgatcctttcgaagcacaatgggcagcgcttgaaggaaaggctacagtggaaaagccttcaaaccccttttcaggcgatttgcagaaaacattcgagatcgagctctag

SEQ ID NO: 127254 - DNA, 1446 bp, synthetic construct
  misc_feature 1..1446: note = Description of Artificial Sequence: Synthetic coding sequence
  source 1..1446: mol_type = other DNA
atgaaaggtcgggggatgttggtcttactgctccacgcagtggtgctggggctaccatcagcttgggcagtgggcgcctgcgccagggcttgtccagcagcttgcgcatgttccacagtggagagggggtgcagtgtcagatgcgacagagctgggctcctccgcgttccagccgaactcccatgcgaggctgtaagtatcgatctggataggaacggcttgcgattcttaggagagcgcgcctttgggactctgccgtccctacggagactgagcctgaggcataataaccttagttttattactccaggagcttttaaaggcctgccgaggcttgccgagctgcggctagcccacaatggcgacttgagatacctccacgcccgaacatttgcagctttaagtcgcctgcgccgactcgacctggctgcctgtaggctcttcagcgtgcccgaaaggcttctggccgagctcccagcccttcgcgaacttgctgcattcgacaatttgtttaggcgggtccctggagcacttcggggcctcgctaacttgactcacgcgcatctggaaagggggcggatcgaagctgtcgcctcgagctcattacaggggttgcggagactgcgctccttatcattgcaggcaaaccgggtcagggcagtgcacgcgggcgcatttggggactgtggtgtgctcgaacaccttcttttaaacgacaacttgctggccgagttgccggccgacgcattccgtgggctgaggcggctgaggactctgaacctgggcgggaacgcactcgaccgagtggcacgcgcatggtttgccgacctcgcagagctggagctcttatatttggaccgaaactcaattgctttcgtcgaagagggcgcgttccagaatttgtctggcctgctggctctccacctcaatggcaaccgtttgactgtgctggcttgggtggctttccagcccgggttcttcctcgggaggctgttcctctttaggaacccctggtgctgtgactgtagactagagtggctgcgggattggatggagggctcggggcgggtgaccgatgtgccttgcgcctctccagggagcgtagctgggttggatctatctcaggttactttcggtaggagctccgacggtctctgcgtagacccagaagaactgaacctcactacgtcatctccagggccaagccccgagcccgccgcaacaaccgtgagccgcttctcctcactgctgtcaaagctccttgccccaagggtgccagtggaggaggccgctaatacaacaggcgggttggctaacgcttccctgtccgattctctgagttcccgaggggtcggtggagctggtcggcagccatggttcctgctcgcgtcgtgtcttctcccttctgttgcccagcacgtagtctttgggctgcagatggattag

SEQ ID NO: 127255 - DNA, 1446 bp, synthetic construct
  misc_feature 1..1446: note = Description of Artificial Sequence: Synthetic coding sequence
  source 1..1446: mol_type = other DNA
atgaaagggcgaggaatgcttgtgcttctcctccacgcggtggtcctgggcctaccatccgcatgggctgtgggggcgtgtgcccgtgcctgccccgccgcttgtgcctgttccacagtcgagcgagggtgcagtgtaaggtgcgaccgcgccgggctcctgagagttcccgcagagttaccgtgcgaggcggtttctattgatctcgatcggaacggcctgcgatttctgggtgaaagagccttcggaaccctaccctcactgcgccggctgtctctgaggcacaataacctctccttcatcactcctggcgctttcaagggactcccccgcctggccgagctgaggctggctcacaatggggatcttcgctatttgcatgctcggacctttgcagcactgagtcgcttacgtcggctggacctggccgcttgccgccttttctccgtccccgagcgactcctggctgaactgcctgctctgcgggagctcgccgcttttgacaacctgttcagacgcgtacccggtgccctaagagggctggccaacctgacccacgcacacctcgaaagaggacgcattgaagcggtggcgtcctccagcctacagggactgcggagattgcgtagcctgtccctgcaagccaacagggtacgagccgtccacgctggagcctttggagattgtggtgtcctggaacacctgctgttaaacgataacctgctcgcagagctgccagccgatgccttcagagggttacggcgcctgcgcactctaaatcttggtggtaacgccctggacagagtggcaagggcctggttcgctgacctcgcagaattagaattgctgtacctggatcgaaacagtatagcttttgttgaagaaggcgcttttcagaacctaagtggcttgcttgccctccacctgaacgggaatcgtctgaccgtgctggcctgggtggctttccagcctggtttcttcctcggacgcctatttctctttaggaatccctggtgctgtgactgtcgtctcgagtggctccgcgattggatggaggggtcaggaagggtcactgatgtcccctgcgcatctccgggttccgtggcaggtcttgatctgtcccaagttacatttggcaggtcctctgatggcctttgcgtggatccggaggagctgaacttgaccacctcatcccccggtccaagcccagaaccagctgctacaacagtgtcaagattttcttctttgctgtctaagctcctcgcccctcgtgtacctgtcgaagaggcggccaacacaacggggggactggcaaatgcttcactgtccgactctctgtccagtcgaggcgttggcggagcaggcaggcaaccgtggttcctgctagcatcatgcctcctgccgtcagttgcccagcatgttgtcttcggccttcagatggattag

SEQ ID NO: 127256 - DNA, 1191 bp, synthetic construct
  misc_feature 1..1191: note = Description of Artificial Sequence: Synthetic coding sequence
  source 1..1191: mol_type = other DNA
atgccaccgaagaagggaggtgacggcatcaaaccacccccgattatcggccggtttgggactagtctgaagatcggaatcgtgggtctgccgaacgtcgggaaaagtacattcttcaatgtacttaccaacagccaggcttcggcagaaaatttccccttttgcacaattgatcctaacgaatccagagttcccgtaccagatgagaggtttgattttctctgtcagtatcataaacctgcgtcaaaaatccctgccttcttaaatgtggtcgatatcgctggactggtcaagggcgctcataacggacagggtctgggcaatgccttcttgtctcacattagtgcatgcgacggaatcttccatcttacccgggcttttgaagacgacgacattacgcatgtggagggttctgttgaccctatccgcgacattgagattattcatgaggaattgcagctgaaggacgaggaaatgattggcccaatcattgataagcttgaaaaggtggctgtgcgggggggcgataagaagctgaaacccgaatacgacattatgtgtaaggtcaaaagctgggtcatcgatcaaaaaaaacccgtcaggttctaccacgactggaacgacaaagaaattgaggtgctgaataagcacctgttcctcaccagtaagcctatggtgtacctcgtgaatctaagcgagaaggactacatacggaagaaaaataagtggctaattaaaatcaaggagtgggtagacaagtatgaccctggggccctggtcattcctttcagtggagcccttgaattgaaactgcaagaacttagcgctgaagagagacaaaaatatttagaggctaatatgacacagagtgcactacctaaaatcatcaaggccggttttgcggctttgcaactggagtatttttttacagcaggacccgatgaggtgagggcctggaccattcggaagggtacaaaggctccacaggcagctggcaaaattcacacagattttgaaaagggattcataatggcagaagtcatgaaatacgaagattttaaggaagagggtagcgaaaacgccgtcaaggcggccggcaaatataggcagcagggaagaaattatatcgttgaagacggagacattatttttttcaagtttaataccccgcagcaacccaagaagaaatag

SEQ ID NO: 127257 - DNA, 717 bp, synthetic construct
  misc_feature 1..717: note = Description of Artificial Sequence: Synthetic coding sequence
  source 1..717: mol_type = other DNA
atgattggaccgatcatcgataagctggagaaggtggccgtcagaggcggcgataaaaagttaaaaccagagtacgacattatgtgtaaggttaaatcctgggtgattgatcagaaaaagcctgtgcgcttctaccacgactggaatgacaaggagatcgaggtgcttaacaagcatctgtttttaacctctaaacctatggtttacctggtgaatttatccgaaaaagattacatcaggaagaagaacaaatggctgattaaaataaaggaatgggtggacaaatatgacccgggcgcactggttattccattttccggcgcgctcgagcttaagctccaagaactgtccgcggaggagagacagaaatatctggaggcaaacatgacccagagcgcactgccaaagataattaaagcagggttcgccgcattgcaactggagtacttttttacggccggccccgatgaagtccgtgcctggacaatcaggaaggggactaaagcccctcaagcagccggcaagatccacacagactttgaaaaggggtttattatggctgaggttatgaaatatgaggacttcaaggaggagggatcagagaatgccgtgaaggctgccgggaaatacagacagcaggggcgcaattacatagtggaggatggagatattatcttttttaaattcaatacacctcagcagccaaagaagaagtag

SEQ ID NO: 127258 - DNA, 1251 bp, synthetic construct
  misc_feature 1..1251: note = Description of Artificial Sequence: Synthetic coding sequence
  source 1..1251: mol_type = other DNA
atgtcaaggactttctctgccaaaggagggagggacctggtggaaggcccccagtatctcatgccaccgaagaagggcggcgacggaataaagcctccacccattattggtaggttcggcacaagcttgaagatcggcattgtggggttgcctaatgtcggtaagtccacgttcttcaacgtactgacaaacagtcaagctagcgcagagaatttccctttctgcacaatcgatcctaacgagtcacgagtccctgtgccagatgaacggttcgatttcctctgtcagtaccacaaacccgccagcaaaatcccagcatttcttaacgtggtggatatcgctggactcgtcaaaggggctcacaacggacaaggtctcggcaatgcattcttgtctcacattagcgcttgtgatggcatcttccaccttacccgggccttcgaggacgacgacattacgcacgtggaaggatccgtggacccaatacgggacatcgagataattcacgaggaactgcagttaaaagatgaggaaatgatcggaccaattatcgacaaactggagaaggtggccgtgcgcgggggcgacaagaaactgaagcccgagtacgatatcatgtgtaaagtgaagtcctgggtgatcgatcaaaaaaaacctgtgaggttctatcacgattggaatgataaggagattgaggtcctgaataagcatttgtttctgacttctaagcctatggtgtatttggtgaacctgtctgagaaagattacattagaaaaaagaacaaatggctgataaaaattaaggagtgggtggataagtatgacccaggggctctggttattcctttttctggcgcccttgaactgaaactgcaggagcttagtgccgaggagaggcaaaaatacctcgaggcaaatatgacacagtccgctctccctaagataattaaggctgggttcgccgctttgcagcttgagtacttttttacggctggacccgatgaagtgagggcctggaccattcgaaagggtacaaaggcgcctcaagcagccggtaagattcatacagattttgagaaaggcttcatcatggcagaggtaatgaaatacgaagacttcaaggaggagggctcagagaacgccgtgaaggctgcaggaaaataccgtcagcagggccggaactacattgtggaggacggagatatcattttttttaagtttaacaccccacagcaacccaagaagaagtag

SEQ ID NO: 127259 - DNA, 351 bp, synthetic construct
  misc_feature 1..351: note = Description of Artificial Sequence: Synthetic coding sequence
  source 1..351: mol_type = other DNA
atgccaccaaagaaggggggggacgggatcaagcctcctccgattatcggtcggtttggtaccagccttaagattggcattgtgggcctccccaatgttggaaagagtacttttttcaatgtgctgaccaactcccaggcctcagcagagaatttccctttctgcacaatagaccccaacgagtccagagttcctgtgccagacgagcgctttgacttcctctgccaatatcataaacccgccagtaaaatcccagcattcctgaatgtggttgatatagcgggtcttgtgaaaggcgcccacaacggacaaggactgggcaacgccttcctcagccacatcagtgcatag

SEQ ID NO: 127260 - DNA, 837 bp, synthetic construct
  misc_feature 1..837: note = Description of Artificial Sequence: Synthetic coding sequence
  source 1..837: mol_type = other DNA
atgccgcctaagaaggggggcgatggtataaagccacctcccataatagggcggtttggcaccagtctgaaaattggaattgtcgggctgcctaatgtcggaaaaagcacttttttcaacgtcctgacaaacagccaggcatctgccgagaactttcctttctgtacaattgatcccaatgagtctcgtgttcccgtccctgatgagcggttcgacttcctgtgccagtaccacaagccagcctcgaaaatacctgcatttcttaacgttgtggatattgcagggttagttaagggcgctcacaatggacaggggttaggaaatgcattcctgtcccatatcagcgcatgtgatggaatctttcatctgacccgcgcctttgaggacgacgatattactcatgtcgaagggtcagttgacccaataagagacatcgaaattattcatgaggagctgcagctcaaagatgaggaaatgatcggaccaatcatcgataaactcgaaaaggtcgctgttcgcggaggggacaaaaaactgaagccggagtacgacataatgtgcaaggttaagagttgggtgattgatcaaaagaaacccgtgcgcttttatcacgactggaatgacaaggagatcgaagtgctgaataagcatctctttctgacctcaaagccaatggtgtatttggtgaatttgtccgagaaggattacatccgcaagaagaataaatggttgttggaaagcaccgacaataaagcagagatcatcctcctaaaaatggagatattgagtagtagcaatctgacacatctgaataaccgacgcagaaacaaaatctag

SEQ ID NO: 127261 - DNA, 312 bp, synthetic construct
  misc_feature 1..312: note = Description of Artificial Sequence: Synthetic coding sequence
  source 1..312: mol_type = other DNA
atgataggacccatcatcgataaattggagaaggtggccgtccggggaggagataagaagctgaaaccggaatacgacataatgtgcaaggtgaagtcttgggtcattgaccagaagaaacccgtgcgtttctaccacgattggaatgataaggaaatcgaagttctgaacaaacacctgttccttacgtcgaaacccatggtctacctggtcaatttatctgaaaaggactacatcagaaagaaaaacaaatggcttattaagataaaggagtgggtggacaagtacgatccaggagccctggttatctag

SEQ ID NO: 127262 - DNA, 1329 bp, synthetic construct
  misc_feature 1..1329: note = Description of Artificial Sequence: Synthetic coding sequence
  source 1..1329: mol_type = other DNA
atgtgcgaactgagccgggaagatgcaccggtgagatggtacaaggacggacttgaagtggaagagagcgaagccctcgtccttgagcgagatgggccaaggtgccggcttgtcttaccagcagcgcaacccgaagatggtggtgaatttgtgtgtgatgcaggcgacgacagcgcctttttcacagtcactgtgacggcacctcctgaacggatagtgcaccccgcagctaggtccctggatcttcacttcggtgcccccggccgagtagagctccggtgtgaagttgcacccgccgggtcccaggtgcgctggtataaggatggactggaggtcgaggcaagcgacgctctgcagctaggggcagaggggcccacgagaacccttacactgccccatgctcagccagaagatgctggcgagtacgtttgtgaaactcggcatgaagccatcaccttcaatgtaatcctggccgaaccccccgtgcaattcttggcccttgagaccacgccaagtcctctatgtgtcgcacccggtgagcccgtggtcctaagttgcgaattgtcacgggccggcgcccctgtggtgtggagccacaacggccgccctgtgcaagagggggagggtctagaactccacgccgagggtcctagacgggttttgtgcatacaggccgccggcccagcacatgcaggcttgtatacttgtcaaagtggcgcagcacctggggccccctcactatccttcactgtgcaggtggctgagccccttcttgttaagctggtgagtgaactcacccctctgactgtccacgagggagatgacgcgacgtttaggtgtgaggtgtctccacccgacgccgacgtgacatggctccggaacggagcggtagttaccccggggccccaagtggaaatggctcagaacgggtcaagccgcatcttgacactcagaggatgccagcttggggacgctgggactgtgactttgcgggctggatcaacagctacatctgcccggctacacgtgcgggagacagagttgctgttcctgcgtcgcctgcaggatgtgcgggctgaagaaggccaagatgtttgtcttgaagtggaaacgggtcgggtgggcgccgctggtgctgttcgctgggtccgcggcggtcagcccttaccacatgacagccggttgtccatggcccaggacggccacatccacaggctctttatacatggagttatacttgccgaccagggaacctacggctgtgagagtcatcacgaccgtaccctggctaggctaagtgttcgtcgggaatgcccagtcctgagctag

SEQ ID NO: 127263 - DNA, 4206 bp, synthetic construct
  misc_feature 1..4206: note = Description of Artificial Sequence: Synthetic coding sequence
  source 1..4206: mol_type = other DNA
atgaaggccagttctggggatcagggctcgcctccatgttttttgcggtttcctagacctgtgagggttgtttccggcgccgaggcagaactgaagtgtgtagttctgggcgagcctccgcccgtcgtcgtttgggaaaaaggtggtcagcagttagctgcgtctgagcgattgtcgttcccggccgatggagctgaacacgggctgctgctgaccgctgctctgcccacagacgctggggtgtatgtatgtagggccagaaacgccgcaggcgaggcctacgccgccgccgctgtcactgtcctcgagcctcccgcaagcgaccccgagttacaacctgcagagagaccacttccatccccggggagcggagaaggagcaccagtgttccttactgggccccgctctcaatgggttttgagaggtgcagaagtggtgttgacctgtcgcgcgggaggactccctgaacctaccctgtactgggaaaaggacggcatggcgctggatgaagtgtgggacagcagtcactttgcactgcagccgggacgtgctgaggatgggccaggtgcatcacttgcgctaagaatcctggccgctcgactgcctgactcaggggtgtacgtgtgccacgctcggaatgctcatggtcatgcccaagctggggctctcttgcaggtccaccagcctcctgagagtccacctgcagaccctgacgaggcaccggctccggtagttgagcctctcaaatgcgcaccgaagactttctgggtgaatgaaggaaaacacgctaagtttcggtgctacgtgatgggaaagcccgaaccagaaatcgaatggcattgggaggggcggccactactgccggaccggcggcggctgatgtatagagacagagatggcgggttcgttttgaaagtgctgtactgtcaggcaaaggaccgggggctgtacgtttgtgccgcccgtaacagcgctggccagaccctgagtgccgtccaacttcacgtgaaggagcctcgactgaggtttactaggcccctgcaagatgtcgagggcagggaacatggaatagccgtgctcgagtgcaaagtccccaattcccgcatacccacagcatggtttagagaagaccagcgtctgctgccctgtaggaagtacgagcagattgaggaagggacggttagacggctaattattcacagactgaaggccgacgatgacgggatctatctgtgtgagatgcggggacgagtccggactgtggctaatgtgacagtaaagggcccgattctaaaacgcctaccacgcaagctggatgtgttagagggagagaatgctgttcttcttgtggagacccttgaggcaggagtcgagggaaggtggtccagggatggtgaggagctccctgtgatatgccagtccagctccggacacatgcatgccctggtgcttcctggcgtgacacgggaggatgccggcgaggtcaccttctctctcgggaactcccgaaccactaccttactgagggtcaaatgcgtcaagcattccccccccggtcccccaattctggccgagatgtttaagggacacaagaataccgttctcctgacctggaagccacccgagcccgcgcctgagaccccctttatttacagacttgaacgacaggaagtaggttcagaggattggattcagtgtttctcaatcgaaaaagccggagctgttgaggtaccaggtgattgcgtcccctccgagggtgactaccgcttccgtatctgcactgtgtctgggcacggcaggtcccctcacgtggtgttccatggatctgcccacttagtgccgaccgcccgactggtggctggtctggaagacgtccaggtgtatgacggcgaagatgctgttttctcgttggatcttagtacaatcatccagggtacatggttcctgaatggggaagaactgaaatccaacgaaccagaaggccaggtggagcccggcgctcttcgctatagaatcgaacagaagggcctgcaacatcgcttaatactgcacgccgttaaacatcaggactctggtgccctcgtgggcttttcatgtcctggtgttcaggatagcgccgcattaaccattcaagagtcccccgtgcacattttgtctccccaggatcgcgtcagcctgacctttacaacaagtgagcgggttgttctcacttgcgagctctctcgagtggacttccccgctacctggtacaaagacggccagaaggttgaggaatctgagctcttagtcgtgaaaatggacggaaggaaacaccgcctcatactgccagaagccaaagttcaggattccggtgagtttgagtgtagaactgaaggcgtcagcgccttcttcggtgtaaccgtgcaagatccccccgtccacatcgtggatccaagggagcatgtctttgttcacgcaattacttcagagtgcgtgatgttggcttgtgaggtcgatcgcgaggatgctcccgtgaggtggtacaaggatggacaggaggttgaagagagcgattttgtagtgctggagaatgaaggaccccaccgtagactggttctgccagctacacagccttctgacggaggggagttccagtgcgtggctggagatgagtgcgcatacttcacagttacaatcacagacgtaagcagctggatcgtgtaccctagcggaaaggtctatgtagctgctgtgagactggagagagttgtgctgacatgcgagctatgtaggccatgggccgaggtgcgctggacaaaggacggggaggaggtggtcgaatcacccgccctgttgctgcagaaggaagacactgtgaggcgcctcgtgctccctgcggtccagctggaggacagtggcgagtacctctgcgagattgacgacgagtccgccagttttactgtgacagtgacagagcctcccgtgaggatcatctatccacgtgacgaggtgacgctgatcgccgtcactttggagtgcgtggtcctgatgtgcgagttaagcagggaagacgccccagtgcggtggtataaggacggtctggaggtagaggagagcgaagctctggtgcttgagcgagatggtccacgatgtcgccttgtgctccccgcagctcaaccggaggatggaggggagttcgtctgcgacgctggagatgactccgcctttttcacggtcacagttacagaaccacccgtgcagttcctcgcactggaaacaaccccatcccctctgtgcgtggcaccaggggagcctgtagtgctgtcctgcgaactgagtagggctggagcaccagttgtgtggagccacaacgggcggccagtccaggagggggagggactcgagctgcatgccgagggacccaggagagtattatgcattcaggctgctggtccagcacacgctggactatacacctgccagtccggggccgcaccaggagcccccagccttagcttcactgttcaggtggcggaaccaccggtcagagttgtcgctcctgaggccgctcaaactagggtacggagtacacctgggggggacttagagctggttgtccatctatcaggacccggggggcctgtccgatggtataaggatggggaaaggctcgctagccagggtcgagtccagctggaacaagctggagctagacaggtgctccgtgtgcagggggcccgctccggcgatgcaggggagtacctgtgtgacgcacctcaagacagcagaattttcctcgtgtcagtggaggagccactcctcgtcaagctggtaagcgagctgacaccgctgacagttcacgaaggagacgatgctacgttccggtgcgaagtcagcccgccagacgccgatgtcacttggctcaggaacggggcggtggtcactcctggccctcaacgccagtcatgctgctcatatggagggtgtaggatgtgtggccagcggaaagcccggatgtgcgtaagtaagtggcgacaagcagaatgggtgcaaagaggaccctgtgcagggtgcgaagtaggttctccctgtccaactaccttggcttgcccctggcccagaatgggaacctctacagcttcctcctcgatggtgtcttattggcccactcgcgcccctacagcagcccgcgccaccactatcgcgccttggccggggagcgcttag

SEQ ID NO: 127264 - DNA, 3078 bp, synthetic construct
  misc_feature 1..3078: note = Description of Artificial Sequence: Synthetic coding sequence
  source 1..3078: mol_type = other DNA
atgaaggcttccagtggtgatcagggcagcccaccctgcttcctccgatttccgagaccagtcagagtggtctcaggagccgaagctgagttaaagtgcgtcgtcctgggtgaacccccccctgtggtggtatgggagaagggagggcagcagctggccgcatctgaacggctcagcttccccgcagacggcgctgagcacggtctgctactgacagctgccctgcccacagatgctggagtgtacgtgtgccgtgcacgcaacgctgccggcgaagcgtacgccgcggcagcagtaacagtcctggaaccgcccgcttccgaccctgagctccagcctgccgaacggccattaccgagcccagggtcaggtgaaggagcccccgtgttcctgacaggccctcgtagccagtgggtgctgcgcggcgccgaggtcgtccttacgtgtcgggctgggggcctacctgagccaacgctgtactgggagaaagatgggatggcacttgacgaggtatgggattccagccatttcgctttacagcccgggagggccgaggacggacccggtgcttcattagcgctgcggatcctggcagcaagactccccgattccggcgtgtacgtatgccacgcgcggaacgctcacggccacgctcaggccggggcgctgctacaggtacatcaacccccggagtctccgcccgctgatccagacgaggccccagcccctgttgtcgaaccattgaagtgcgcccctaagaccttctgggtgaacgaaggtaagcatgccaagttcaggtgctacgtgatggggaagccagagccagagattgaatggcattgggaggggcgccccctgctgccagatagacgccgcttgatgtacagggatagggatggcggcttcgtgctgaaggttctctactgtcaagccaaggaccgggggctctacgtgtgtgctgcaaggaactctgccggccagaccctgagtgctgtgcaacttcatgtgaaggagcctcgccttaggtttacacgtccccttcaggatgtcgagggccgcgagcatggaattgccgttctagagtgcaaggtaccgaactcccggattccaaccgcctggtttagggaggatcagagactgctcccctgccgcaaatacgaacagatcgaggagggtaccgtcaggagattgatcatccaccggctcaaagccgatgatgacggcatttatctttgcgaaatgagaggccgtgtccgcaccgtggccaacgtgactgtgaagggaccaattctgaaaagacttcccagaaaattggatgttctggagggagaaaacgccgtgctgctggtagaaaccctcgaggccggcgtcgaggggcggtggagtagggatggcgaggagttaccagtgatctgtcaatcatccagcggccatatgcacgctcttgtactgccaggagttaccagagaggatgcgggagaagtcacgtttagtctgggcaactcgcgaactacaacactgctccgcgtcaagtgtgtgaaacattctccacccggccctccaattcttgcagagatgttcaagggccacaagaatacagtgctcctcacctggaagccacctgagcctgcccctgaaaccccattcatttatagactggagcgacaagaagtgggaagtgaagactggatacaatgcttttccattgagaaggccggggccgtggaagtccccggggactgtgttcccagtgaaggcgactacaggtttcgtatttgtacagtgagcggtcacggacgcagcccgcacgtggttttccacggcagcgcccatttggttcctacagcacggctggtggctggcctagaggacgtgcaagtgtatgatggtgaggatgcggtttttagcctcgatctgtcaactattattcagggtacctggtttttgaatggcgaggaactgaaatcgaatgagccagaagggcaggtcgaacccggggcactgagatataggatcgagcagaagggcctccaacaccggctgatccttcacgccgttaagcaccaggattctggggctctcgtggggttttcatgtccgggcgttcaggacagcgccgccctgaccattcaagaatcccccgtccacatcctctcccctcaagatcgggtgagcctgactttcactacaagcgaacgagtagtactcacttgtgagctttccagagtggactttcctgccacatggtacaaggacgggcagaaggtagaagagtcagagctgctggtggtgaaaatggacggcagaaaacaccggctaatactgccagaagcaaaagtgcaggactccggtgaattcgagtgcagaacagaaggtgtgagcgccttcttcggtgtgaccgtccaggacccccccgtccatattgtagatccccgcgagcatgtgtttgtgcatgcgataacctctgagtgcgtgatgctggcttgcgaagtggacagggaagacgcgcccgttcgttggtacaaggacggccaggaggtcgaggaatcagactttgttgtactcgagaacgaagggcctcatcgacgattggttcttcctgccactcagccctctgacgggggcgaatttcagtgcgtcgcgggagacgaatgcgcctacttcacggtgacaataaccgacgtgtccagttggattgtgtacccttccgggaaagtgtatgtagccgcagtgcgcctcgagcgcgttgtcctcacttgcgagctgtgcagaccttgggcagaggttagatggacgaaagatggcgaggaggttgtagagagcccagccctgttactgcagaaagaagacactgtgcggcgattggttttgcctgccgtgcagcttgaggattccggtgagtatctatgtgagatcgacgatgaatctgctagtttcacagtcaccgtcaccgaaagctaccaaagccaggactctagtaacaacaatccagaactatgtgtcctacttaaaaagccaaagacccggcggctctggtcaagattcccgccttggagaaggaccgctggcacagaatag

SEQ ID NO: 127265 - DNA, 5691 bp, synthetic construct
  misc_feature 1..5691: note = Description of Artificial Sequence: Synthetic coding sequence
  source 1..5691: mol_type = other DNA
atgaaagccagctcgggtgatcaaggttctcctccctgttttctgcgattcccacggccggttcgggttgtttccggggccgaggctgagctaaagtgtgtggtgcttggcgagcccccccctgttgtcgtgtgggagaaagggggacagcaactcgctgcctctgagcgcctctccttcccggctgacggcgccgagcacggcctactgctgactgctgctctgcccacagatgctggagtatacgtgtgtcgcgcccggaatgccgccggtgaagcatacgcggctgccgcagtgaccgtcttagagccacccgctagtgatcccgagctgcagccagctgaaagacccttgccctcccctggatctggcgagggggccccggtttttttgaccgggccaaggagtcagtgggtgctgcggggcgcggaggtggttctaacgtgtcgggccggaggactcccagagccgaccctctattgggaaaaggacggtatggcactggacgaggtctgggactcttcgcacttcgccctgcagcccggaagggctgaagatgggcctggcgcgtccctggcgctcagaattttggccgcgaggctccccgatagtggtgtgtatgtgtgtcacgctcgaaacgctcacggccacgcacaggcaggtgccctcttacaggtacaccagcctccggaatctccacccgctgatcctgatgaggcacccgcccctgtcgtggaacctctaaaatgcgccccgaaaactttctgggtgaacgaaggtaagcacgctaaattccgctgttatgtgatgggcaaacccgaacctgagattgagtggcactgggaaggtaggccactgctccctgatcgacgaagattaatgtatagagacagggatggcggtttcgtcctaaaagtcctctattgtcaggccaaagatcgaggattgtacgtgtgtgccgctcgcaacagcgctggccagactctgtccgccgttcagctgcacgtgaaggagcctaggcttcgctttactcggcctctccaggacgtggaaggcagagagcacggcatcgccgtgctggagtgtaaggtgccaaattccagaattcctacggcatggttccgagaggaccagcggctccttccttgcaggaagtacgagcagatagaggaggggactgtcaggcgcctgataatccacagactaaaggctgacgacgatgggatttacctttgtgaaatgagaggtcgcgtcagaaccgtggcaaacgtgactgtcaaaggccctattctgaaaagactacctcgcaagcttgacgtgttagagggagaaaacgccgtgctgttagttgagaccttagaggcgggtgttgagggcaggtggtcaagagatggcgaagagcttcccgtgatctgtcagtcctcctccggccatatgcacgcccttgttctacctggagtcacaagagaggacgccggcgaggtgactttttccttgggaaattctcgcacaaccacccttctgagagtcaaatgcgttaagcattcccctcctgggcccccaattctcgccgagatgttcaaagggcacaaaaatactgtgctgttaacctggaagccgcctgaaccagcccctgagactccctttatttatcgcttggaacgacaggaagtagggtcggaagattggatccagtgcttctcaatcgagaaggccggcgcagttgaggtgcccggcgactgtgttccttccgaaggggactatcggtttcggatatgtactgtgtcaggccacggacgttcaccacacgtggtgtttcacgggtcagcccatcttgtgcctactgccagactcgtggcaggattggaggacgtacaagtttacgacggcgaggacgctgttttttctctggatttgagcaccatcatccagggcacatggtttctgaacggtgaggagctgaagagcaacgagccagagggacaggtcgagccaggcgctctgcggtaccggatcgagcagaagggtctacagcaccgcctgatcttgcacgcagtcaaacatcaggactctggcgcgttagtcggattttcgtgtcccggagtgcaggattccgcagccctgactattcaggagtcaccagtccatatcctgtctccgcaggacagggtttccctcacttttactacatcagaaagagttgtattgacctgcgaattgagtcgcgtggatttccctgccacttggtataaggacggccagaaagtcgaggaatctgaacttctggttgtcaagatggatgggaggaaacataggttgattctgcccgaagcaaaggtccaagattctggcgaatttgaatgccgcactgagggagtgagtgcatttttcggggtcaccgtccaggatccacctgtgcatatcgtcgacccccgggagcacgtttttgttcatgcaattacaagcgagtgtgtaatgttagcctgcgaagtagaccgcgaggatgcccccgtcagatggtataaagacggacaagaagtcgaggaatccgattttgttgtactggaaaatgagggcccacaccgccgtcttgtgctgcctgctactcagccatccgacgggggggagtttcagtgcgtggcgggtgacgagtgcgcttatttcaccgttacgattaccgatgtgagttcttggatcgtctatccctccgggaaagtgtacgtagcagccgttagactggagcgggtggtccttacctgtgaactttgtagaccatgggctgaagtgcggtggactaaggatggggaggaggtggtcgagtcacctgccctccttctccagaaggaggataccgtgagacggctcgttttgcccgccgttcagctagaggatagcggtgagtacctctgtgaaatcgatgacgagtccgcctccttcactgtcactgtgactgaacctccggtaagaatcatctaccctcgcgatgaggtgactctgattgctgtcacattggagtgcgttgtgttgatgtgtgagctgtccagagaagacgcgcccgtacggtggtacaaagacggcctagaagtcgaggaatcagaagccttggtgctggaacgagacggccccagatgccggctggttctgccagcggctcagccagaggatggaggcgagttcgtctgcgatgccggtgatgatagcgctttttttactgttacggttacggccccaccagaacgaattgtgcatcccgccgcacgctccctggacctgcacttcggggcccctggacgggtggaattgcgatgcgaagtggctccagccggctctcaagtaagatggtacaaagatggcttagaagtggaggccagcgatgccttgcagctgggcgccgaaggccccacgagaacgttgacgctgccacatgcccaacctgaggatgctggagagtacgtatgtgagacaaggcatgaggccatcacctttaacgtcatcctagccgaacccccagtgcaattcttggcactcgagactactccctcccctctctgtgtagcacccggcgagcccgtggttctcagttgtgagctgtcacgggctggggctcctgtcgtgtggtctcacaacgggcgcccggtgcaggagggtgaaggtctcgaattgcacgcagagggcccaaggagagtcctgtgtatccaagctgctggcccagcgcatgctggtctgtatacttgtcagtccggtgcagcccctggcgccccatctctatccttcacagtgcaggtggcggaacctcctgtcagagtagtggcccccgaagcagcgcagactcgggtgcgcagtacgccgggaggggatttggaactggtggtgcacttgagcgggcccggcggaccagttcgctggtacaaggacggcgaacgcctcgccagtcaagggcgtgtgcagctagagcaggcaggtgcccgacaagtcctgagagttcagggcgctcggtccggggacgccggggaatacttgtgtgatgctccccaggattcaaggatattccttgtaagcgttgaagagcccctgcttgtcaagctcgtttccgagctgacaccactcaccgtacatgagggggacgatgcaactttccggtgtgaggtgagcccccctgatgcagacgttacatggctgaggaatggtgcggtggtgacacctggtccccaagttgagatggctcagaatggttctagccgaatattgaccctgcggggctgccaactgggcgatgcaggcacagtgacgcttcgagctggatctacagcaacttccgctagattgcatgtgcgtgaaaccgaactgctgttcctacgcaggctccaagatgttcgggccgaagaggggcaagacgtgtgcctcgaggtcgaaactggaagggtgggcgctgcaggtgccgttaggtgggtgagaggtggacagcctctgccccatgacagtagactaagcatggctcaggacggccatatacaccgcctctttattcacggagtgatcctggccgaccagggcacttacggctgcgaaagccatcatgatcgcactctggcgcgcctgagcgtgcgccctagacagctcagagtcctgcgtccactcgaagacgtgaccatctcagaaggtggtagtgctacctttcaactggagttaagtcaggagggcgtcaccggggagtgggccagaggcggcgttcagctttacccagggcctaagtgtcacatccatagtgacggccaccgccatcgtctggtgctaaacggactaggactggctgactctggatgtgtatcgttcaccgctgacagccttcggtgcgccgctcgcctgatagtgcgtgaagtccccgtcactatcgtccgaggacctcacgacctggaagtgaccgagggggacaccgcaacatttgaatgcgagctgtcccaggccctggcggatgtcacctgggaaaaagatggtaatgccctgacaccatcaccccgtctgcgactgcaagcacttggtactaggcggttgttgcaattgagacggtgtgggccttcagacgcaggcacttattcatgtgccgttgggaccgctcgggccggccctgtgaggttaacagtgcgagaacgaaccgtcgcggtgctcagcgagcttagatccgtctccgcgcgggaaggagatggtgctacattcgaatgtactgtgagtgaagtggagactacagggcggtgggagcttggcggcagaccactgcgtccaggtgccagggtaagaatccggcaggaagggaagaagcacatattagtgctgtccgagctccgagctgaggacgctggggaagtgcggttccaggccggaccagcacaatcactggcacttctggaagttgaggcgcttcccctgcagatgtgtcgccaccctcctcgggagaagacagtcctggttggtcgacgggccgtgttggaggtcacagtctcacgatctggcggacatgtgtgctggctgcgtgaaggcgccgaattgtgcccaggagacaagtatgagatgcgatcccatggtcctactcactcgctggtcattcatgacgtgagacctgaggaccaggggacctactgctgccaagcgggacaagactcaacacatactcgactgctggtagagggcaattag

SEQ ID NO: 127266 - DNA, 2682 bp, synthetic construct
  misc_feature 1..2682: note = Description of Artificial Sequence: Synthetic coding sequence
  source 1..2682: mol_type = other DNA
atggagccaccactgcccgtgggtgcacagcccctggccaccgtggagggcatggaaatgaagggtccacttagggaaccttgtgctttaactctggctcagcggaacggccagtacgagctgataattcaattgcatgaaaaagagcagcacgtgcaggacattatccccatcaatagccactttcgatgcgtgcaggaagccgaagagaccttactcatcgatatcgcctcaaactctggctgtaagatccgtgtccaaggcgactggatcagggaacgtcggtttgagattcccgatgaggagcactgtcttaaattcctgtccgctgtgttagcagctcagaaagctcaatcccagctgctcgtcccagaacaaaaggattcctcctcatggtaccagaaactggacacaaaagataaaccttccgtgttcagcggactgttggggttcgaggataatttcagctccatgaatcttgacaagaaaattaattcacagaaccagccaacgggcatccaccgggagcctccccccccccctttttctgtaaacaagatgctgcctagagagaaagaagcatccaacaaagaacagcctaaggtaactaacaccatgcgcaaactctttgtgccaaacacacaaagcggtcagagggagggtctgattaagcacatactcgccaagcgcgaaaaggagtacgtgaacatccagaccttccggttcttcgtgggaacgtggaacgtgaatggtcaaagcccagattcgggccttgagccctggttgaactgcgatcctaatcccccagatatctactgcataggatttcaggaactggacctcagcaccgaggccttcttttactttgagtctgtgaaggagcaggaatggagcatggcagttgagcgtgggctccactcaaaagcgaaatataagaaggtacagttggtgcgcctggtaggcatgatgcttctgattttcgcccgcaaggaccagtgtaggtatattagggatatagccaccgagacagtcggaaccggcatcatggggaagatgggtaacaaaggcggcgtggctgtcagatttgtattccacaacacaacattttgcatagtgaacagtcacttggccgcccacgttgaagactttgagcgtcgaaaccaggactacaaagacatctgcgcgaggatgagcttcgtcgtgcctaaccaaactctcccgcagctgaacataatgaagcatgaggtggtgatctggctgggagacttgaattaccgcctatgcatgcccgatgcaaatgaggtgaaatcactgatcaacaaaaaggatctgcaaaggcttctcaaattcgatcagttgaatattcaacgaactcagaagaaggccttcgtagacttcaatgaaggcgaaattaagttcatacccacgtataagtacgacagcaaaaccgatcggtgggatagtagtggcaagtgccgggttccagcttggtgcgatagaatcctgtggcgcgggaccaatgtaaaccagctcaattatcgatcccacatggaactgaagacctctgatcacaaacccgtttctgctttgtttcacatcggggtgaaagtggtcgacgaacgacgctaccgcaaggtgtttgaggacagcgtgagaattatggatcggatggaaaacgactttctgccaagccttgagttatccaggcgtgagttcgtgtttgaaaatgttaaatttagacagttacagaaagaaaaatttcagatctctaacaacggacaggtaccctgccacttctcctttattcctaagctgaatgactctcagtattgcaaaccatggttgcgagctgagccatttgaaggctatctagagccgaacgaaacggtggacatcagtttggacgtttatgtgtcaaaggattccgttaccatcctcaactcaggggaagacaagatagaggatattctggtgctgcatttagaccgcggaaaagactattttctgaccattagcggcaattatctaccaagctgcttcggaacgagtctcgaggccctgtgcaggatgaagaggccaatccgggaagtgcctgtgacgaagctgatcgatctggagaaatccttacttcagatggtacctttggacgagggtgccagcgaaaggcctttacaggtccccaaggagatttggttattggttgatcacctgttcaaatatgcttgtcatcaggaggacttatttcaaacccctggcatgcaggaggaactccagcagattattgactgcctggacaccagtatcccagaaacgatacccggaagtaaccactccgtagcagaggctcttctgatctttctggaagcactcccagagccagtcatatgctacgaactgtaccagagatgtctggacagtgcttacgacccgagaatctgtcgtcaggttataagtcagctgccaagatgtcataggaatgtatttaggtacctgatggcatttttacgcgagttactgaagttctccgaatacaatagcgtcaatgcaaatatgattgctacactgttcacgtctctgctgctcagacctcctccgaacctgatggccaggcagacacctagcgaccggcagcgcgctatccagtttctcctgggctttctgttggggagcgaggaggattag

SEQ ID NO: 127267 - DNA, 2706 bp, synthetic construct
  misc_feature 1..2706: note = Description of Artificial Sequence: Synthetic coding sequence
  source 1..2706: mol_type = other DNA
atggaaccgcctctgcctgttggcgctcagcctttggctacagtggagggcatggagatgaaggggcccctgcgagaaccttgtgccctgaccctggcgcagcgcaatggtcaatatgagcttattatccagcttcacgaaaaggaacaacacgtgcaagacattatccctattaatagccacttccggtgcgtccaggaggcagaggagaccttactgatcgatattgcctctaacagcgggtgcaaaataagggtccagggcgattggatacgggagcgtcgcttcgagatcccagacgaagagcactgccttaaattccttagcgcggttttagccgcacagaaggctcagagccaactgctcgtgcctgagcagaaagacagctctagctggtaccaaaagttggacactaaagataaacctagcgtcttcagcgggctgctgggctttgaggacaatttttctagcatgaatctcgataagaaaataaattcccaaaatcagcctaccggcatccatagagagcccccaccaccaccctttagcgtcaacaaaatgctgccaagagagaaggaagcttccaacaaggaacagcccaaggtgaccaacactatgaggaaactgttcgtgccgaacacacagagcggacagcgagaaggcctgataaaacatatactcgccaagcgtgaaaaagagtacgtgaatatccagacctttcggttctttgttgggacatggaacgtcaatggacagtcacccgatagcggattagaaccttggcttaattgtgatccaaatccaccagacatatactgtatcggcttccaggaactggacctttctaccgaagcatttttctattttgaaagcgtgaaggagcaagaatggtccatggccgtcgaaagaggtctccactccaaggcgaagtacaagaaggtacagttagttaggttggtggggatgatgctgctgatttttgcaagaaaagatcagtgcaggtacattagggacatcgcgactgagacggtgggtacaggcatcatgggtaagatggggaacaagggcggtgtcgctgtgcgatttgtgtttcacaacacgactttctgcattgtgaatagccacctggcggcccatgtggaggattttgaacggaggaatcaggattataaagacatttgtgcccgcatgtccttcgtggtccctaatcaaacattgcctcagttaaatatcatgaagcacgaagtggtgatatggcttggggacttgaattaccgcctgtgcatgcccgatgccaatgaagtgaaatctctgattaataagaaggatctccagagactcctcaaattcgaccaactcaacatccagcgaacccagaaaaaggccttcgtcgatttcaacgagggagaaattaagttcatcccgacgtataaatatgatagtaaaaccgataggtgggatagttccggtaaatgccgtgtgcccgcatggtgcgatagaattttatggagggggacaaatgttaatcagctcaactaccgatcacatatggaactgaagacgtctgaccataagcctgtttccgcactattccacatcggtgtgaaggtagttgacgaacgaaggtaccgtaaggtatttgaagattctgtccgcattatggaccggatggagaatgattttctgccttcattggagctctctaggagggagttcgtgtttgagaatgtgaaattcaggcagctgcagaaagagaagtttcagattagtaacaatggacaggtcccgtgccacttctccttcatacctaaactgaatgactcccagtattgcaaaccttggctacgtgccgagccattcgaggggtacctcgaacctaatgagactgtggatatcagcctcgatgtttacgtgagcaaagatagtgttacaatcttgaatagcggtgaggacaaaatcgaggacatcttggttctgcatctggataggggcaaagactatttcctcacgatttctggcaattaccttcccagctgctttggtacctcgctggaggccttgtgccggatgaagagacccatccgggaagtgcctgtgacaaagcttattgacctcgaagaggatagttttctggaaaaggaaaaaagtctgctccagatggtccctctggatgagggcgcatcggagagacccctacaagtccccaaggaaatctggttgctggtagaccacctgtttaagtacgcctgccaccaggaagacctgtttcagacgccaggcatgcaggaggagctccagcagattatagattgcctggatacttctattccagagaccatcccgggctccaatcattccgtcgcagaagccttgctcatcttcctggaagctctgcctgaacccgtcatctgttatgagctttatcagcgctgcctggattccgcctacgatccaagaatctgtcgacaagtcatatcacagctgcccagatgccacagaaatgtctttcggtatctcatggccttcctgcgagagctcctcaagttcagcgaatataatagcgtgaatgccaacatgattgccacactcttcacctcactgcttctcagaccacctccgaatctcatggctagacaaactcctagcgaccggcaacgcgccatccaattcctgctgggctttttactcgggagcgaagaagattag

SEQ ID NO: 127268 - DNA, 2445 bp, synthetic construct
  misc_feature 1..2445: note = Description of Artificial Sequence: Synthetic coding sequence
  source 1..2445: mol_type = other DNA
atgcaccttgaaggaagagatgggcggaggtatcccggcgcacctgctgttgaactgcttcagacgtccgtgccttcaggcttggctgaattagtcgctggaaagcgacggctccctcgtggggcgggaggtgctgacccttcacacagttgcccaagaggagccgccgggcagtcgtcttgggcaccagccggtcaggagttcgccagtttccttacaaagggcagaagtcactcctccctacctcagatgagctcttcccggagcaaagattcctgctttactgaaaacactcccctcttgagaaattcgctgcaggagaaagggagtagatgcatcccagtatatcacccagagtttattacagcagaagagtcatgggaggactcatctgccgactgggagcggcgatatctgctttcaagagaagtgagtggtctttcagcctccgccagcagtgaaaagggagacctgctggatagcccccacatccgactgcgcctaagcaaactgcgtcgctgcgtccaatggcttaaggtgatgggcctctttgcctttgtagtgttgtgctctattttgttctcactctaccctgaccagggcaagctatggcaacttctggccctgagcccacttgagaactactcagtaaacctgtctagccacgtcgattctactctgctccaggtagacttggctggggccctggtcgcaagcggtccttccagaccagggcgggaagagcacattgtggtggaactgacccaggctgatgcactcgggtccaggtggcggagacctcagcaggttactcacaattggactgtttatctgaacccacggcgcagtgagcactctgttatgagtcgaacattcgaagtgcttacccgagagactgtgtcaatttctatcagagcctctttgcaacagactcaagctgtccctcttctgatggcccaccaatacctgcggggctccgttgaaacccaggtcacgatcgctaccgcaatcctggctggagtgtacgctctgatcatttttgaaagaccaagcctgactcatgtagtggagtggattgacttcgagacgctggcactgctctttggtatgatgatcctggtggccatcttcagtgaaactggatttttcgactactgcgccgtcaaggcttatagactgagtagaggacgagtctgggccatgatcattatgctgtgtctcatcgccgcggttctgagcgcatttttagacaatgtgacgacaatgctgttatttactcccgtcaccattcgcctatgcgaagtgctcaatctggatccccgacaggttctgattgcagaggtgattttcaccaacatcgggggggccgcaacagccatcggggatccaccaaacgtaatcatcgtatcaaaccaggaactacgcaaaatgggcctagactttgctggatttacagcccacatgttcatcgggatctgcctggtgctgctggtctgttttcctttgctgagattattatattggaatagaaagttgtacaataaggaaccaagcgagatagttgagctgaagcatgagattcacgtgtggagattaactgcgcaacggatctcccccgcttctcgtgaagaaaccgcagtccgaagactgctgctgggcaaagtgctggctttggagcatctgcttgcgagacgtttgcacacattccaccgccagatcagtcaagaggataaaaactgggaaaccaatattcaggagctgcagaaaaagcataggatttcagacgggattctcctcgccaagtgcctaaccgttctcgggttcgtgatttttatgtttttcctgaactcctttgtcccagggattcaccttgacctggggtggattgccatcttgggggccatttggttgctaatcctggccgacatccacgactttgaaatcatcctacaccgtgtggaatgggcaacactattattttttgcagccctgtttgtactgatggaagccctggctcacttgcacctcatcgagtacgtgggggagcagacggccctgctgatcaagatggtccccgaagagcagaggctgattgccgcaattgtgttagtcgtgtgggtgtcagcgttagcgtcatccctcatcgacaatatcccctttactgctaccatgatcccagtgcttctgaatttaagccatgacccagaagtcggcctgcccgcacctcccctaatgtatgccctggcctttggagcatgcttaggtggaaacggaaccctaatcggggccagtgccaacgttgtctgcgccggcattgccgaacagcatggctatgggttttccttcatggagttttttcgtctgggatttcctatgatggtggtgagctgtacagtcggtatgtgttatctgctggtggcacacgtagtcgtcggatggaattag

SEQ ID NO: 127269 - DNA, 2517 bp, synthetic construct
  misc_feature 1..2517: note = Description of Artificial Sequence: Synthetic coding sequence
  source 1..2517: mol_type = other DNA
atgcacctggaaggccgcgatggccgcaggtatcccggggcccccgcggtcgaattgctgcagacaagcgtgccatctgggctggctgagctggtggctgggaagaggaggctgcccaggggagctggcggagccgatccgtctcactcctgcccaagaggtgcggctgggcagtcaagctgggccccagccggacaggagtttgcctcttttctgaccaagggtaggagccattccagcctgcctcagatgtcgtcttcccgtagcaaagattcctgttttaccgagaatacccccttgcttcgcaacagcctgcaggagaaaggatctagatgcattccggtttatcacccagaattcatcactgccgaagaaagctgggaggacagtagcgctgactgggagcggcgctatctgctcagtcgtgaggtatccggtttatctgcgtctgcttccagtgagaagggggacctactggactcccctcatattcgcctgagactcagtaagctccgtaggtgcgtgcaatggctcaaagtgatgggactcttcgcattcgtcgtgctgtgttcaatccttttcagcttgtatccagatcagggaaagctgtggcagcttttggcactgtccccactggagaattactcagtcaatctgtcatcacacgtagactcgactcttctgcaggttgacctcgccggcgcactcgtggcaagtggcccctcaaggccaggtagagaggaacacattgtggttgagttgacacaggccgacgctctagggtccagatggaggcggccgcaacaagtgacccataactggactgtctatctgaatccaagacgttcagagcacagcgtcatgagccggacatttgaggtgcttacccgcgaaaccgtaagcatttccatacgggcttctctccaacagacacaagccgtgccccttctgatggcccaccagtacctgagaggatccgtggagacacaggtaacgatcgcaaccgcaattttggccggcgtgtatgctctgatcattttcgagatcgtgcataggaccctcgctgccatgctagggtctctggccgcccttgctgcactggccgtaatcggcgaccggccatcactgacgcatgtggtcgagtggatcgattttgagaccttggccctgcttttcggtatgatgatcctggtggcaattttttccgaaacaggctttttcgactactgtgctgtcaaggcttacagactgagccgaggccgcgtgtgggcaatgataattatgttatgcctgattgccgctgtgttgagcgctttccttgataacgtgaccaccatgttgctcttcacacctgtcacgatccggctgtgcgaagtgttgaatttagatccgcgccaagtgctcatcgcagaggtgatctttaccaatattggcggagccgctaccgccataggcgaccctcccaacgtcatcattgtctctaatcaagagctccgtaaaatgggactggactttgctggcttcactgcacacatgttcatagggatctgcttggtcctcctggtgtgttttcctcttcttcggttgctctactggaataggaaactgtacaacaaggagccgtctgagattgtggagctcaagcacgaaatccatgtatggcgccttaccgctcagagaatctcccccgcttcacgcgaggagaccgccgttcgtcgcctgttgttaggtaaagtgctagcgctggagcatctattagcacgcaggctgcacacattccaccgccagatttcacaggaggacaagaactgggagaccaatatccaagagctacagaaaaaacatcgtatcagcgacggaattctgctcgccaagtgtctgacagtactcggattcgtgattttcatgtttttcctgaattcatttgttcctggaatccatttagatttgggatggatagcaatccttggcgctatttggcttctgattctagccgacatccacgactttgagattatcctccacagagtggagtgggctactttactgttcttcgcagccttattcgtactgatggaggccctggcgcacttacacctcatcgagtacgtgggggaacagactgcccttctgattaagatggtgccagaggaacagaggctcattgcagccatcgtgctcgttgtgtgggtgtctgccttggccagcagtttaattgataatattccctttacggccactatgattcccgtgcttctgaacttgagtcatgatcctgaagtcggactgcctgctccaccactcatgtatgcactggcctttggggcctgcttgggggggaacgggacactaatcggtgcttccgcaaacgtggtatgcgcagggatagccgaacagcacggctatggtttctcctttatggaattctttcgactgggattccctatgatggtcgtgtcctgtacagtcggcatgtgttacctgctcgtggcgcacgtcgtggtcggttggaattag

SEQ ID NO: 127270 - DNA, 2007 bp, synthetic construct
  misc_feature 1..2007: note = Description of Artificial Sequence: Synthetic coding sequence
  source 1..2007: mol_type = other DNA
atgcacctcgagggcagagacggccgtaggtatccaggcgcaccggctgtagaacttctgcagacttccgtgccttcgggcttagcagagcttgtggcagggaaaaggcgtctgcctagaggggccggcggggcagatccaagtcactcatgccctagaggggccgctggtcagtccagctgggcacccgctgggcaggagttcgccagcttcctcaccaaaggaaggtcccatagcagtctgcctcagatgtctagctcccgtagtaaagacagttgcttcaccgaaaatacccccttgctaaggaatagcttgcaagagaaaggcagccggtgtatcccagtgtaccatcctgaattcataaccgctgaggagtcctgggaagatagttccgctgattgggagaggcggtacttattgagcagggaggtcagcggcctgagcgcatctgcttcctcagagaagggggaccttctcgatagcccccacatccgcctcaggctgagtaagcttaggaggtgcgtacagtggctcaaagtaatgggcttgttcgcatttgttgtgctctgtagcatcttgttttccctttaccccgatcagggcaaactgtggcagctattggctctgagccctctagagaactatagcgtgaacctatcaagccacgtggacagtaccctcctgcaggtggacctggccggtgcactggtcgcgagcggaccgagccgccctggccgtgaagagcacatagtcgttgagttgacccaggccgatgcgttgggatcccggtggagacgaccccaacaggtaactcataattggacagtgtatttgaaccctcgcagaagtgagcactctgtgatgagtcgcaccttcgaggttctaacccgggagactgtgtctatcagcatccgggcttctttgcagcagacacaggcggtgccccttttaatggcacaccaatatctgagggggtcggtggagacacaggtcactatagccacagctattttagcgggagtctatgccctcattatcttcgagattgttcataggacgctggctgcaatgctgggcagccttgccgctttggctgcgctagcggtcataggcgacaggccttcactcacccatgtggtcgagtggattgacttcgagactctggccctcctgttcggtatgatgatcctggttgccatctttagcgagactgggttcttcgactactgtgctgttaaggcatatcgactgtcacgcggtagggtctgggctatgattattatgttgtgcctcatcgccgcggtgctttccgcctttttagacaacgttacaaccatgctactgtttactccagtgaccatcagactttgcgaggtgctaaatctggatcctcgacaggtgttgatcgccgaagtcatctttactaacatcggaggcgcggccacagctattggcgaccccccgaacgtgatcatcgtgtctaaccaggagctgcgcaaaatggggcttgactttgccggatttacagcgcatatgtttattgggatctgcctggtgctactggtgtgcttccctttgctgcgtttgctgtattggaatagaaagctgtacaacaaggaaccatccgagatcgtagagctgaagcatgaaatccacgtatggagacttacggcgcagcgcatttccccagcttcgcgcgaggaaaccgccgtgcgcagacttttactgggcaaggtcctggctctcgagcacctcctggcccgacggttgcataccttccaccgacagatcagccaggaggacaaaaattgggaaactaacatccaagagctccagaaaaaacaccgcatatcagatgggattctgttggccaaatgccttactgttttgggcttcgtgatatttatgtttttcctgaactcttttgtccccggtatccacctcgatctgggtggcctggggctcgtgcaggcggggaggtactacctgtcaactcctgaaagctag

SEQ ID NO: 127271 - DNA, 795 bp, synthetic construct
  misc_feature 1..795: note = Description of Artificial Sequence: Synthetic coding sequence
  source 1..795: mol_type = other DNA
atgcacctggaaggtcgagacggacgccgctatcctggcgcgccggccgtggaactgctgcaaacatccgtcccttcaggcctcgccgagctggttgccggaaaacggagattaccgcgaggcgccggcggagctgatccttcccatagctgcccacgaggcgccgcggggcagagctcttgggcccctgcggggcaggaattcgcttctttcctcacaaaggggaggagtcatagctctctcccccaaatgtcatcttcacgctctaaggatagctgctttactgagaacacaccactgctgcgaaactcactgcaagaaaaaggttcacgttgcatacctgtttaccatcccgaatttataaccgccgaggagtcctgggaggattctagtgcagactgggagagacgctacctgctgtctagagaagtgtcaggactttccgcctcagcaagcagtgagaaaggagatcttctggacagcccccacattagattgcggttatctaagctccggcggtgtgtccagtggctgaaggtgatgggtcttttcgcttttgtcgtattgtgtagcatactgttcagtctgtatcccgaccagggcaagttatggcagcttctagccttgagcccactcgagaattactcagtcaacctgtcctcccatgtagactctactttattgcaggtcgacctggccggcgccttggtggcttcaggaccaagcaggccagggcgtgaggaacatatcgtcgtggagctcacacaagcagatgctctggggtcccgctggtag

SEQ ID NO: 127272 - DNA, 657 bp, synthetic construct
  misc_feature 1..657: note = Description of Artificial Sequence: Synthetic coding sequence
  source 1..657: mol_type = other DNA
atgcacctcgaaggtagagatggccggcgataccctggagctcccgcagttgagctgttacagaccagcgtgccatcagggcttgcagagttggttgctggcaaacgcaggctcccccggggagcaggaggggccgatccctcacacagttgtccacgaggggcagctggtcaaagctcttgggcccccgcgggacaggagtttgcctccttcctgacaaaaggcaggtcgcattctagtctacctcaaatgtcatcttcacgatccaaagattcctgtttcacagagaacacccctttattgagaaattccctgcaggaaaaaggaagtagatgtatcccagtgtaccatcccgagttcatcacagccgaagagtcctgggaagactcctcagccgactgggagagacgttatctactgagtcgcgaggtcagcggactaagcgcatctgctagctcagaaaagggtgacctactcgattctcctcatatccgactgaggttgtccaaactgcgaaggtgcgtccagtggctcaaggtcatgggactgtttgcttttgtggtgctttgcagcgtgacacacaattggactgtgtatctaaatcctagacggtcggaacattctgtcatgtcaagaacattcgaagtgttgacatag

SEQ ID NO: 127273 - DNA, 801 bp, synthetic construct
  misc_feature 1..801: note = Description of Artificial Sequence: Synthetic coding sequence
  source 1..801: mol_type = other DNA
atgggcagcaaaacactccccgcccccgtacctattcaccctagcctgcagctgaccaattatagcttcctccaggccgtaaacgggctgccaactgtgccttccgatcacctgccaaacctttacgggttcagtgcactacatgctgtgcatcttcaccagtggacgttgggatatcccgccatgcatctgcccagatcgtccttcagtaaggtaccgggtactgtttcttctctcgttgatgcacgcttccagctgcctgcatttccgtggttcccccatgtcatacaacctaagccagagatcacagcagggggaagcgtgcctgcccttaagaccaaaccaagatttgactttgcaaaccttgcccttgccgcaacccaggaggatcccgccaaactcgggaggggggaaggtcctggatccccagcagggggtctgggagcactgctcgatgtcacaaaactcagccctgaaaagaaaccgacgcgggggcggctgccttccaaaacaaagaaggagttcgtctgtaagttttgcggccggcactttaccaagtcttataatctgctgatacacgaacgcacccatacagatgagaggccatatacttgcgatatttgtcacaaggcctttaggcgccaggatcatctcagagaccaccggtacattcacagcaaggagaaacccttcaaatgtcaagaatgcggcaagggcttttgtcaaagccgcacgctggcagtgcacaaaacccttcatagtcaagttaaggagcttaaaacgtccaagattaaatgttag

SEQ ID NO: 127274 - DNA, 801 bp, synthetic construct
  misc_feature 1..801: note = Description of Artificial Sequence: Synthetic coding sequence
  source 1..801: mol_type = other DNA
atgggatccaagactctacccgctcccgtcccgatccacccctctttacagctgaccaattattcttttttacaggccgtcaatggactgcccacagtcccgtcagaccacctgcccaacttgtatgggttcagcgccttacacgccgtgcatctgcatcagtggacgctgggataccccgctatgcacctcccacggtccagtttcagtaaagttccaggcactgtcagttcattggtagacgctcggttccagctgccagctttcccatggtttccccacgtcattcagcccaaacccgaaataacggctggaggatcagtacctgctctgaaaacgaaaccccgattcgacttcgccaatctggcgctcgctgccacacaagaggacccagcaaaactcggtcgcggcgaagggccagggagcccagccggcgggctgggggctttactggacgtcaccaagctctctcccgaaaagaaaccaacccgcggcagactcccatctaaaactaaaaaagagttcgtctgcaagttttgtggtcggcactttaccaagtcctataacctgcttatccatgagaggacgcatacagatgaacgtccgtatacatgcgacatctgccacaaggccttcagaagacaagatcacctgcgggaccataggtacatccattccaaggaaaagccttttaagtgccaggagtgtggaaagggcttttgccagtctaggactcttgcagtgcacaagaccctgcattcacaggtgaaggaattgaagaccagtaaaattaagtgttag

SEQ ID NO: 127275 - DNA, 939 bp, synthetic construct
  misc_feature 1..939: note = Description of Artificial Sequence: Synthetic coding sequence
  source 1..939: mol_type = other DNA
atgggcagtaaggctttgcctgctccaatacctctgcatccctccctgcagctgaccaactacagcttcctccaggcagtgaatacatttcccgccactgtggatcatttgcaagggctctatggtttgtctgcagttcagaccatgcatatgaatcactggaccttagggtatcccaatgtgcatgaaataacccgctcgacaataaccgagatggctgcagcacagggactggtagatgctcgatttccttttccagccctgccctttacaacccacttgttccaccccaaacagggcgcgatcgcacacgttctgcccgctcttcacaaggacagacccagatttgattttgctaatcttgccgttgcagccactcaggaagaccccccaaaaatgggggacctgagtaagcttagtcctggtcttgggtcacctattagtggccttagcaagcttacaccagaccgaaagccctccaggggacggctgccttctaagaccaaaaaggaattcatttgtaaattttgcggacggcattttacaaagtcctataacctcctcattcacgagcgcacgcatacagatgaacgtccatacacctgcgatatatgtcacaaggccttccgccggcaggaccacctgcgggaccatcgatatatccacagcaaggagaagccctttaaatgtcaggaatgtggaaaagggttttgtcagtcacgcacgcttgccgtgcataaaaccctgcacatgcaggaatctccccacaagtgtcctacatgtggcagaacatttaaccagcgatcaaatctaaagacacatttgctcacccacacagacatcaaaccctactcatgtgaacagtgcggcaaggtgtttcgcagaaactgcgatctgaggaggcactccctgacacacaccccccggcaggatttttag

SEQ ID NO: 127276 - DNA, 831 bp, synthetic construct
  misc_feature 1..831: note = Description of Artificial Sequence: Synthetic coding sequence
  source 1..831: mol_type = other DNA
atgggtagtaaggccttgccagccccgatcccgttgcaccccagtcttcagcttaccaattatagtttcctccaggccgtcaatacattccctgccactgttgaccatttacaggggttgtatggactatcggccgtgcagaccatgcacatgaaccactggaccctgggatatccaaacgtgcacgaaataacccgctcaacaattaccgaaatggccgctgctcaaggactggtcgatgcccgcttcccatttcctgccttgccatttaccacccatttgttccaccccaagcagggggctatagctcacgtgttgcctgcattgcataaagacagaccgcggttcgatttcgcaaatctggctgtggctgcaactcaggaagatcccccgaaaatgggggatctgtcaaaacttagtcctggactgggttcccccatcagcgggctgtcgaaacttacaccagataggaagccttctcgaggccgtctgccaagtaaaactaaaaaagaatttatctgtaaattttgcggcaggcatttcaccaagagttataatctgttgatccatgaaagaacccacacggatgagcgcccttacacctgtgacatatgccacaaggctttcaggaggcaggatcacctgagggatcatagatacatacatagcaaggaaaagccgttcaaatgtcaagagtgtgggaaaggcttctgtcagagtcgaactctggctgtccataagactttgcacatgcaaacctcttcgcccaccgccgccagcagcgctgcaaagtgcagcggggaaacggtgatctgcgggggaactgcctag

SEQ ID NO: 127277 - DNA, 1302 bp, synthetic construct
  misc_feature 1..1302: note = Description of Artificial Sequence: Synthetic coding sequence
  source 1..1302: mol_type = other DNA
atggggctgagagctgaagaaggcaaacggaaaccccctaggtcagtaaggggggaagtcagtccctctcaaggaccgctggctcaagaggatgaagccagaagactgcggagctgcacaccggcttgccaccctggaaaaagaggcaaaggcggccaccgggctcgacggcagcgctctgcttgggacctcacgacccaccccctgactcaccgcagccaggagctgcgaggagccgctgcaactgagggatttttgtacgtacttcttagccattgggtcttcgtgggcgcgccccgaccccccgcatccgattcatggaagaagggtctcgtccctagcgcacctcccgcatcacgtaaaatgggttccaaagcattaccagctccaatcccactccacccgagcctgcagctgacaaattatagcttcttacaggcggtcaataccttccccgccactgtggaccacctccaggggttgtatggcctgagcgccgttcaaaccatgcacatgaatcattggaccctcggttaccctaacgtacacgaaatcactcgatccacaatcactgaaatggccgctgcccaaggcctggtggatgctcggtttccatttcccgcccttccatttactacgcatctgtttcatcctaaacagggagcgattgcccatgtcttacctgccctgcataaggataggcctcgattcgatttcgccaatctggccgtggccgctacacaggaagacccccccaaaatgggggacctgagcaagctgtcgccagggctgggctcacctatatcaggcttgtcaaaactgacacccgaccgtaagccttcacgaggcaggctgccttccaaaacgaaaaaagagttcatctgcaagttttgtggccgtcactttacaaaatcatacaacttgcttatccatgaaaggactcacacagatgagcgaccctacacatgtgatatctgccacaaggctttccgtcgccaagatcatctcagagatcatcggtatattcacagcaaggaaaagccctttaagtgtcaggaatgcgggaaaggattttgtcagtctaggacactcgcagtgcataaaacattgcacatgcaggaatctccccacaaatgccccacgtgcggtcgcacattcaaccagcggtcaaatcttaagactcacctcttgacacatacggacatcaaaccttacagctgcgaacagtgcgggaaagtctttcgccgcaactgtgacctccggcgccactcattaacccatacccccagacaagatttttag

SEQ ID NO: 127278 - DNA, 642 bp, synthetic construct
  misc_feature 1..642: note = Description of Artificial Sequence: Synthetic coding sequence
  source 1..642: mol_type = other DNA
atgggcagcaaagccctgcccgcccccatccctctgcacccgtctctgcagctgacaaactactcctttttgcaagctgtcaacactttcccagccacagtcgaccacctccagggactgtatggcctgtccgccgtccagactatgcatatgaatcactggactctgggatatcctaacgtacatgaaattactcgcagtaccattacagagatggccgccgcccagggtctggtcgacgcaagattcccttttcctgccctgcctttcacgactcaccttttccaccccaaacagggcgcaatcgcccatgtgcttcctgctttacacaaggacagacctagatttgattttgctaacctggccgtggccgctactcaggaggatcccccaaagatgggagatctcagcaaactgtcccccggactgggatctccaatatccggcctctcaaagcttaccccagatcgcaaaccatctcgcgggcggctcccttcgaagaccaagaaagaatttatttgcaagttctgtggaagacactttactaaaagttataacctcctaattcacgaaaggacccacacagatgaaaggccttatacatgcgacatatgtcacaaggcctttcgaaggcaggactag

SEQ ID NO: 127279 - DNA, 939 bp, synthetic construct
  misc_feature 1..939: note = Description of Artificial Sequence: Synthetic coding sequence
  source 1..939: mol_type = other DNA
atgggaagcaaggccctgccagcacccatacctctccatcccagcctgcagttgacaaattacagttttctgcaggccgtgaataccttccctgccaccgtggaccacctgcagggcctttacggcctgagcgctgtacagactatgcatatgaatcattggacgttgggttaccctaatgttcatgagattacaaggtcaacaatcactgagatggcagcagcacaggggctcgtggacgctcgctttcccttccctgccctcccttttaccactcatctctttcacccgaaacagggagcaatcgcgcatgttctgcccgccctgcataaagaccgccccagattcgatttcgccaacctagccgttgcagcaacacaggaggatcctccaaaaatgggggacttgtctaagttgtcccctggcctcggctctcctatctctgggctaagcaagctcacccctgatcggaagccttcgcggggacggttgccttcaaagaccaaaaaagagtttatatgtaaattttgcgggcgacacttcactaaaagttataacctcctgattcacgaaaggacacatactgacgaacgcccttacacctgtgacatatgtcacaaagcgttcagaagacaggatcacttgcgcgaccatcggtatatacactccaaagaaaaaccctttaagtgccaggagtgtggtaagggattttgccaatctcgcacattggcagttcacaagacactgcacatgcaggagtctcctcacaagtgccctacatgtgggcgaacttttaatcagagatccaatttaaaaacccacctactgacccatacagacattaagccctatagctgtgagcagtgcggcaaggtttttcgccgaaactgcgatctccgacgccattccctaacgcacacaccacgccaggatttctag

SEQ ID NO: 127280 - DNA, 687 bp, synthetic construct
  misc_feature 1..687: note = Description of Artificial Sequence: Synthetic coding sequence
  source 1..687: mol_type = other DNA
atgaagacactatttctgggggtaactcttggtctggcggccgcgttaagcttcacccttgaggaagaggacattaccgggacctggtatgtgaaagcaatggtagttgacaaagactttcctgaggatcgtagaccccgtaaagtatctccggtaaaggtcacggcgctgggaggcggtaatctggaagccactttcacctttatgagagaagacaggtgtattcagaaaaagatcctgatgcgtaaaactgaggaaccaggcaaattctccgcatacgggggcaggaagttgatctacctccaggaactgcctggcactgacgattatgtgttctactgtaaggaccagcgccgtggcgggcttcggtatatgggtaagctggtggcatctgccccgtgtagagcagtcccgctgtctcccccttggctcacatggccaccacacctacaggtagggatccttattcctacctggcggccctggaaaaatctgaggaattggtgtagtaccagggattcaagacgtcgaaccttcagttgcccctgccggagagaggcagcctttagcaatacacgccagccaccgggcctgcacctgcagtcacccccttaccatcagactcagagccccgaccatcttgacttgccatccagccacgacccttccttgctgcctcccacgtag

SEQ ID NO: 127281 - DNA, 444 bp, synthetic construct
  misc_feature 1..444: note = Description of Artificial Sequence: Synthetic coding sequence
  source 1..444: mol_type = other DNA
atgaagactttgttcctgggggtaacattgggcttggcagccgctctttcatttacgcttgaggaggaggatgagggcggttccgtgcacccagaagagaaccctgatgcagaagatggaggagcctggcagattcagagactgtggggccaggaagcacatatccctgcaggagccgctagggatgggcggcttcggttactgctgcagcgacccgccccctggggacccgcgctccatggtaaggcctgcgggatttgttctttgcaggggagggccgcggtccctactcttgcccatctggcaacttcaccggctggcagaaaccccaatacaaacctggaagcacttgaggaatttaagaagctggtgcagcataaggggctgagcgaagaggatattttcatgcccctgcagactgggtcttgtgtgcttgagcattag

SEQ ID NO: 127282 - DNA, 513 bp, synthetic construct
  misc_feature 1..513: note = Description of Artificial Sequence: Synthetic coding sequence
  source 1..513: mol_type = other DNA
atgaagactttgtttctgggcgttaccttggggctggctgcggccctctcgttcaccctcgaagaggaggatattaccggaacatggtatgtaaaggctatggtggtcgacaaagacttcccagaagatcgacggccacgtaaggtcagtcctgtcaaagtaactgcccttgggggaggcaacttagaagctacatttacgtttatgagagaggaccgatgcattcagaaaaaaatccttatgcgcaagaccgaggagcctggtaagttcagtgcctacgggggaagaaaactgatctatttgcaggaactacctggcacggacgactatgttttttattgtaaggaccagaggcgaggcggtctccgctatatgggcaagcttgtggggcggaatccaaatacgaatcttgaagccctagaggagtttaaaaaactcgtacaacacaagggcctatctgaggaggacatttttatgcctttgcaaacagggtcctgtgtgctggagcactag

SEQ ID NO: 127283 - DNA, 513 bp, synthetic construct
  misc_feature 1..513: note = Description of Artificial Sequence: Synthetic coding sequence
  source 1..513: mol_type = other DNA
atgaagaccctgttcctcggggttacactgggccttgctgctgccctgagttttactctcgaggaggaagacattactgggacctggtacgtgaaggcaatggtggttgataaagactttcccgaagacagaaggcctcgcaaggttagcccggtgaaagtgactgcactgggtggtggaaacttggaggccacctttacctttatgcgggaggatcgatgcattcagaagaagattcttatgcggaagacggaggaacctggcaagttcagcgcctacggtggacgaaaactaatctacctgcaagagctgccaggaaccgacgactacgtgttctattgtaaggatcagagacgcggcggcctccgctatatgggcaagcttgttggccggaatccgaacacaaacctcgaagccctggaggaatttaagaaactcgtgcaacacaaggggctgagcgaggaagacattttcatgccactacagacagggagctgcgtgttagagcactag

SEQ ID NO: 127284 - DNA, 258 bp, synthetic construct
  misc_feature 1..258: note = Description of Artificial Sequence: Synthetic coding sequence
  source 1..258: mol_type = other DNA
atgaagacactctttctcggcgtcaccttaggattggccgccgccctctcatttaccctggaggaggaagacgatggcccatgggtccaccccgaggagaacccagatgctgaagacggaggcgcctggcagattcagcgtctttggggacaggaggcccacgtccccgccggagcggcccaggaaggtcctcttcatttgctgctgcagcgaccggccccttggggcccggcccctcatgggaaggcctgtggatag

SEQ ID NO: 127285 - DNA, 513 bp, synthetic construct
  misc_feature 1..513: note = Description of Artificial Sequence: Synthetic coding sequence
  source 1..513: mol_type = other DNA
atgaagactctgttcctgggggtgaccctggggttggccgctgccctcagttttacgttggaggaggaagacatcacgggtacctggtacgttaaggccatggttgtggacaaagacttcccagaagatcggcggccacgtaaggtcagccctgttaaagtgaccgcactcggaggtggcaaacttgaggctacttttacctttatgagagaggatcggtgcattcaaaagaagattttaatgcggaaaacggaggagccaggaaaatattctgcctacggggggcgcaagctcatgtacttgcaggagctgccaagaagggatcactacatattttattgtaaagatcagcatcacggtggtctgctgcatatgggcaagctggtgggccgcaattccgataccaaccgcgaggccttagaggagtttaagaagttagtgcagagaaaaggactgtccgaggaagatatctttaccccactccagaccggatcctgcgtgcctgagcactag

SEQ ID NO: 127286 - DNA, 8310 bp, synthetic construct
  misc_feature 1..8310: note = Description of Artificial Sequence: Synthetic coding sequence
  source 1..8310: mol_type = other DNA
atggatgtgaaagaacgtaaaccttaccgcagtctgactcgacgccgagacgccgagcgaagatatacatcgtctagtgcagacagcgaggagggcaaggctcctcagaaatcatatagcagctcagagacacttaaagcatatgatcaggatgcccgcctcgcctatggaagccgggtaaaggacattgtcccccaggaagcggaggagttctgtagaactggggctaatttcaccctgagggagcttggtttagaggaagtgaccccacctcatggaacattgtatcggacggacatcggcctcccccactgcgggtactctatgggcgctggcagtgacgctgacatggaggcggacaccgtgctatcacctgagcatcccgtccgcctgtggggacgctctacacgtagtggcaggtccagctgcctgtccagcagagcaaacagcaacttgacgctcaccgataccgaacacgaaaacaccgaaaccgaccacccgggagggctacagaaccacgctaggctaaggacacctccccccccactctcgcatgcacatacccctaaccagcaccacgcagccagcattaacagcctgaatcgcggaaacttcactccaagatctaacccatctccagctccgactgatcatagcctgagtggagagcctccggcggggggcgctcaggagccagcccatgcacaagagaactggctgcttaatagcaatattcctctggagacccgtaacctcggaaagcagccgtttcttgggactcttcaagacaatttgattgaaatggacatattaggcgctagcaggcacgacggcgcttatagtgacggccattttctatttaaaccgggaggcacatctccactgttctgcaccacctcccccggctaccctctgacaagttccacagtatattccccgcccccccgcccactgccaaggtctaccttcgcccgacccgcctttaacctcaaaaaaccttccaagtactgtaattggaaatgtgccgctctctccgcaatcgtcatcagcgccacactggtgattctcctggcatacttcgtggcgatgcatctgttcggactgaactggcatttacagccaatggagggacagatgtacgagatcacggaggataccgcatcttcctggcctgttcccaccgacgtatctctgtacccttcggggggcactgggctggaaactccagacaggaaggggaagggcacgaccgagggtaaaccatcctccttcttccctgaagactcgtttattgactcaggcgaaatcgatgttgggcgtagggcgagccagaagatcccacctggcactttctggcggagccaggtctttatagatcaccctgtgcatctgaaattcaatgtatcacttggaaaagccgcgctggtgggcatctatggcagaaaagggctaccaccgagtcatacacagttcgactttgtggaactcctcgatgggaggagactgttgacacaggaggcacgaagtttggagggcaccccacgtcagtctcgcggaactgttccaccgtcttcgcatgagaccgggttcatccaatacctggattctggcatttggcacctggctttttacaacgatggcaaagagtcagaagttgtgagctttctgaccaccgccattgagtcggtggacaactgtccctcaaattgctacgggaacggtgactgtatcagcggtacctgccattgcttccttggttttcttgggcccgactgtggacgcgcctcatgcccggtgctttgtagcggcaatggacagtacatgaaagggagatgtctatgccactccggttggaagggggctgagtgcgacgtccccacaaaccagtgtatagacgtagcatgctcaaaccatggaacatgtattacagggacctgcatctgtaaccctgggtataaaggggagagctgcgaggaggtcgattgcatggacccaacttgttctggccggggggtgtgtgtgagaggcgagtgtcactgcagtgtggggtggggagggaccaattgtgaaactccacgggccacatgtctcgatcagtgctctgggcacgggaccttcctccctgacacagggttatgttcctgtgacccctcatggacaggccacgattgctctatagaaatctgtgcagccgattgcggaggccacggtgtttgcgtagggggcacttgtcgctgcgaggacggctggatgggtgccgcctgtgatcagcgggcctgccacccccgctgcgcagagcacggaacctgcagggatgggaaatgcgagtgctcaccaggatggaacggagaacactgcactattgcccactatctggatcgagtcgtaaaggagggctgcccaggtctgtgcaatgggaacgggcgatgcacactggatctcaacgggtggcattgtgtatgccaactcggctggcggggcgccggatgcgacaccagtatggaaacagcttgtggggatagtaaggacaacgatggggacggtctggtcgattgtatggatccagattgttgtcttcagccactgtgccatataaaccctctgtgtctaggaagcccgaatcctctggacatcattcaggaaacccaggtccctgttagccagcagaatctgcacagcttctacgatcgtataaagttcctcgtggggagggactccacgcacattatccctggcgaaaatccatttgacggggggcatgcgtgcgtcatacgggggcaggtgatgacaagcgacggcaccccgctggttggcgttaacatcagtttcgttaacaaccctctctttggatacacgatctccagacaagacggttccttcgatctggtcacaaacggcggaataagcataattttacgttttgagcgggccccatttataactcaggagcataccctgtggctgccatgggacagattttttgtgatggagacaattataatgcggcatgaggagaacgagatccctagctgtgacctctctaacttcgctcggccgaatccagttgtctccccatctcctctaaccagctttgcatcctcctgtgccgagaagggtccaatcgtccccgaaatccaggcacttcaggaagagatctctattagtgggtgtaagatgcggctctcttacctttcatcacgcacacctgggtataaatccgtgcttaggatctcccttacgcacccgactattccatttaatctgatgaaggtgcacctcatggtcgccgtggaaggccggctctttagaaagtggttcgctgctgcgcctgacctctcatattatttcatttgggacaagactgacgtgtacaaccaaaaggtgtttggtctctccgaggcttttgtcagcgtggggtatgagtacgaatcttgccccgatctgatactttgggagaaaagaaccacggtgctgcaaggctatgaaatcgatgcaagtaagctggggggttggtcgttggacaagcatcatgccttgaatattcagtctggcatcttgcacaaagggaatggagaaaatcagttcgtctcacagcagccaccagtcataggatcaatcatgggaaatgggcgtcgtagatcaataagttgtcctagttgcaatggcctggctgatggaaacaaactgctggctccagtggctttgacgtgtggctctgacggaagtctgtacgtcggcgacttcaactacatccgtaggatttttccctcaggcaacgtgaccaatatcctggagctccggaataaggatttccgccatagccattctccagcgcataaatactacctggccaccgacccaatgtccggggccgtttttttgtctgatagcaactcaagacgggtctttaagatcaagagcactgttgtggtcaaggatttggtaaaaaatagcgaggtggtggccgggaccggcgatcaatgtcttccttttgacgacactcgatgtggggatggtgggaaggctacggaagcaactttgaccaatcctcgggggattacagtcgataagttcgggctaatctattttgtagatggaaccatgattcggcgcatcgaccagaacggcattatatctacactcctcggctccaacgacctcacttcggctcgtccactatcatgcgattccgtcatggatatctcccaagtccacctggagtggccaacggacctcgccataaatcctatggacaattctctgtatgttttggataacaacgtggtactacagatcagtgaaaatcatcaggtgagaatcgtggcagggagacccatgcattgtcaagtcccggggatcgaccatttcttgttgagcaaagtggccatccacgcaacactggagtccgctactgccctggctgtgtctcacaacggagtgctgtatattgctgagacagatgagaaaaagataaataggatccgtcaggttactacctctggtgagatctctctggtggctggagcccctagtggatgtgactgcaaaaatgatgcgaattgcgactgcttctctggcgacgacgggtatgctaaggacgcaaaactcaataccccatccagtttggccgtttgtgccgacggagagctgtatgtcgccgacttgggaaatattaggatcaggttcatccgcaagaataagccattcctcaacacccagaacatgtatgaactgtcttccccaattgatcaggagttgtacctgtttgatacaactggcaagcatctttacacacagagtctgccaacgggggactacctatacaattttacatataccggtgacggagacattacactaattacggacaataatgggaatatggtgaatgttaggagagatagtactgggatgcctttgtggctggtggtgccggatggccaggtttactgggttactatggggacaaactcggcactaaaaagtgtgacaacacagggacacgagctagccatgatgacataccacggaaatagtgggctgcttgcaaccaagtccaatgaaaacgggtggacaaccttttatgagtacgactcctttggccgattgacaaacgttacatttcctactggacaggtcagctccttcaggagtgatactgattcttccgttcatgtgcaagtagaaacatcttcgaaagacgatgtgacgatcaccactaacttatctgccagcggcgccttctacaccctcctgcaggaccaggtgcgcaattcttattacataggcgctgacgggagtctgcggctccttctcgctaatggcatggaagtcgccttacaaactgaaccgcatttgctcgccggcaccgttaatcccaccgtgggaaagcgcaatgtgacattacccatagataacggccttaacctggtggaatggagacagcggaaggaacaggcgcgaggccaggtaaccgtttttgggaggcggctccgggtccacaacaggaatctattgtccctggactttgatcgggtcactcggacagagaaaatctatgatgaccaccgaaagttcacattgaggattctgtatgatcaggccggacgcccctcgctgtggagcccgagttctcgtctgaacggtgtcaacgtaacctattcaccgggcggatacattgctggaatccagaggggtatcatgagtgagcgaatggagtacgaccaggccgggcgcatcaccagtcggatctttgctgacgggaagacatggtcctacacgtatttagagaagagtatggtgctgctgttgcactcacagaggcaatacatatttgagtttgataagaatgaccggctgtcttctgtcacgatgcccaatgtggcaagacagactctggagacaattcgaagtgtaggatattataggaatatctatcagcccccagagggtaatgccagtgtgatccaggatttcactgaggacggacatctgctgcatacgttctatctgggcacgggccgtcgcgtgatttataaatacggtaaactatcaaagttggccgagactttgtatgataccaccaaagtctcatttacctacgacgaaactgcgggtatgctaaagaccatcaacctccagaatgagggtttcacatgtacaatccgctaccggcagatcggtccgttaatcgacagacaaatcttccgctttaccgaagagggaatggtgaacgcccgttttgattataactacgataattccttccgagttacaagcatgcaggctgtaatcaatgaaacgcccctgccaattgacctgtaccggtacgacgatgtctcaggcaagacagagcagttcggcaaattcggtgttatctactacgacattaaccagataatcactacagcagtgatgacgcacacgaagcactttgatgcctatgggcggatgaaagaagtgcagtacgaaattttcagatccctgatgtactggatgacagtccaatatgataacatggggcgagtcgtgaagaaggagctgaaagttggaccatatgcgaacactactcgctatagctacgagtacgatgctgatggtcagcttcagactgtcagcattaacgataaacccctctggcggtattcttacgatctcaacggcaatttacacctcttgagtcctggaaatagtgcccggctcaccccgttacgctacgacatccgagatcgtataacacgcctcggagacgtacaatacaaaatggacgaagacggcttcctgcggcagcgcggcggcgacatctttgagtacaattccgctggactgttgatcaaggcctacaatcgggccggctcctggagtgtgcggtaccggtacgacggtctgggaaggcgtgtgtctagcaagtcgagccactcccatcacctacagttcttttatgcagacctgaccaatccaactaaagtcacacacctatacaatcattcaagtagtgagatcaccagtttatactacgacctgcaaggtcacctgttcgctatggagctatcatccggggatgagttctacatcgcctgcgacaacatcggcaccccactcgccgttttctccgggactgggctgatgatcaagcagatcttatacactgcgtatggtgaaatatacatggacaccaatccgaatttccagattataatcggataccacggcggactctatgacccattaaccaagctggttcacatggggcgcagagactatgacgtcctggcgggccgttggacaagccctgatcatgaattgtggaaacatctgagttcttccaatgtgatgcccttcaacctgtatatgttcaaaaacaacaatcccatatcaaattcacaggatattaagtgtttcatgaccgacgtcaatagctggctgcttacattcgggtttcagctccacaacgtaattcccggctacccaaaaccagatatggatgccatggagcccagctatgagctgatccatacacagatgaaaacccaagaatgggataactccaaaagtatcctcggcgtgcaatgcgaggtgcagaaacaactgaaagcttttgtgacactggaacgcttcgaccagctatacggtagcaccattacaagttgtcaacaggctccaaagaccaagaaatttgcctcttccgggtcagtgttcggcaagggggtgaaattcgctttgaaagacggtcgggtgaccactgacataattagtgtggctaacgaggatggccgacgagtggccgccatcctgaaccatgcacattacctggagaatttgcattttacgatagatggagtggacacccactattttgttaagcctgggccaagtgagggtgacctggcaatcctgggcctgagcggcggccgccgaacccttgaaaacggcgttaacgtgacagtgtcacaaattaataccgtgctgaacggcagaacccgcaggtataccgatatccagctgcaatacggggccctctgtctgaatacacgctacggtaccactctggatgaagagaaagcccgagtgctggagctggccaggcagcgagctgtgcgccaggcctgggctcgggagcagcaaagattgagggaaggggaagaaggcttgagagcctggactgagggtgagaaacagcaggtgctctcgaccggccgggtccaaggatacgatgggttttttgtgatcagcgtggagcagtacccagaactgtccgacagtgctaataacattcatttcatgcgccagtcagaaatgggccgccgttag

SEQ ID NO: 127287 - skipped

SEQ ID NO: 127288 - DNA, 1404 bp, synthetic construct
  misc_feature 1..1404: note = Description of Artificial Sequence: Synthetic coding sequence
  source 1..1404: mol_type = other DNA
atgccgggccgatggaggtggcaaagagacatgcatcccgcccgaaaactgctatctttgttatttctgattctgatgggaaccgaactcactcaagtattgccaacaaatcccgaggagtcttggcaggtttatagtagcgctcaagactctgagggcagatgcatttgcacagtggtagctccacagcagactatgtgcagtagagacgccagaaccaagcagcttcggcagctcttagaaaaggtccagaatatgtcccagtctattgaggtcctcgatagaagaactcagcgcgatctacagtacgtggaaaaaatggaaaaccagatgaaggggctggagagcaaattcaaacaggttgaggagagccacaagcagcacttggcaagacagtttaaggcgatcaaggctaaaatggatgagcttcgaccattaatccccgtgctcgaggagtacaaggcagacgctaaactcgtgctccagtttaaagaggaggtacaaaacctgactagcgtgctcaacgaactccaggaagagatcggggcgtatgactacgacgagctgcaaagccgagtgagcaatttagaggaaaggcttagagcttgcatgcaaaaactggcctgcggcaagcttactgggatatccgaccccgtgactgtcaagacctccggctccagatttgggtcatggatgaccgaccccctggcacccgaaggggataatcgcgtttggtatatggatggctatcacaataaccgctttgtgcgcgagtacaagagtatggtcgactttatgaacactgacaatttcacaagccacagactccctcacccctggtcagggacaggacaggtggtctacaacgggtccatctatttcaacaagttccagtcgcacatcataattcgctttgatctcaagacggagactatcctaaagacccgcagcttggactacgccgggtataacaatatgtatcattatgcctgggggggccattcggacattgatcttatggtggatgaaagtggcctttgggcagtttacgctacaaatcaaaacgccgggaatatcgtagtttctagattggaccctgtgtctctgcagaccttgcagacctggaataccagttatcccaaaagatccgcaggcgaagcgtttataatctgtggcaccctatacgtgacgaatggatattctggcggcacaaaagttcactatgcttaccagactaatgcgagtacctatgaatacatcgatattcccttccagaacaagtatagtcatataagcatgctcgactacaaccctaaggatagggctctctacgcctggaacaatgggcaccaaattttgtacaatgtaacacttttccatgtaatccggagcgacgagttatag

SEQ ID NO: 127289 - DNA, 408 bp, synthetic construct
  misc_feature 1..408: note = Description of Artificial Sequence: Synthetic coding sequence
  source 1..408: mol_type = other DNA
atgcccggtagatggcgttggcagcgggacatgcacccagcccgaaaactcctgtcacttttgtttctcatcctcatgggcaccgagctcacacaagtgctgccaacgaaccctgaggaatcttggcaggtttattcaagtgcccaggacagtgaggggcgatgtatctgcactgttgtggcgccccagcagacaatgtgttccagggacgctagaaccaagcagctgagacaactgttggagaaggtgcagaacatgtctcaatcaattgaagtccttgaccggcgcacgcaacgtgaccttcaatatgtcgaaaaaatggagaaccaaatgaaaggtcttgagagcaagtttaagcaggttgaggaaagccacaaacagcacctggcgcggcagtttaaaggatag

SEQ ID NO: 127290 - DNA, 1458 bp, synthetic construct
  misc_feature 1..1458: note = Description of Artificial Sequence: Synthetic coding sequence
  source 1..1458: mol_type = other DNA
atgagtgtgcccctactcaagattggcgtggttttatctaccatggccatgatcacaaactggatgagccagactctgccaagcttggtgggtttgaataccacgaagctttccgcggcggggggtggcacgctcgatcgaagcactggagtccttcctactaacccagaagagtcctggcaggtgtatagctctgcacaggactccgaaggccgttgtatttgtaccgtggtggcgcctcaacagacgatgtgcagccgcgacgcaagaacaaagcaactgcgacagctcttggaaaaagttcagaacatgagccagagcatagaagtcctcgataggcggactcagcgcgatcttcagtacgtcgagaagatggagaaccagatgaaaggactagagtccaagttcaagcaagtagaggaatcgcataaacagcacctggcccggcagttcaaggccattaaagctaaaatggatgagctgcgtcctttgatacccgtgctggaggaatacaaagccgacgccaaacttgtgctccagttcaaagaagaggttcagaatctgacatccgtgctgaacgagcttcaggaagagataggtgcctacgactacgatgagttacaatcccgagtgtctaatttggaggagagactgagagcctgcatgcagaaactggcttgcggtaaactaacgggcatatcggatcccgtgactgtgaagacctctggaagccgctttgggtcctggatgactgatccactggccccagagggcgacaatcgtgtgtggtacatggacggataccacaataacagattcgtgagagagtacaagagcatggtggatttcatgaataccgacaattttactagtcacagactccctcacccttggagcgggaccgggcaggtggtgtataacggctccatttatttcaataaattccaaagccacatcattattagattcgacctgaagacagagactatcttaaaaacacggagcctggactatgctggctacaataacatgtatcactatgcatggggagggcactctgatattgacctgatggtggacgagagtggtctgtgggctgtctatgcaaccaatcagaatgcaggcaacatcgtggtttcccgtctagaccccgtctcgctccagaccctgcagacttggaacacatcctaccccaagcggtcggctggggaagcattcattatatgtggtactctctatgtgacaaatgggtacagtggcggcacaaaggtgcattatgcgtaccaaactaacgcttcaacctacgaatacatcgacatccctttccagaataagtactcccacatctcaatgctggattacaatccaaaagaccgggccctatacgcctggaacaacggacatcagattctatacaacgtgaccctgtttcacgtgatcagatcagacgaactatag

SEQ ID NO: 127291 - DNA, 1377 bp, synthetic construct
  misc_feature 1..1377: note = Description of Artificial Sequence: Synthetic coding sequence
  source 1..1377: mol_type = other DNA
atgggagaagccccagggagagaagggagagggccctgcccgcaacttgagagtcctcgtcgccgtcgcgtgctgcccacaaaccccgaggagagttggcaagtttactcgtccgcgcaagactcggagggacggtgcatttgtactgtggtcgctcctcagcagacaatgtgcagtcgggacgcgcgaacgaaacaactgagacagttgctggagaaggtgcaaaacatgtcccagagcattgaagtgctggacagaaggacgcagagggatctacaatacgtggaaaaaatggagaaccagatgaaaggcttagagtccaagttcaagcaggtggaggaatcacataagcagcacctcgcaaggcaattcaaggccatcaaagcgaagatggatgagctgcgccccctcatacctgtgcttgaagaatataaagccgacgcaaagttagtgctccagttcaaggaggaagtccagaacctgacttccgtcctaaatgagctccaggaggagatcggcgcatatgactatgatgagctgcagtctcgagtgtctaatctcgaggagcgcctgcgcgcctgcatgcagaagttggcctgtgggaagctcaccggaatttctgatccggttaccgtaaagacttctgggagccgatttggctcctggatgacggaccccctggcaccagaaggtgataatagagtgtggtacatggatggctatcacaataacaggtttgtgcgcgagtataagtccatggtggattttatgaataccgacaactttaccagtcaccggctgccgcatccatggtctggtacaggtcaggtggtgtataacgggagtatttattttaataaattccagtcccatatcattatccggttcgacctcaaaacagaaaccattctcaaaactcggtctctggattatgccggctataataacatgtatcactatgcttggggcgggcattctgacattgacctcatggtggacgaatccggcctttgggctgtgtatgcaacaaatcaaaacgccggaaatatagtcgtcagccgactggacccagtcagcttgcagaccttgcagacatggaacacttcctacccgaagaggtccgcgggcgaagcttttattatttgtggaactctttatgtgaccaacggttactcaggcggcacaaaagttcattatgcttatcagactaatgcctccacctatgaatacattgacattcctttccagaataagtacagccacatttccatgctcgactacaaccccaaagatagggcgctctatgcctggaacaatggtcatcaaatcctatacaatgtaaccttgttccatgtgattcgcagcgatgagttatag

SEQ ID NO: 127292 - DNA, 462 bp, synthetic construct
  misc_feature 1..462: note = Description of Artificial Sequence: Synthetic coding sequence
  source 1..462: mol_type = other DNA
atgtcggttcccctgctcaagatcggcgtggtcctgtccacgatggcgatgatcacaaattggatgagccagacccttccatcactggtgggcctcaatacaacgaagctgagcgccgcggggggtggaaccttagataggtctaccggtgtcctgcctactaaccctgaggaatcgtggcaggtgtattcttcggcacaggatagcgaaggccggtgtatctgcacagtggtggctccacagcagacaatgtgttcacgcgacgcacggacgaagcagctgcgacaactccttgaaaaggtacaaaatatgtctcagagtatagaggtactggaccggcgcacacaacgagacctgcagtatgttgagaagatggagaatcagatgaaaggtctggagtcaaagttcaagcaagtggaagagtcacataagcagcacttagcccgccagttcaagggctag

SEQ ID NO: 127293 - DNA, 729 bp, synthetic construct
  misc_feature 1..729: note = Description of Artificial Sequence: Synthetic coding sequence
  source 1..729: mol_type = other DNA
atgaacctgcatgtgaagacactctcattgatgacatggaggtcgcgctttctggaagaaagtttttggagcctggaggagaccgccgccttagcaaagcagctgcctctgaaaagtccctccgagaacatcttcctccacattgtggacctgtccgatcccaagcaaatttggaaattcgtggagaattttaaacaggagcacaagctgcacgttcttatcaataacgcaggctgcatggtgaacaagagagaactaaccgaggacggcctggagaaaaatttcgctgccaacacgctcggcgtttacatcctgacaaccggactaatcccagttcttgaaaaggagcacgacccccgtgttatcaccgtatcttctggagggatgctcgtgcaaaaactaaatacaaacgatctgcaaagcgagagaacacccttcgacggcactatggtctacgcccaaaacaagcgacagcaagtcgttctgaccgaacgatgggctcagggccaccctgccatccacttcagttcaatgcaccctggttgggccgacactcccggagttcggcaggcaatgccagggtttcatgcgaggttcggggatcggctacgttccgaagctcagggggccgacaccatgttgtggctagccctaagctcagcggccgccgcgcagccaagcggtaggttctttcagggggatttcctccctgggtgtgagggctcatag

SEQ ID NO: 127294 - DNA, 492 bp, synthetic construct
  misc_feature 1..492: note = Description of Artificial Sequence: Synthetic coding sequence
  source 1..492: mol_type = other DNA
atggccgaagatcggccacagcaaccgcagctagacatgccattggtgcttgatcagggcctcactcgccagatgcggctgcgcgtggaatcactgaagcagcgaggtgagaaacggcaagatggggagaagcttctgcaaccagccgagagtgtgtatcggctaaactttacccagcagcaaagattgcagtttgaacggtggaatgtggtcctggacaagcccggtaaggtgactataaccggaacgagccagaactggactcccgacttgaccaacttaatgacgagacagctcctggaccccacggctatattctggcgcaaggaggattccgacgctatagactggaacgaggctgacgctcttgaatttggggagaggctctcggatttagctaagattcggaaagttatgtattttcttgtcacttttggagaaggagttgaaccggccaaccttaaagcatctgttgttttcaaccagctgtag

SEQ ID NO: 127295 - DNA, 939 bp, synthetic construct
  misc_feature 1..939: note = Description of Artificial Sequence: Synthetic coding sequence
  source 1..939: mol_type = other DNA
atggatggggggaatcagagcgagggcagcgagttcttgctgctcggaatgtccgagtcacctgagcagcagcggatcctattctggatgtttctgtccatgtatcttgtgaccgtcgttgggaacgttttgatcattctggccatttcatccgatagccgcctgcacacccccgtgtacttcttcctcgctaacctgtcattcaccgatctgttttttgttacaaacaccatccctaaaatgctggtgaacctgcagtcacacaataaggccattagttacgctggatgtctaacacagttgtactttttggtctcgttagtggccctagacaacctgatactggcggtcatggcgtacgatcgctatgtggccatatgctgcccattacattatactactgcaatgtcgcccaagctctgcattctgttattgtcactgtgttgggttctcagcgttctgtacggactgattcatacccttctgatgactagagtcactttctgcggttcacgaaagatacattacatcttttgtgagatgtatgtgttgctgcggatggcatgttcgaacatacagatcaatcacactgtactgattgcaaccgggtgtttcattttcctgataccttttggatttgttattatctcatacgtgctcattatacgtgcaattctccgcatcccatccgtgagtaaaaaatacaaagctttttcgacctgcgcttcacacttaggagccgttagcttattttatggaacactttgtatggtgtacctgaagcctctccacacttactctgtgaaagactctgtggccacggtcatgtacgcggttgtcaccccaatgatgaatcccttcatctattcactgcgcaataaggacatgcatggggcactcggacggctgttggataaacattttaagcggctgacctag

SEQ ID NO: 127296 - DNA, 939 bp, synthetic construct
  misc_feature 1..939: note = Description of Artificial Sequence: Synthetic coding sequence
  source 1..939: mol_type = other DNA
atgagtggtactaatcagtcctcggtttccgaattcctgctgctcggactttcccgacagccacagcagcagcacctcttgtttgtttttttcctgtccatgtatctcgcgaccgtcctgggcaatctcttgattatcctgtccgttagtattgatagttgtctgcatacccccatgtatttcttcctgtcaaacctgagctttgtcgacatttgtttctcctttaccacagttcccaaaatgttggcaaatcacattcttgagacgcaaaccatctcattctgcggctgcctgacacagatgtacttcgtctttatgtttgtggatatggacaatttccttctagctgtcatggcctacgaccactttgtcgcagtatgtcacccactgcactataccgcaaagatgactcaccagctctgcgcacttctggtagcaggactgtgggtcgtggctaacctcaacgtgttgctccatactctgttgatggcaccgctcagcttctgtgcagacaatgcaattactcattttttctgtgacgtgactccactgctgaaactaagctgttcagatacacacctcaatgaggtcatcattttgagcgaaggagcccttgttatgattaccccttttctttgtatcctcgccagctacatgcacattacctgcaccgtgctgaaagtaccgtcaaccaaaggacggtggaaggcatttagcacctgtgggtcgcatctggccgtcgtcttgttgttttatagcacaattatcgccgtttattttaacccactgagcagccatagtgcagagaaggatacaatggctactgtcctttatacagtggttactccaatgctcaatcccttcatatattcattacgcaacaggtacctcaaaggtgccctcaaaaaagttgtcggccgagtggtctttagcgtctag

SEQ ID NO: 127297 - DNA, 924 bp, synthetic construct
  misc_feature 1..924: note = Description of Artificial Sequence: Synthetic coding sequence
  source 1..924: mol_type = other DNA
atgaaccattccgtcgtgacagaatttatcatcttggggctgaccaaaaagccggaacttcagggcatcattttcctgttctttcttatcgtatacctggtagcatttctgggcaacatgttgattatcattgcaaagatctataataataccctccacacacccatgtatgtctttcttcttaccctggccgtggtggacatcatctgcacaacaagtattatccctaagatgttgggcactatgctcacctccgaaaatacaatctcctacgcgggttgcatgtcacagctatttttgttcacttggagtctcggagcagaaatggtcctttttaccaccatggcgtacgataggtacgttgcaatctgtttccctcttcattactcaaccatcatgaaccaccacatgtgcgtggctctccttagcatggttatggctattgcggtcaccaatagctgggtacatacggcccttattatgagactaactttctgtgggcccaataccatcgaccatttcttttgtgagatccctcccctgttggccctgtcctgctcccccgtcaggatcaacgaggtcatggtgtacgtagccgacattaccttggccatcggcgattttatcctgacctgcattagttacggctttatcatcgtggccatcctgcggattaggacggttgagggcaagcggaaggcattcagtacttgttcatcacacctgaccgtggttacactgtattattccccggttatctatacctacattcgtcccgcatcctcctacacctttgaacgtgacaaggtggtggctgccctatataccctcgtgacgcccacgcttaatcccatggtgtactcttttcagaaccgtgaaatgcaggccggaatccgcaaggtttttgccttcctgaaacactag

SEQ ID NO: 127298 - DNA, 930 bp, synthetic construct
  misc_feature 1..930: note = Description of Artificial Sequence: Synthetic coding sequence
  source 1..930: mol_type = other DNA
atggaaaatcgcaacaatatgacagagtttgtgctcctgggccttacagaaaatcccaaaatgcagaagataattttcgtagtattctttgtgatctacatcataacggtggtaggctacgtgctgattgtggtaacaataacagcatcaccttctttgggttctcctatgtacttatctttggcttacctgtccttcatcgatgcatgttactcaagcgtaaatacgccaaatctcatcactcactcactgtatggaaaaaaagcaatcctgtttaacgggtgcatgacccaggtattcggcgagcattttttcggaggtgctgagggaatcttgctgacagtgatggcctatgaccattacgtggccatctgtaaaccactgcactatatgaccattatgaaccagtgcgtctgtgcgctgcttatgggagtagtctggatgggcggattcctgcatgccacaatccagatcctgttcatttttcaactgcccttctgtggccctaacgtgatcgatcattttatgtgcgacttgaaccccctattgaatctcgcctgcacggacacacacatgttggaactgtttatcgccgcaaacagcgggtttatctgtcttctcaattttgctctgctgcttgtgagctatgtcgtgattctgtgttccctgcgcacccattcactggaagcccgccacaaagctctttccacctgcgtctctcatatcaccgtcgttatactattctttgtcccctgtattttcgtgtacatgcgccctgctgccacccttccaattgacaaggctgtggcgattttctacaccatgataacacccatgcttaaccctctcatttatacgctaaagaatgcgcagatgaagaatgctatccggaaattatgttcacgaaaggatatttccggagataagtag

SEQ ID NO: 127299 - DNA, 978 bp, synthetic construct
  misc_feature 1..978: note = Description of Artificial Sequence: Synthetic coding sequence
  source 1..978: mol_type = other DNA
atgttcctgtatttgtgtttcatctttcagcgaacgtgctccgaagagatggaagaagaaaacgcgaccttattaacagagttcgtgctcactgggtttcttcaccagcccgattgcaaaattccattattcctggccttcctggtaatctatcttatcactattatgggaaatcttggcctgattgtgttaatctggaaggaccctcatttacacatccctatgtatctgttcctgggaagcctggcattcgtcgatgcctccctctcatccaccgtgacgcccaaaatgctcatcaactttttagccaaaagcaagatgatttctctgtccgagtgcatggtacaattcttttcgctggtgacaaccgtcacgactgagtgttttctgctggcaacaatggcctatgacagatatgttgcaatttgcaaggctctcctatacccggtgattatgactaatgagctgtgtatccagcttttagtgctgagttttattggaggactccttcacgccctgattcacgaggctttttcttttcgccttactttttgtaactccaatatcattcagcatttctattgtgacatcattccgctgctcaagattagctgtaccgacagcagtataaatttcctgatggtctttatcttcgcagggagcgtgcaggtcttcacaatcgggaccattctgatatcctataccattatccttttcacaatcctggaaaagaaatcaatcaaaggcattcgtaaggccgtgtcgacgtgtggagcacacttattgtcggtttccctctattatgggccgttaacatttaagtatcttgggtcagcctccccccaggccgatgatcaggatatgatggaatcacttttctacaccgtgatagtgccgttgttgaatcccatgatttatagcctgaggaacaaacaggttatcgcgtctttcacaaagatgtttaagtcgaacgtctag

SEQ ID NO: 127300 - DNA, 963 bp, synthetic construct
  misc_feature 1..963: note = Description of Artificial Sequence: Synthetic coding sequence
  source 1..963: mol_type = other DNA
atggaaacaggtaaccagacccatgcccaagagtttctgctactcggattttccgccacatcagaaatacagttcatactcttcggcctgttccttagtatgtacctcgttacctttacgggcaatttgctgattattctcgcaatttgttcagattcacacctccatacacctatgtacttcttcctctccaacctgagtttcgccgatctctgctttactagcacgaccgtcccaaaaatgcttttgaatattctcactcagaacaaatttatcacctatgcaggatgcctgtcgcagatattcttcttcacgagttttggctgtttggataatcttctactgacagtgatggcttacgaccgatttgtcgcagtgtgtcatcctctccattatactgtgattatgaacccccagctgtgcgggctgctcgtgctaggctcttggtgtatctcggtcatgggatccctactggagaccctgaccgtgcttcgtctcagcttttgcacggagatggagatcccacattttttttgtgacctgctcgaagtgctcaaattagcctgcagtgatacttttataaacaacgtggtgatctactttgcgacgggggtactgggcgtgatcagcttcacgggtatctttttttcgtattacaagatcgtttttagcattctgagaatttcttccgccggccgtaaacacaaagccttttctacatgcgggtcccacttgtccgttgtgacgttattctatgggacaggattcggcgtgtatctgtcctccgctgccacaccaagctcacggacttctcttgtggccagcgtaatgtacacgatggttacacccatgttgaatccttttatctacagtttacgcaataccgacatgaagagggcactgggcagactgctgtctagagctacattttttaatggtgacattacagccgggctctcttag

SEQ ID NO: 127301 - DNA, 960 bp, synthetic construct
  misc_feature 1..960: note = Description of Artificial Sequence: Synthetic coding sequence
  source 1..960: mol_type = other DNA
atggagcgtggcaatcagacggaagttgggaactttctcttgcttggattcgccgaggacagcgacatgcagctacttttacacggactgttcctaagtatgtaccttgtgacaattatcggcaacttgcttatcatcctgacaataagctcagactcccacttgcacactcctatgtactttttcctgtccaatctgtctttcgccgacatttgctttacctccacaactgtgcctaaaatgcttgtgaatatccagacacaatcaaaaatgataacgtttgcggggtgcctgacacagatttttttcttcatcgcttttggatgcctggataatctgctgctaacgatgactgcctatgatagatttgtagcaatctgttaccccctgcactacactgtcattatgaaccctcgcttgtgcggtctgcttgttctgggcagctggtgcattagcgtgatggggtcactgcttgagaccttgaccattctgaggctttcattttgcaccaatatggaaatcccccatttcttctgtgacccatctgaagttttaaaacttgcttgtagcgatacatttattaacaacatcgtgatgtactttgtgactatcgtgctaggggtgtttccgctgtgtggaatactgtttagttacagccagattttctcttcagtgctgcgggtttccgctcgtggccagcataaagcgtttagtacgtgtgggagccatctgtctgtggtgtccctgttttatggcacaggtctgggggtttatcttagcagcgcagtgacacccccctccagaacaagcctcgccgccagcgtcatgtacactatggtaacccccatgctgaacccttttatttatagcctgaggaacaaagacatgaaaggttccttgggcagactgctgctccgggcaacatccttaaaggagggaacaatcgctaagctctcatag

SEQ ID NO: 127302 - DNA, 939 bp, synthetic construct
  misc_feature 1..939: note = Description of Artificial Sequence: Synthetic coding sequence
  source 1..939: mol_type = other DNA
atggaagccgagaatttgactgagttgtctaagttcctgctgttggggctatcagacgaccccgagctgcagcctgtgctgtttggattattcctctctatgtacctggttacagttttggggaatctgctgataatccttgcagtgtcctctgattcacatctgcacaccccaatgtatttcttcctctctaatctgagcttcgtcgatatctgttttattagcacaacagttcctaagatgctggtgtcaattcaagcccggtcaaaggacatcagctacatgggctgccttacgcaggtgtacttcctgatgatgtttgctgggatggatacattcctcttggccgtgatggcgtacgatagattcgtagcgatctgtcaccctttacactatacggttattatgaatccatgcctttgtggcctcttggtgctcgcaagttggttcattatattctggttcagccttgtacatatcttgctaatgaaacggctcacattcagtaccggcaccgagatccctcatttcttctgcgaacctgcacaagtgctgaaggttgcttgctcgaacactctgctcaataacattgtgctttacgtggccaccgcactcttaggcgtcttccccgtcgccggcatcttgtttagctatagtcagatcgtgagtagcctcatggggatgtcctcaacgaagggcaagtacaaagccttctcgacttgcggctctcatctatgtgtggtgagcctgttctacggtaccggtcttggagtgtatctaagtagtgccgtgactcatagctcccagagttccagcaccgcctctgtcatgtacgccatggtgacccccatgttgaatccgttcatttacagtctgagaaacaaggatgtgaagggtgcacttgagaggctcttatcccgggctgattcctgcccatag

SEQ ID NO: 127303 - DNA, 972 bp, synthetic construct
  misc_feature 1..972: note = Description of Artificial Sequence: Synthetic coding sequence
  source 1..972: mol_type = other DNA
atggactcggatgcttccctggtctcatccaggcccagctctccggaacccgacgacctcttcctgcctgcccgcagcaagggtagtagcggaagcgctttcaccggaggcaccgtgtcctcctccacccccagcgattgtccaccggagctgtctgccgaacttcgcggagccatgggatctgccggcgcccatcctggggacaaactgggaggaagtggatttaagtcgagtagctcttccaccagctctagtacgagctccgcggccgccagtagtacaaaaaaggataagaagcaaatgacggagcctgaactgcaacagcttcgcctgaagatcaatagccgcgaaaggaagaggatgcatgacttgaatatcgccatggacgggttgcgcgaagtaatgccgtatgcccatgggccgagtgtccggaaactctcaaagatagctacactgctgctggcacgaaactatattctgatgcttactaacagcttagaggagatgaagaggctggtgtcagaaatctatggaggtcaccacgccggattccatcccagtgcctgcggaggactcgctcacagtgctcccctgcctgccgcaaccgctcatccggcagccgcggcccatgccgcccaccacccagcagtccatcacccaatcctgcctcccgctgctgccgctgccgccgccgccgccgccgctgcagcggtgtctagcgccagtctgcccgggagtggccttccttcagtggggagcatcaggcccccacacgggctcctcaaaagtccaagtgccgcagccgccgctccactgggcggcggcgggggaggcagtggggcctctggagggttccaacactgggggggaatgccgtgtccttgctcgatgtgccaggttccaccccctcaccaccacgtctctgctatgggagcagggtcgctgcccaggctgactagcgacgctaaatag

SEQ ID NO: 127304 - DNA, 972 bp, synthetic construct
  misc_feature 1..972: note = Description of Artificial Sequence: Synthetic coding sequence
  source 1..972: mol_type = other DNA
atggatagcgatgcttccttggtcagtagccgcccctcgagccccgaacctgatgacctcttcctgcccgccaggagcaagggctcgagcggctcagcctttaccggcggaacagtctcatcttccacgccaagcgactgcccacccgaattgtcagctgagctccgcggggcgatgggatcagcaggtgcccaccctggggataagctgggaggaagtggcttcaagtctagctcctcctcaacctcaagcagtacatccagtgcagctgcgagtagcaccaagaaggacaaaaagcagatgacagaacccgagctgcagcagttgagactgaaaattaactcaagagaacgcaaacggatgcacgatctgaatatcgcaatggatggcctcagagaagtgatgccatatgctcacggcccgagtgtaaggaaattgagtaaaatcgcaaccttattgttggccaggaattatatcctcatgctgacaaactcattggaggagatgaaaaggctggtgtcagagatttacggaggccaccacgctggcttccaccccagcgcgtgtggcggactggcgcactccgctcccttgcccgctgccactgcccacccagccgcagcagcgcatgcagctcaccatcccgccgtacaccatccaattctcccaccagctgcagccgcggccgcagcagcagctgccgccgcagcagtgtcatcagcctccctcccaggatccgggctgccctctgttggtagcattcgaccacctcatgggcttttgaagagtcctagcgctgccgccgcagccccgctggggggagggggcggggggagcggggcgtcaggaggctttcaacattggggaggaatgccctgtccttgctccatgtgccaggtgccgccgcctcatcatcatgtctccgccatgggtgcgggatccttaccccgtttaacctccgatgctaagtag

SEQ ID NO: 127305 - DNA, 189 bp, synthetic construct
  misc_feature 1..189: note = Description of Artificial Sequence: Synthetic coding sequence
  source 1..189: mol_type = other DNA
atggattccgatgcaagcctcgttagctcaaggcctagctctccagaaccagatgatttgtttcttcctgctagaagtaaggggagcagtggaagtgcattcactggagggacagtgtcaagtagcaccccatcagactgcccacctgaactcagtgcagaactgagaggtgccatgggatccgcctag

SEQ ID NO: 127306 - DNA, 1323 bp, synthetic construct
  misc_feature 1..1323: note = Description of Artificial Sequence: Synthetic coding sequence
  source 1..1323: mol_type = other DNA
atggagtaccagatcctcaaaatgagcctgtgtctcttcattctactgttcctgacgccagggatactttgtatttgccccttgcagtgcatatgcacagagcgacatcgccatgtcgattgtagcggcaggaacctgtccacgttgccttccggtctgcaagagaacatcatccatttgaatttgtcctataatcacttcaccgatcttcacaaccaactgacgcagtacaccaatctacgcactctcgatatatctaataaccgcctggaaagcctacctgcccacctgcctagatctttgtggaatatgtccgctgctaacaataacatcaaactgctggacaagagcgatactgcttaccagtggaatctgaagtatttggacgtgagtaagaatatgttggaaaaagtggtcctgatcaaaaatacactgcggtctctcgaggtcctcaatctgagcagcaataaactgtggacagtgcctacgaatatgccgtctaagctgcacatcgtggatctgtctaataacagtctcacccagatacttcccgggacactgatcaatttgaccaatctcacacatttatacttgcacaataacaagtttacattcatacctgatcaatcatttgaccagctgttccagctccaggaaatcacgctgtacaacaataggtggtcgtgcgaccacaaacagaacatcacgtatttgttaaagtggatgatggagacaaaggcccatgttatcggcactccatgtagcacacagataagcagcctcaaggagcataacatgtatccgactccctccggattcacttcttccctgttcaccgtgtccggtatgcaaacagtggatacaatcaacagcctgtcagtggttacccagccaaaagtcactaagattcccaaacagtatcggactaaggagacaacattcggagccaccctctccaaggacacaacattcacaagtacagacaaggcatttgtgccctaccccgaagatacttccacagagaccatcaactctcatgaggctgcagcagctacactaacaatccacctgcaagacggtatggtaacgaacacttctcttacatcctccaccaagtctagcccaacacccatgacgttgagcatcacttcaggcatgccgaataatttttctgaaatgcctcagcagagcaccactctgaatttgtggcgagaagaaactacaacgaatgtcaagacccctcttccttctgtcgcaaatgcctggaaggtcaacgcctcattcctactgcttctcaatgtggtagtgatgctagccgtctag

SEQ ID NO: 127307 - DNA, 819 bp, synthetic construct
  misc_feature 1..819: note = Description of Artificial Sequence: Synthetic coding sequence
  source 1..819: mol_type = other DNA
atgaactctgacagctccagcgtgagttctagagcctcatctcccgacatggatgagatgtatttgcgcgaccaccaccaccggcatcaccaccatcaagagtcccgcctgaactctgtgtcgtcaactcagggagatatgatgcaaaagatgcctggcgaatcattgagcagagcaggagctaaagccgccggcgagtcttctaaatacaagatcaagaagcagttgtctgaacaagacctccagcagctccggctgaagattaacggtcgggagaggaaaaggatgcacgacttgaatctcgcaatggatggcctgagggaggtcatgccctacgcccacggcccatcagttagaaaactgtcgaagattgctacattgttactggctagaaattacattcttatgctcacttcctccctggaggagatgaaacggcttgtgggagaaatttatggcggccaccattctgcctttcattgcggtaccgtggggcacagtgccggccaccccgcgcatgccgccaattcagtacaccctgttcaccctattcttggcggagccttaagctcaggcaacgcaagctctccgctaagtgctgcctctctgcctgcgatcggcacaattcgacccccccattcactgctgaaagctccctcaaccccacctgcgctgcagctcggatcagggttccagcactgggcgggactcccttgtccttgtactatttgtcagatgcctcctccaccgcacttgtctgctctttccacagctaacatggccagactctccgcagagtcaaaagacctcctgaaatag

SEQ ID NO: 127308 - DNA, 375 bp, synthetic construct
  misc_feature 1..375: note = Description of Artificial Sequence: Synthetic coding sequence
  source 1..375: mol_type = other DNA
atgtggaagggctgcttaaccctttataccggaagggggggcgaactgcagaagattggggagttctgtatggtgtacagcgaagtgccaaactttagtgagcccaacccggactatcggggccagcagaataaaggagcgcagagcgagcagaaaaataattcaatgaattctaacatgggaactgggacttttggaccggtcggaaatggcgtgcacaccgggccagagtccagagaacaccagttctcgcacgccggccgaagcaacggccgtggtctcattaacccacagctgcagggaactgccagtaaccaaacagtgatgactaccatttctaacggacgggatccgcggagagccttcaagcgctag

SEQ ID NO: 127309 - DNA, 375 bp, synthetic construct
  misc_feature 1..375: note = Description of Artificial Sequence: Synthetic coding sequence
  source 1..375: mol_type = other DNA
atgtggaaaggatgtttgacactgtataccggacgcggtggcgaactgcagaaaattggggagttctgtatggtttatagcgaggtgccaaacttcagcgagccaaatcccgattaccgcggccagcagaataagggggcccagagcgaacagaaaaataactctatgaacagtaatatgggcactgggacatttggccctgtgggcaacggtgtccataccggacccgagagccgggaacaccagtttagtcatgccgggcggagtaacggccgggggctcattaatccccagttgcaaggaactgcgtccaatcagacagtcatgaccacaatcagtaacggtagggaccctagacgagcttttaagaggtag

SEQ ID NO: 127310 - DNA, 615 bp, synthetic construct
  misc_feature 1..615: note = Description of Artificial Sequence: Synthetic coding sequence
  source 1..615: mol_type = other DNA
atgaaccgggtgaatgacccacttatttttatccgggatatcaagccaggcttgaagaatctaaatgttgtgttcattgtgctcgaaatcggaagggttactaaaaccaaagacggccatgaagtaagatcatgcaaagtagcagataaaacaggtagcataactatttccgtgtgggacgagattggggggctgatacaaccaggagatatcattcgtctcaccagagggtatgcatcaatgtggaaggggtgtctcaccctgtacactggcaggggcggagagctgcagaaaatcggggagttctgcatggtgtacagtgaagtgccaaatttcagtgagccaaatcctgactacaggggtcagcagaataaaggagcccaatcagagcagaagaacaattccatgaattccaacatgggaaccggaacattcgggccggtcggaaacggggtccataccgggccggagagccgggagcaccaattctcccatgccggccgcagcaatggcaggggcctcatcaacccccagttgcagggtactgcctcaaatcagacagtaatgactaccatatctaacggcagggatccaaggagggcatttaagagatag

SEQ ID NO: 127311 - DNA, 636 bp, synthetic construct
  misc_feature 1..636: note = Description of Artificial Sequence: Synthetic coding sequence
  source 1..636: mol_type = other DNA
atgactacagagacatttgtgaaggatatcaaaccgggcctgaaaaatctaaacctgatcttcatcgtgctggagactgggcgggtgaccaaaacgaaagatgggcatgaagtgcgcacgtgtaaggtagccgacaaaaccggtagcataaatatctcggtgtgggatgacgtgggtaatctcatacaaccgggagatatcatacggctgacaaaggggtatgcctccgttttcaaaggttgtcttaccctttacaccggacgagggggtgatcttcagaagatcggggaattttgtatggtatattctgaagtccccaatttcagtgagccaaatccagaatattctacccagcaggctcccaacaaagcagtgcagaacgacagcaacccatcagcatcccaacccaccaccgggccaagcgccgcgagcccagcgagtgaaaatcagaatggtaatggattgagcgcaccacccggtcccggtggggggcctcaccctccacacactccatcccaccccccctcgaccagaatcacaaggtcgcagcctaaccacactcctgctggccccccggggccaagcagcaatcccgtttccaacggcaaagaaacccgtaggtcaagcaagcggtag

SEQ ID NO: 127312 - DNA, 636 bp, synthetic construct
  misc_feature 1..636: note = Description of Artificial Sequence: Synthetic coding sequence
  source 1..636: mol_type = other DNA
atgacaaccgagacctttgtgaaggacattaagcccggattaaaaaacttgaatctgatcttcattgttctggagaccggacgagtgaccaaaactaaagatgggcacgaggtgagaacatgcaaggtggcagacaagaccggaagtattaatatctcagtctgggatgatgtcgggaatcttatccagccgggggatatcatccggcttacaaagggatatgcttccgtattcaaaggctgcctgaccctgtacactggaaggggtggcgacctacagaaaattggggagttttgtatggtgtacagtgaggtgccaaacttcagtgaaccgaaccctgagtattctactcaacaggccccaaataaagccgtacaaaatgacagcaacccaagcgcttcccagccaaccaccgggccttctgccgcaagtccagcatccgagaaccagaacggcaatggacttagtgccccccccggtccaggaggtggtccccatcctccacatactccctcccaccctccctccacaaggatcacacggagccagcccaaccacacacccgctggtcccccgggtccctcttcgaatccggtctctaatggcaaggaaacaagaaggtcttcaaagagatag

SEQ ID NO: 127313 - DNA, 636 bp, synthetic construct
  misc_feature 1..636: note = Description of Artificial Sequence: Synthetic coding sequence
  source 1..636: mol_type = other DNA
atgacaaccgagacctttgtaaaagacataaaacccggactaaagaacttgaacttgatctttatcgtactggagacaggacgagtgaccaagaccaaggacgggcacgaggtgagaacttgtaaggtcgccgacaaaaccgggagtattaacataagcgtatgggatgatgtgggcaaccttattcagcctggcgacattatacgcctgaccaaaggctacgcaagtgtctttaagggttgcctgacactgtataccggacgtggcggagatctgcaaaagattggggagttttgtatggtgtattcagaagtcccaaatttctctgagcctaaccccgagtattcgacacagcaagcacctaataaggcggtgcagaacgattccaacccatccgccagccagcctacaacgggcccttcggctgcttcaccagcctctgaaaaccaaaacgggaatggactgtcagcccctccaggacctggagggggcccccacccaccccatacaccctcacatccccctagcactaggattaccagatcccagcctaaccacacccccgcaggcccccccggcccgtcaagtaaccccgttagcaacggcaaggaaactaggcggtcttctaagcgatag

SEQ ID NO: 127314 - DNA, 459 bp, synthetic construct
  misc_feature 1..459: note = Description of Artificial Sequence: Synthetic coding sequence
  source 1..459: mol_type = other DNA
atgacaaccgagacattcgtgaaagacatcaaacccggcctgaagaacttgaacctgatcttcattgtgttagaaacggggagggtcacgaaaaccaaagacggccacgaagtgaggacatgtaaggtagcagataaaacagggtcaataaatatttccgtgtgggatgatgtaggtaatcttattcagcctggcgacattattcggttgaccaaaggctacgcctccgtgttcaagggttgcctaacattgtacacagggcgcggcggagatctccagaagatcggtgagttttgtatggtttacagtgaggtgcctaactttagtgagcctaatcctgagtattcaacacaacaggcacccaataaagctgtgcagaacgacagcaaccccagcgccagtcaacccacaacggggcccagcgcagccagtccagcttctgagaatcagaacggctag

SEQ ID NO: 127315 - DNA, 435 bp, synthetic construct
  misc_feature 1..435: note = Description of Artificial Sequence: Synthetic coding sequence
  source 1..435: mol_type = other DNA
atgacgacagaaacattcgtgaaagacatcaagccaggattgaagaatctgaacttgatctttattgtgcttgaaacaggccgcgtgacaaaaaccaaagatggacacgaggtgaggacatgtaaagtggcagacaagacaggctctatcaatattagcgtctgggacgatgtcggaaacttgatccaacccggtgacattatccggctgacaaagggatacgccagcgtctttaagggttgtctgaccttatataccggtcggggaggagacctccagaagataggagaattttgcatggtgtattctgaggtacccaattttagtgagcccaacccagaatactcgactcagcaggcgcccaataaagcagttcagaacgattctaatccctctgcgagccagcccactacgggaccatcggcagccagctag

SEQ ID NO: 127316 - DNA, 2409 bp, synthetic construct
  misc_feature 1..2409: note = Description of Artificial Sequence: Synthetic coding sequence
  source 1..2409: mol_type = other DNA
atggggcacccgccgctcgagttcagcgactgctacctggattctcccgatttcagggagagactgaagtgctatgagcaggagctggagaggaccaacaaatttatcaaagatgtgatcaaagatggtaacgccttaatcagtgctatgagaaactactccagtgcagtgcagaagttttcgcagacattacagagcttccagtttgactttattggggatactttgaccgacgacgagattaatatcgcagagagctttaaagagtttgccgagctactgaatgaggtggaaaacgagaggatgatgatggtccacaacgcctccgatcttctgataaagcctctcgagaacttccgcaaagagcaaatcggttttacgaaagagcgaaagaagaagttcgagaaggacggcgaaagattttactccttattagacaggcacctgcatctctcctccaaaaagaaagagagccagttgcaggaagcagacctgcaggtggataaagagcgtcataattttttcgagtcctccctggattatgtgtaccaaattcaggaggtccaggaatccaaaaaattcaatattgtggaacccgtgctggcttttctacattcactcttcatttctaactctctgaccgtggagctgacacaggacttcctaccgtataaacaacagttgcaactgtccctccaaaatacaagaaatcacttctcttccaccagggaagagatggaggagctgaagaaacgaatgaaagaagcacctcaaacctgcaagctgcccggacagcctaccatcgagggttacctatacacccaggagaagtgggccttgggaatatcttgggtgaagtattattgccagtatgagaaggaaaccaagacactgacaatgacgccaatggagcagaagcctggcgctaaacaggggccccttgatctgacgctgaagtactgcgtacgcagaaagacagaatcaatcgataaacgattctgctttgatattgaaacgaatgagcggcctggcacaataacgctccaggcactgagcgaggctaaccgcaggttatggatggaagcgatggacggcaaggaaccaatttatcacagtccaatcaccaaacagcaggagatggaactgaacgaagtcggcttcaaattcgttagaaagtgcatcaatatcatcgagacaaaaggcatcaagaccgagggtctataccgcacggtcggaagtaacatacaggtgcagaagctgctgaatgcctttttcgaccccaagtgtcccggcgatgtggatttccataatagcgattgggatatcaagaccatcactagctctttgaagttttacctccgtaacttaagcgaaccagttatgacatatcggctgcataaagagcttgtaagcgcggctaagagcgataacctggattatcggctaggtgctattcactctctggtctataaactgccagagaaaaatcgggaaatgttggaattattgattaggcacttagttaatgtttgtgagcattccaaggaaaatctgatgacacctagtaatatgggcgtcatattcgggccgaccctgatgagggcgcaagaagatacagttgcagcaatgatgaacattaagttccagaatattgttgtggaaatactaatcgaacatttcggcaaaatttacttgggaccgcccgaggagtccgccgcaccacctgtaccacctcccagggttaccgcacgacgccataagccaattacaatatcaaagcggttgttgagagaaaggaccgtgttttatacgtcttctctggacgagtcagaggacgaaatccaacaccagactccgaacgggacgataacttctagcatagagcctcccaagccaccacagcatccgaaacttcctattcagcgctcaggggaaacggatcctgggagaaagagtccaagtcggcctattctcgatgggaagctggaaccttgtcccgaggtggatgttggaaaactggtgagccggctccaggacggggggacaaagataactcctaaagcaactaatggacctatgccgggcagcgggcccaccaaaacgccaagtttccacatcaagcggcctgcccctcggccacttgcacaccacaaggaaggagatgccgacagtttttctaaggttcggccaccaggggaaaagcccaccattatccggcctcccgtacgcccccctgaccccccctgtcgcgctgccacccctcagaagcccgaaccaaagcccgatatagtagcaggaaacgcaggagagatcacatcaagtgtggtggcatctcgcacccgattcttcgaaacagcttcacggaagacaggctctagccaggggcgcttgcctggcgatgaaagttag

SEQ ID NO: 127317 - DNA, 2085 bp, synthetic construct
  misc_feature 1..2085: note = Description of Artificial Sequence: Synthetic coding sequence
  source 1..2085: mol_type = other DNA
atgggccaccccccactggaatttagcgactgctatttagactcacccgatttcagagaaaggctgaagtgctacgaacaggagctagagaggacgaacaagtttatcaaggatgttattaaggatggtaacgcactgattagcgccatgagaaactacagtagcgccgtacagaagtttagtcaaaccctccaatcgtttcaattcgacttcattggcgatacacttaccgatgatgagatcaatatcgcagagtctttcaaggaattcgcagagctcttgaatgaggtggagaacgagcgaatgatgatggtacacaatgcttccgatctcctgattaagcctctggagaatttccgcaaggaacagattggtttcaccaaagagaggaaaaagaaatttgaaaaagatggggaacggttctacagcctgctggatagacatctccatttaagttcgaagaagaaagagtctcagctccaagaggctgatcttcaggtcgacaaagaacgacacaattttttcgagtcctccctcgactatgtgtaccaaatccaagaagtacaggagtcaaagaaattcaacatcgtggaacctgtgttggcctttctacacagcttgtttattagcaactccctgaccgtggaactaacccaggacttcctgccatataagcagcaattgcagctcagcctgcagaataccaggaatcactttagctccacaagggaggagatggaggagctgaaaaagcgaatgaaggaagctcctcagacctgtaagctgccggggcagcccacaattgagggttacctttacacccaagaaaagtgggctctcggtatctcttgggtcaaatactattgtcagtacgagaaggagactaagactttgacgatgactcctatggagcagaagccgggcgctaaacaggggccactggacctgaccctgaagtactgtgtgaggcgcaaaactgaatccatagataagagattttgtttcgacattgaaactaatgagaggccgggcactatcactcttcaggccctcagcgaagcgaatagaagactttggatggaagctatggacggtaaggagcccatatatcatagcccaataactaagcagcaagagatggagttaaacgaggttgggtttaaatttgtgaggaaatgcattaacattatcgaaaccaagggaatcaaaacggagggtctttatcgcactgtggggtctaacatccaggtgcagaaactgctgaacgcgtttttcgaccccaaatgtccgggagacgtcgatttccacaacagtgactgggacatcaaaaccattactagtagccttaagttttacctgcgcaatctgagtgagccagtgatgacttatagactccataaggaattggtctccgcagccaaatctgacaatcttgactatcgactgggagccatacattcattggtgtataagctgccggaaaagaaccgtgagatgctcgagctcctcatccgacacctggtgaatgtttgcgaacactcaaaggaaaacttgatgacgccatctaacatgggtgtcatcttcggacctactcttatgagagctcaggaggacacagtggctgcgatgatgaatatcaagtttcagaacatcgtggttgagatactgattgaacacttcggaaagatctacttagggccaccggaggaatctgccgccccacccgtgccgccaccgcgcgtgaccgcccggcgccacaaaccaatcactatctcaaaaagactccttcgggaacggactgtgttttataccagtagtctggacgagtccgaaggggatgcggattccttttccaaggtgaggccccccggcgaaaagccaactatcatccggccccctgtgcgccccccagaccccccctgtcgcgccgcgacacctcaaaagccggagccgaaaccagacattgtggctggcaacgccggagagatcacctcctccgtcgtggctagcagaaccagattcttcgaaacagcttctcggaaaacgggatcaagtcaggggcgcttgccgggcgacgagtcctag

SEQ ID NO: 127318 - DNA, 225 bp, synthetic construct
  misc_feature 1..225: note = Description of Artificial Sequence: Synthetic coding sequence
  source 1..225: mol_type = other DNA
atgctagagctcctgatacgccatctcgtgaacgtttgcgaacatagcaaggagaatctgatgaccccttcaaatatgggcgtgatcttcggccctactcttatgcgtgcccaagaagacacggtggccgctatgatgaacattaagtttcagaacatcgtggtggaaatcctgatcgagcactttggcaaaatttcttcatttttcttgcacaggtcgatttag

SEQ ID NO: 127319 - DNA, 3111 bp, synthetic construct
  misc_feature 1..3111: note = Description of Artificial Sequence: Synthetic coding sequence
  source 1..3111: mol_type = other DNA
atggcatccagtgtgggcaacgttgcagattcaactgggctggccgaattagcacaccgagaataccaggccggtgactttgaggctgcagagcggcactgcatgcagctatggaggcaagagcctgataatacaggtgtgctgctgctcctgagcagcatacacttccagtgcaggcgactagacagatcggctcacttcagcacgttagccattaaacagaaccctctgctggccgaggcctattctaatctaggaaatgtttataaagaacgtggacaacttcaagaggccatcgaacattacagacacgccctacgtttgaaaccagatttcattgacgggtatattaacctggcagcagccctcgttgccgctggagatatggaaggagcagttcaagcctatgtgagcgctctacagtacaatcccgacttatattgcgtcagatcagatctcggaaacttgctgaaagcacttggacggctagaagaagcaaaggcttgctaccttaaagccatcgagacccaacctaatttcgccgtggcttggtctaacctggggtgcgtgttcaacgcccagggggagatttggctggcaattcaccacttcgaaaaggccgtcaccctggacccaaattttttggacgcctatatcaatctaggaaatgtgcttaaggaggcaaggatctttgacagggccgtagcagcatatctgagggcactctctcttagtccgaatcacgccgttgttcacggcaaccttgcatgtgtatactacgagcaaggtctaattgatcttgcaatcgacacatacagacgtgctatagagcttcaacctcacttccctgatgcgtattgtaacttggccaacgctctgaaagagaaaggctccgtggccgaagccgaagattgttacaacacggcgctaagactttgccctacccacgcagacagtctcaataatttagccaacattaaacgagagcaaggcaatatagaagaggctgtacgactctaccggaaagcgctggaagtgttcccggagtttgccgcagcgcactccaatctcgcgagcgttcttcagcagcagggtaagcttcaggaggccctcatgcattataaggaggctatcaggataagcccaacgttcgcggatgcctattctaacatgggtaacacactgaaggagatgcaggatgtccagggagctttacaatgctatactagggctattcagattaaccctgcgtttgcggacgcgcactcaaacttggccagcatccacaaagatagtggtaacatccctgaagctatagctagctatcgtacggcgcttaagctcaaacccgatttcccagatgcctactgcaatctcgcccattgtcttcagatcgtttgcgattggacagattatgacgagaggatgaaaaaattagtgtctattgtggcagaccagctcgagaaaaataggctcccctcagtccatccccaccatagcatgctgtatcctctgagccatgggtttagaaaggcaatagctgagcggcacgggaacttgtgtctagacaaaatcaacgtcttgcataaacccccctacgaacatcctaaggatcttaagctctcagatggccgcctgagggtaggctatgtgtcctcggacttcggaaatcacccaacatcccacctcatgcagtcaatccccggcatgcacaacccagacaaattcgaggtgttttgttatgccctgtccccagacgatgggacaaacttcagagtgaaagtgatggcagaggctaaccattttatagacctaagtcagatcccctgcaacgggaaagccgcggatcggatccaccaggacggcatccacatcctcgtgaacatgaacgggtacacaaaaggggcacgcaacgagctctttgcactcaggcccgcccctattcaggcgatgtggctcggttatcctggaacctctggcgcactgttcatggactacattattaccgaccaagagacctcaccagcagaagtcgctgagcagtatagtgaaaagctcgcatatatgccccacactttcttcattggggatcatgctaatatgttccctcacctcaaaaaaaaggccgtcattgactttaagagtaatggacacatttatgacaacagaattgttttgaacggcattgatctgaaagcctttctggactctctccccgatgtgaagatcgtcaaaatgaaatgtccggatgggggggataatgctgattcttcaaatactgccctgaatatgccagtaataccgatgaacactatcgccgaagccgtgatagaaatgatcaacagggggcagatacagattactatcaatggattttctatctctaatggactcgccactacacagattaataacaaggctgcaaccggtgaggaagtgccaaggactatcatagttactactaggagtcagtacggtctccccgaagacgcgatcgtatattgcaattttaatcaactttacaagatcgatccttccactctgcagatgtgggcaaatatcttgaaaagggtgcccaacagtgtactgtggctgcttaggttcccagcagtgggcgaacccaatattcagcagtacgctcaaaacatgggtctaccccagaacaggattatcttctcccctgtggcccctaaggaggagcatgtgaggaggggacagctagccgacgtgtgcctcgacacaccgctgtgtaacggacatactaccgggatggacgttttgtgggccggcacccctatggtgactatgcctggggagactctcgcttcccgcgtggccgcttcccagcttacttgcctcggatgcctagagctaattgccaagaataggcaggagtacgaggacatcgcggttaaactcggcaccgatttggagtacttgaagaaggtgcgggggaaggtgtggaagcagcgtatatctagtcctcttttcaacacaaaacagtatacgatggagttggagaggctttacttgcagatgtgggagcattacgccgcaggtaacaaacctgaccacatgatcaaacccgtggaagtaaccgagagcgcttag

SEQ ID NO: 127320 - DNA, 3141 bp, synthetic construct
  misc_feature 1..3141: note = Description of Artificial Sequence: Synthetic coding sequence
  source 1..3141: mol_type = other DNA
atggccagtagtgtggggaatgtggcagatagcacagagccaacaaagcgcatgctctcatttcaggggttggcagagctggcccatcgcgaataccaggcaggcgacttcgaagctgctgaacgccattgcatgcaactctggcgtcaggagcccgacaataccggagtgctgctcttgctcagttccattcacttccagtgccgcagactggatcgttctgcccacttctctaccctggctatcaagcagaatccactcctggccgaggcctatagtaatctgggaaatgtgtacaaggaacgcggtcagcttcaggaggccatcgagcactacagacatgcgctgagactgaagccagacttcatcgacgggtacatcaatctggccgccgctcttgtagcagccggtgatatggaaggggcagtacaggcctatgtgagtgctctgcagtacaatcctgatctctattgcgtgcggtctgacttgggcaatttgcttaaggcactgggacgcctagaggaggccaaagcatgttatctcaaggctatcgagacccagccaaacttcgcagtggcttggtcaaacctggggtgtgtgtttaacgcccagggcgagatctggcttgcgatccatcactttgagaaagcggtgaccctcgatcctaattttctggacgcctatattaaccttggaaacgttctcaaagaggctcggattttcgatagggcagtggccgcctacctgcgggccctgtccctgagccccaatcatgccgtcgtgcacggaaatctggcttgcgtgtactacgaacagggactgatcgacctcgccatagacacctatagacgggcaattgaacttcagccgcacttccccgacgcctactgcaatctggccaacgctcttaaggaaaagggctcagtggctgaagctgaagattgctacaatactgcccttcgtttgtgccccacccacgcagacagtctgaacaatctggccaatataaaaagggagcaaggcaatatcgaggaggctgtacgcctgtaccgcaaagcactggaggtcttccccgaatttgctgcggcccacagcaatcttgcaagcgtgctgcaacagcaggggaagcttcaggaggctcttatgcactacaaggaggctataaggattagccccactttcgcagatgcatatagcaacatgggtaacacactgaaggaaatgcaggacgtgcagggtgcccttcagtgttacactagggcaatacagatcaaccccgcttttgccgacgctcactcaaacttggcatcaatccataaggatagcgggaatattcccgaggccattgcgagttatagaaccgccctgaagctcaaacctgacttcccagatgcatattgtaacctcgcgcattgcctgcagattgtctgtgattggaccgattacgacgaaaggatgaagaaactcgtcagcattgtggcagaccagctggagaagaacagattaccttccgttcatccccaccattccatgctgtaccctctctcccatggatttcgaaaggccatcgcagagaggcatgggaacctttgcctggacaagatcaacgtactgcacaaacccccatacgagcatcctaaggatctcaagctctcagacggtaggctcagggtcggttacgtatcgtctgattttggcaaccacccaacaagccacttaatgcagagcatcccgggtatgcacaaccctgacaagttcgaggtgttttgttatgcgctgtcacccgacgatggaacgaatttccgggtgaaggtcatggctgaggccaaccatttcatcgacctgtcacagattccctgtaacggtaaagccgcggacaggatacaccaggacggcatccatatcctcgtgaatatgaacggctataccaagggagcccggaacgagttatttgcactgaggcctgcgcccattcaagccatgtggttggggtaccccggcacatccggagccttatttatggactacattattacggaccaggagacctctcccgccgaagtagccgaacagtactctgagaagttagcatatatgcctcatacctttttcatcggagaccatgccaacatgttcccacacctgaagaagaaagccgttattgactttaagtccaacggccacatctatgataatcgtattgtcctgaacggcatcgacttgaaagctttcctggattcattgcctgatgtgaaaattgtgaagatgaaatgcccggatggaggagataatgccgacagctccaacaccgcactgaacatgccagttatccccatgaacacaatagccgaggccgtgatagaaatgatcaaccgtggccagatacaaatcactatcaacggtttctctatcagcaatggactggctaccacccagattaataacaaggccgccaccggagaggaggtgccacggaccattatcgtgacaacaagaagccagtacggtctgcctgaggacgccatagtctactgcaacttcaatcagctgtacaaaattgatccaagtaccctgcagatgtgggccaacatcttaaagcgcgtccctaactcagtcctttggttgctgcggttccccgccgtcggtgagcctaatatccagcaatatgcacagaatatgggtctgcctcagaatcgtatcatattttcacctgttgcccctaaagaggaacatgtgaggagaggtcaactggcagacgtctgcttggatacccctttgtgtaacggacatactaccgggatggatgtgctgtgggccgggacccccatggtgacaatgcctggggaaaccctggcaagccgagtggccgcatcccagctgacctgtctgggatgcttagaactgatcgccaaaaataggcaagagtacgaagacatcgcagtaaaattgggcacagacctagagtatttaaagaaagtccgtgggaaagtttggaaacagaggataagctccccactttttaatacaaagcagtacacaatggagctcgagagactctacctgcagatgtgggagcactacgccgctggaaataagcccgatcatatgattaagcccgtcgaggtgacagagtcagcgtag

SEQ ID NO: 127321 - DNA, 330 bp, synthetic construct
  misc_feature 1..330: note = Description of Artificial Sequence: Synthetic coding sequence
  source 1..330: mol_type = other DNA
atgagtatcactgacgttctgtcagcagatgacatcgcagccgcccttcaggagtgtagggacccagacaccttcgagccccaaaaatttttccaaacctctggactgtccaagatgagcgctaatcaagtcaaagacgtcttccggttcattgataacgaccagagtggctaccttgacgaagaggaactaaagttctttctgcaaaagtttgaatctggcgcccgagagctgacggagtctgagaccaaatcccttatggctgctgcagataacgacggagatgggaagatcggtgccgaggaatttcaggagatggtccactcttag

SEQ ID NO: 127322 - DNA, 330 bp, synthetic construct
  misc_feature 1..330: note = Description of Artificial Sequence: Synthetic coding sequence
  source 1..330: mol_type = other DNA
atgtcaattacagacgttctctctgctgacgacatcgctgctgccctgcaggagtgtagggatcctgatacattcgaacctcagaaattctttcagacgagcggacttagtaaaatgagcgccaatcaggtgaaggatgtgttccggttcattgataatgaccagagcgggtatttggacgaagaggagcttaagtttttcttgcagaaatttgagtcgggggcccgggaactaactgaatccgagaccaagtcactaatggcagccgctgacaacgacggggatgggaagatcggcgcagaggagttccaggaaatggtgcattcttag

SEQ ID NO: 127323 - DNA, 1638 bp, synthetic construct
  misc_feature 1..1638: note = Description of Artificial Sequence: Synthetic coding sequence
  source 1..1638: mol_type = other DNA
atgccaccgtttctgcttctcacctgcctattcatcaccggtacctctgtaagccccgtggcactggacccctgcagcgcctacatcagtttaaacgagccatggcgcaacactgaccaccagctagacgaaagccagggcccccctttgtgcgacaatcatgtaaatggagaatggtaccactttactggcatggccggcgatgccatgccaaccttttgtattccagaaaaccactgtgggactcacgctccagtctggctgaacgggagccaccctctggaaggggatggaattgtccaaaggcaggcttgcgctagtttcaacggcaactgctgcctttggaacactacagtggaagtaaaagcttgtcctggaggctactatgtataccggttgacgaaaccttcggtgtgctttcacgtttactgtggccacttttacgatatttgcgacgaggactgtcacggatcctgtagtgacactagcgaatgtacatgcgctccgggtaccgtactgggacccgaccgtcagacatgctttgacgaaaacgagtgtgaacaaaacaacggcggctgctctgaaatttgtgtgaacctgaagaatagttaccgctgcgaatgcggagtaggacgagttttgagaagcgatggtaagacttgcgaagacgtggaaggctgtcacaataataacggaggatgtagccacagctgcctgggcagtgagaaggggtaccagtgcgagtgccctagagggttggtcctgagtgaagataatcacacttgtcaggtacctgtgttatgcaaatctaacgctattgaggtgaacatcccaagagagctggtaggtggactggaactgtttctcactaacacaagctgccggggcgttagcaatggtacacacgtgaacatcctcttttccctgaaaacatgtgggactgttgttgatgtggtgaatgataagatagtggcatcaaacctggtgaccggcctgccaaagcagacccccgggtcatctggcgacttcattatcagaacatctaagttgcttattccggtcacctgtgaatttccccgcctgtatactatcagtgaggggtacgtgccaaacctaagaaactccccactggagataatgagccggaatcatggcatattccctttcaccctagagattttcaaggacaatgagttcgaagagccttatcgcgaggctctgccaacacttaagctcagagactccctgtatttcggaattgaaccggtcgtacatgtctcagggctagaaagcctggttgaaagttgtttcgccacccccacatccaaaatcgacgaggtcctaaagtattatctgatcagggacgggtgtgtgtccgacgactctgtcaagcagtatacatctcgcgaccatctagcaaagcattttcaggttccggttttcaagttcgtgggaaaggatcataaggaggtgttcttgcattgtagagtccttgtgtgcggtgtgttggacgaacgcagcaggtgcgcgcaggggtgtcaccggcgaatgcgacggggcgccggtggagaagatagcgcaggcctgcagggacagaccttgaccggcggccccattcggatagattgggaggattag

SEQ ID NO: 127324 - DNA, 966 bp, synthetic construct
  misc_feature 1..966: note = Description of Artificial Sequence: Synthetic coding sequence
  source 1..966: mol_type = other DNA
atgcctcccttcttgcttctgacatgtttattcattaccggaacatctgtgagtcctgtggccctagatccctgctccgcatatatctctctcaatgagccatggcgaaacaccgaccaccagctagatgaaagtcagggcccacctctgtgtgataatcatgtaaatggggagtggtaccattttaccgggatggccggcgatgcaatgccaacgttttgcatccctgagaaccattgtggtacacacgctcctgtttggctaaatgggtctcatccactcgagggtgatgggattgtccagcgtcaggcctgcgctagttttaatggcaattgctgtctgtggaacaccacggtcgaagtaaaagcctgtccgggcggttattatgtttaccgcctcactaaaccctcagtgtgcttccacgtatattgtgggcatttttatgatatatgtgacgaagactgccacgggtcttgttccgatacttccgagtgcacttgcgcacctgggaccgtgctcgggcccgatcggcagacctgttttgatgaaaacgaatgcgaacagaataatggaggctgtagcgaaatatgtgtgaacctgaagaattcttaccgctgcgagtgcggagtgggtcgtgtcctgagaagcgacggcaagacatgtgaggacgtggagggatgccataacaacaatggcggttgcagtcactcctgtcttggaagcgagaagggttaccagtgtgagtgtccaagggggctagtgctgagtgaggataatcacacttgtcaggtgcctgttctttgcaaaagtaacgccattgaggtcaacataccaagggaacttgttgggggcctggagctgtttctcacgaacaccagctgccgaggagtctccaatggtacacacgtgaatattttgttctcccttaagacgtgtgggaccgtcgttgacagctgttttcagtag

SEQ ID NO: 127325 - DNA, 735 bp, synthetic construct
  misc_feature 1..735: note = Description of Artificial Sequence: Synthetic coding sequence
  source 1..735: mol_type = other DNA
atggggctagaattatttctagatctggtcagccagccctcccgcgccgtctacatctttgctaagaagaacggaatccctctcgaactgcggactgtggatctagttaaaggacagcacaaaagtaaggaattcttacaaatcaatagcctgggaaagctgcctactttgaaggacggagatttcattctcacagaatctagtgctattctgatataccttagctgcaagtatcagacacccgatcactggtacccgtctgacttacaggcacgagccagagttcacgagtatttaggatggcatgccgattgcattcgcggcacattcggcatcccgttgtgggttcaggtcctaggccctttaatcggagttcaagtacccaaagaaaaggtggaacggaaccgtacagctatggaccaggcattgcagtggctggaggacaaatttctgggggatcggccgtttctggcggggcaacaggtgaccctcgccgacctgatggccctggaggaacttatgcagcctgtggcccttggttacgagctcttcgaagggcggcctcggctagctgcttggcggggacgcgttgaagcttttctcggagccgaattgtgtcaggaggctcacagtatcatacttagcatcctggaacaggcagccaagaagaccttgcccaccccctcaccggaagcttaccaagccatgcttttaagaattgcccgtatcccatag

SEQ ID NO: 127326 - DNA, 696 bp, synthetic construct
  misc_feature 1..696: note = Description of Artificial Sequence: Synthetic coding sequence
  source 1..696: mol_type = other DNA
atggcttcgatggcagcgatcggaagttgctctaaggagtacagagtgctgctgggtcagcttcaaaagcagacagatctgatgcaggacacctcacgtctcctcgatccttatatcaggatacagggactggacgtccccaagctgcgggaacactgtcgggagaggcccggggcctttcctagtgaagagacactcaggggtctggggcgacgcggtttcctgcagaccttgaatgctactctgggttgtgtgttgcaccggttggccgatctcgaacagcgtctgccaaaggcccaggatctagagcggtccggcttaaatatcgaagacttggagaagctgcagatggctcgccccaacatactgggattgaggaataacatctattgcatggcacaactcctcgataattcggacactgccgagccaactaaggccggccgtggagccagtcagccacctaccccgacacctgcttcagacgcttttcagcgtaaactggaagggtgcagatttctacacggctaccaccgcttcatgcattccgttgggagggtttttagtaaatggggggagagtcccaaccgtagtcggaggcactcccctcaccaggccctgaggaagggcgtgcgcagaaccaggccctcgcgtaaaggtaagagattaatgacccgcggccagttacccaggtag

SEQ ID NO: 127327 - DNA, 2940 bp, synthetic construct
  misc_feature 1..2940: note = Description of Artificial Sequence: Synthetic coding sequence
  source 1..2940: mol_type = other DNA
atggccctgttcgctgtgttccaaacgacatttttcctcaccctcctgtcgctgagaacttaccagtccgaggttctggctgagcgtctgcccctcactccggtgagccttaaggtgagcaccaacagcacgaggcagagcctccacctgcagtggactgtgcacaatctcccctaccatcaagaactgaagatggtcttccaaatacagatctccaggattgaaacttcaaacgtaatttgggttggtaactattctacaactgtgaaatggaaccaagtcctccattggtcatgggagtccgagctgcccctggaatgtgctactcatttcgtaagaatcaaatccctggtggatgatgctaagtttcctgaaccaaatttctggtcaaactggtctagttgggaggaagtctccgtgcaggacagcaccgggcaggacatactgtttgtttttccaaaggacaagctggtggaagagggcaccaatgtgactatctgctacgtgtcacgtaacatacaaaacaatgtttcttgttacctggaaggcaagcaaatccacggcgagcagctggacccacatgtcactgcctttaatcttaacagcgttccttttatacggaacaaaggcacgaatatttattgtgaagcctcacaaggtaatgtttcggaaggtatgaagggaatagtgctgtttgtgagtaaagttctggaggagccaaaggatttttcttgtgaaactgaagactttaagactctgcattgcacatgggatcctggcactgacactgcattgggttggtccaaacaaccctcccagtcttataccttgttcgagtcattctccggcgaaaaaaagctctgcacccacaagaattggtgtaattggcagataactcaggatagccaggagacctacaattttacgttgatcgccgagaattacctaagaaaaagatccgttaatatcttgttcaaccttactcaccgggtttatttgatgaacccctttagcgtcaatttcgagaacgtaaacgctacaaacgccatcatgacttggaaagtgcatagcatccggaataattttacatatctgtgccagatcgagctgcatggagaaggaaagatgatgcagtacaacgtctctattaaagtgaatggagagtatttcctgtccgaactggaacccgcgacagaatacatggctcgagtacgctgcgcagatgcttcacacttctggaaatggtcagagtggtccgggcagaatttcaccaccctcgaggcagcaccttctgaggctccggacgtgtggcgaatagtttctctggagcccgggaaccatacggtgaccctcttctggaagcccctcagcaaacttcacgcgaacggaaagatcctcttctacaacgtggtcgtggagaatctggataaaccaagttcctctgagctacattctatccctgcccctgcgaacagcacaaagctcattctggacagatgttcctaccagatctgcgtcatagcaaacaacagtgtcggcgcttctcctgccagtgtgattgtgatttcagccgatcctgaaaacaaggaggtagaagaagaaagaatcgccggaacagaagggggcttttcactgtcctggaagccccaacccggggatgttattgggtatgtagtggactggtgcgaccacacacaggatgtcctgggagactttcagtggaaaaatgtagggccaaacaccacttctacagtgatttcaacagacgccttccgacccggtgtgaggtacgactttaggatatacgggctgagcacgaagcgaatagcttgtctgctcgaaaaaaaaactgggtactcacaagaactagccccttccgacaatccccatgtgctggtcgacaccctcacatcacattcattcacactgtcttggaaggactactcaactgagtcacagcctggttttatccaaggctaccatgtttacctcaaatcaaaggcgcgacagtgtcacccccgttttgagaaggcagtgctgagcgacggttctgaatgctgcaagtacaaaatcgataaccccgaagagaaggccctcatcgtggacaacctcaagcccgagagtttttatgaattctttatcaccccatttacatctgccggagagggaccatccgcgacatttacgaaggtcaccacccctgacgagcatagcagcatgcttatccacatcctgctgcccatggtgttctgcgtcctgcttataatggttatgtgctacctaaaatcacagtggattaaggaaacgtgttatcccgacattcccgacccgtataagagtagcatcctgagcctgatcaagttcaaagagaacccccatctcattattatgaacgtctcagactgtatccccgatgcgattgaagtggtgagtaaacccgagggcaccaaaatacagttcttgggcacaaggaagtcccttactgaaacggagctgacgaaacccaattacttgtatcttctgccaaccgagaagaaccatagtggccctggaccttgcatttgctttgagaatctgacctacaaccaggctgcctctgattccgggagttgtgggcacgtccctgtgtcccccaaggccccgagcatgctgggactcatgacttctcccgagaacgtgttgaaggccttggagaagaattacatgaactcactgggggaaataccggccggcgaaacaagcttaaattacgtcagccagctggcgagtcctatgttcggcgacaaagactcattaccaacaaacccagtggaagcaccccactgctccgagtacaaaatgcagatggccgttagtctgcgactggccttgccccccccaacggaaaactctagcctcagctctattaccctgcttgacccaggagaacattactgttag

SEQ ID NO: 127328 - DNA, 1029 bp, synthetic construct
  misc_feature 1..1029: note = Description of Artificial Sequence: Synthetic coding sequence
  source 1..1029: mol_type = other DNA
atggccctcttcgcggtgtttcagactacattttttctcacactgctgagtcttcgcacctatcagtcagaagtgctggctgaaagacttccactgacacctgtgagtctaaaggtcagcacaaacagtacacgccagagtctgcacctgcagtggaccgttcataatctaccctaccaccaagagctcaagatggtgtttcagatccaaattagccgcatcgagactagcaatgtaatttgggtagggaactactctaccacagtgaagtggaatcaggtgttgcattggtcttgggaaagcgaactgccgcttgagtgtgctacccactttgtcaggattaaatcactcgtggatgatgccaagttcccagaaccaaatttttggtccaactggtcctcctgggaggaggtctctgtccaggattccaccgggcaggatattttattcgtgttccctaaagacaagctggtggaggagggtacgaacgtgactatttgttacgtgtccagaaacatacaaaacaacgtctcctgctacctcgaaggtaaacaaatacacggcgaacagttggacccgcatgttaccgctttcaacttgaattccgtgcccttcatccggaacaagggcacaaatatctactgtgaggcaagtcagggtaacgtgtctgaggggatgaaagggattgtactcttcgttagcaaggtgctggaggagccaaaggatttttcttgcgagacagaggactttaagaccctccattgcacatgggatcccggtaccgacactgccctcggctggtccaagcagccaagtcagtcttataccctatttgaatcattcagcggcgagaagaaactgtgtacacacaaaaattggtgtaactggcagatcacacaggacagccaggaaacctacaatttcaccttaatcgccgaaaactaccttcgcaaacggtctgtcaatattttgttcaacctgacccacaggggcgagacaagagtcgtgaccgcgcatcgtggccattag

SEQ ID NO: 127329 - DNA, 1398 bp, synthetic construct
  misc_feature 1..1398: note = Description of Artificial Sequence: Synthetic coding sequence
  source 1..1398: mol_type = other DNA
atgaatgcacagctaaccatggaagcaatcggggaactccacggtgtgtcccacgagcctgtcccggcacccgctgatctcctgggcggttctccacacgcgagaagctctgtggcgcatagaggaagtcatttgccccccgcccatccacggtctatggggatggcatcccttctggatggggggtccggaggcggggattaccatcaccaccacagagctccagagcatagtttggccgggcccttgcaccctacaatgaccatggcctgtgaaacaccacctggaatgagtatgcctaccacatatacaacacttactccgctccagcctctgccacccatttccaccgtatccgataagtttcctcatcaccatcatcatcatcaccatcatcaccacccgcatcaccaccagagactcgcaggcaacgtctccggttcattcacactcatgcgtgatgagagaggtcttgcctcgatgaataatctgtacaccccgtatcacaaggacgtggcggggatggggcagtccttaagccctctgagctcatccggacttggatccatccacaacagtcagcagggactgccccattatgcccaccccggcgcagctatgccaacagacaaaatgctcactccaaatggattcgaagcccaccaccctgctatgcttggacggcatggagagcaacacctgacgcctacatccgcagggatggtaccgattaacggactgcctccgcatcacccccacgcccacctcaatgctcagggtcatggacagctgctcggaacagcgagggagcctaatccatcagtgacgggagcacaggtgtcaaacgggtctaacagcggtcagatggaggaaattaatactaaagaggtagctcagcgaatcactactgagcttaagagatatagcatcccccaagcgatctttgcccagcgcgtgctgtgtcggtcacagggcacgttgagcgatctgctccgtaaccctaagccatggtctaaactcaaatccggtcgtgagactttccgccgaatgtggaaatggctacaggagcccgagtttcagcggatgtctgccctgcgcttggccgcatgtaagcggaaggaacaagagcatgggaaagatcgggggaacacgcctaaaaaacctaggttggtgttcacagacgtacagagacgtacacttcatgcgatctttaaggaaaacaagaggccaagtaaagagctgcagataaccatatcccaacagctcggattggagttgtccaccgttagcaatttctttatgaacgcacgaagacgttcactggacaagtggcaggacgaaggttcgagcaatagtgggaactcaagttcatcatcatctacttgtaccaaagcctag

SEQ ID NO: 127330 - DNA, 1515 bp, synthetic construct
  misc_feature 1..1515: note = Description of Artificial Sequence: Synthetic coding sequence
  source 1..1515: mol_type = other DNA
atgaaagccgcgtataccgcgtatcggtgcttgactaaagatcttgaaggctgcgccatgaaccccgagctgacgatggaatccttgggcacccttcatggaccggccggcggcgggtccggaggtggcggcgggggcggcggcggcggcggaggtggagggcccggtcatgagcaggaattgctggcatctcctagccctcatcatgcagggcggggggcagccggcagtcttaggggacctcctcctccacccacggcgcaccaggaactggggaccgcagccgctgccgccgccgctgccagtaggtctgccatggtcacttctatggcaagtatcttagacggcggggattatcggcccgaactgtccatccctctgcaccacgcaatgtccatgtcatgcgattctagcccccctgggatgggcatgtccaacacctataccaccctcaccccattgcagcccttgccaccgatctctacggtaagcgacaaatttcaccatccccacccacaccatcaccctcatcatcaccatcaccaccatcaccagagactgtccgggaacgtgagcggctcattcactctgatgagagatgaacgcgggctccctgctatgaataacttgtactccccctataaggagatgcccggaatgtcccagtcactgagcccactcgcagctactcccctgggcaacggactgggaggtctgcacaatgcccagcaatccctccctaactacggccccccaggccacgacaaaatgctatcacctaattttgacgcccatcacacagctatgcttactcgaggcgagcagcacctgtctcgcggcctgggtacccccccagccgctatgatgtctcacctgaatggcctccaccaccctgggcatactcagtctcatggccctgtcctggctccatcccgggagagacccccctcctccagctccgggagtcaggtggctacctccgggcagctggaggaaatcaataccaaagaggtcgcacagaggattacagcagagctgaagaggtacagtataccacaagccattttcgctcagagagttctttgtcgcagccaagggactctaagcgatttgttaaggaaccctaagccgtggtcgaagctcaaatcaggccgcgaaacgttcagaaggatgtggaaatggctgcaggagcctgagttccagcgaatgtcggctctgcgacttgcagcgtgcaaacgcaaagagcaagagcctaacaaggatcggaataactcccagaagaagtccagactggtattcaccgacttacagcgaagaacgttgtttgccatatttaaggagaacaagagacccagcaaagagatgcagatcaccatttcccagcagctgggactcgaattgaccacggtcagcaactttttcatgaacgcccggcggcgcagcctggaaaaatggcaggatgacctttcaaccggcggatcgtcatccaccagttctacctgcacgaaggcgtag

SEQ ID NO: 127331 - DNA, 1458 bp, synthetic construct
  misc_feature 1..1458: note = Description of Artificial Sequence: Synthetic coding sequence
  source 1..1458: mol_type = other DNA
atgaatcccgagcttacaatggagtctctgggcaccctgcacggccccgccgggggagggtcaggtggaggcggcgggggagggggtggaggtggaggcgggggccctgggcacgaacaggaacttttagcctctccttctccacaccatgctggaagaggcgccgccggtagtctcagaggcccccccccccctccgacagctcatcaagagctgggtacggccgctgcggctgcagcggctgctagccgtagtgctatggtgacatctatggcctcaatcctggacggaggcgattaccggccggagttgtcaattccactgcatcacgcaatgtcgatgtcctgtgactcttcacctcccggcatgggcatgtccaacacgtacaccactttgacacccctccagccgctgccccccatttccacagtctctgacaagtttcatcacccacatccgcatcatcatccacaccatcaccatcaccaccaccatcagagactcagcggtaatgtgtccgggagctttaccttgatgcgggacgagcggggtctacctgcgatgaataacttgtactcaccctacaaagaaatgcccggaatgtcgcagagtctgtcccctctggccgccacacctctgggtaacggactgggaggcctgcacaacgcccagcagtccctgcctaactacggcccccccggtcacgacaaaatgctgagtccgaacttcgatgctcatcatactgctatgctcacccgcggggagcagcatttgtcccgtgggttgggaacaccccccgctgccatgatgtcccacttgaatggactgcatcaccccggacatacgcagagccacggccctgttttagccccgtcacgggagagacccccttcctcttcctctggcagccaggtggctacttcagggcagctggaggagatcaacaccaaggaggtggcccagagaattactgccgagttgaagcgttactctatcccccaggcaatcttcgcccagcgagttctgtgcaggtctcaaggcactctctctgatttgcttcgcaatcctaaaccttggtccaaattaaaatcagggagggaaacgttccgtagaatgtggaagtggctgcaggaacccgagtttcagaggatgtcagctctcagactggccgcttgcaaacgaaaagaacaggaacctaacaaggataggaacaatagccagaagaagagcagactggtgtttaccgatctgcagcggcggacattgttcgccatcttcaaagagaacaaacgcccatcgaaggagatgcaaattacaatttcccagcagttggggctggagcttactacggttagcaacttcttcatgaacgcccgccgccgttcccttgaaaaatggcaggatgacctgtcaaccggaggcagttcttctaccagcagcacctgtacaaaagcctag

SEQ ID NO: 127332 - DNA, 450 bp, synthetic construct
  misc_feature 1..450: note = Description of Artificial Sequence: Synthetic coding sequence
  source 1..450: mol_type = other DNA
atggtggatgatgctggcgcggccgaatcccagcgcgggaagcagacccccgcccatagcctcgaacaactgaggagacttccgcttccccctcctcaaattcggatccgaccatggtggttccccgtgcaggagctccgagatccactggtgttttacttggaggcctggctggctgatgagctcttcgggccagaccgggccattatcccagagatggaatggactagtcaagctttgttaacggtcgatatcgtagactccgggaacttggtggaaataaccgtgttcggccggccgcgtgtgcagaaccgggtcaagtctatgctcttatgccttgcttggttccacagggagcatagagctcgggctgagaagatgaagcacctcgaaaaaaatctgaaggcccacgcttcagacccacattctccacaggaccctgtcgcatag

SEQ ID NO: 127333 - DNA, 387 bp, synthetic construct
  misc_feature 1..387: note = Description of Artificial Sequence: Synthetic coding sequence
  source 1..387: mol_type = other DNA
atggcccctgtaaagaagctggtagttaaagggggcaagaagaaaaagcaggtgctcaaattcacgctagactgcacccatcctgtggaggatggtataatggacgcagctaatttcgagcaatttctgcaggagagaatcaaagttaacggcaaggctggtaatcttggcggcggtgtggtcaccattgaacgtagtaagtccaagatcacagttacgtccgaggttcctttttcgaaacggtatttaaaatacttgactaagaaatatctgaagaagaacaacctccgggattggctgcgtgttgtcgctaatagcaaggaaagctacgagttaaggtattttcagatcaatcaggatgaagaagaagaggaagatgaggattag

SEQ ID NO: 127334 - DNA, 975 bp, synthetic construct
  misc_feature 1..975: note = Description of Artificial Sequence: Synthetic coding sequence
  source 1..975: mol_type = other DNA
atggagcccgcccctagcgctggtgcagagctccagccccccctcttcgctaacgcctcagacgcgtaccccagtgcctgtcccagtgccggcgctaatgcttctgggcccccaggggctcgctccgcaagctctctcgcactggccatagcgatcaccgccctgtactccgccgtctgcgcggtgggtcttttgggcaatgtcttggtgatgtttggcattgtgaggtacacgaagatgaagactgccactaatatctacattttcaacttagccttagccgacgcgctggccaccagcacactcccatttcagtccgccaaatatctgatggaaacatggccattcggcgaactgctttgtaaggctgtgctgtctattgactattataacatgttcaccagtatcttcacactcactatgatgagtgtagaccgctatatcgctgtctgtcacccggttaaggctctggattttcgaactccagctaaggccaagctcatcaacatatgtatctgggtcctcgcgagtggtgtaggagtgccgataatggttatggccgtgacgcgcccccgtgacggagctgtcgtgtgtatgctgcagttcccctcaccctcgtggtactgggacactgtcaccaagatctgtgtgttcctattcgcatttgtggtctgctgggcgcccatacatatctttgttatcgtgtggactctcgtcgacattgaccgtcgagacccccttgtggtggcagctttgcacttgtgcatcgcccttggctacgccaattcctccctgaaccccgtattatatgcattccttgatgagaacttcaaacgatgtttccgtcagctctgcagaaagccttgtggtcggccggatccgtccagcttcagcagggccagagaagcaactgcccgggaaagagtcactgcatgtacaccctcagatggtcccggcggcggggccgccgcttag

SEQ ID NO: 127335 - DNA, 1143 bp, synthetic construct
  misc_feature 1..1143: note = Description of Artificial Sequence: Synthetic coding sequence
  source 1..1143: mol_type = other DNA
atggacagcccaatccaaattttcagaggtgaacccggccctacctgtgcgcccagtgcttgtctaccacccaatagtagcgcctggtttcccgggtgggcggagcctgattcgaatggctccgccggctccgaagacgcacagctcgagccagcccacatcagtcctgctattcctgtcattatcactgccgtgtacagcgtcgtttttgtcgtcggattagtgggcaatagcctcgttatgttcgtgatcattcggtatacaaagatgaagactgccactaatatttacatcttcaatctggctctggccgacgctctggtgaccacgaccatgccatttcagtcaactgtgtatctgatgaatagttggccttttggggacgtgctttgcaagatcgtgatctctattgattattacaacatgttcactagcatctttaccctgactatgatgtccgtggacaggtatattgctgtgtgtcatcctgtgaaggccctggacttccgaaccccattgaaggccaagatcattaacatatgtatttggttgctgtcaagctctgtcggaatttcagctatcgtcctcggggggactaaggtgcgtgaggacgttgacgtgatcgagtgctcgcttcagtttccagatgatgattactcctggtgggacctgtttatgaaaatttgcgtgtttatctttgccttcgtaatccccgtattgattatcatagtgtgctacaccctgatgatcctgcgtctgaaatctgtccgactgctgtctggaagccgcgagaaagacaggaacctccggagaatcactagactcgtcttagttgtggtcgctgtcttcgtggtttgctggacaccaattcatatctttatcctcgtggaagccctcggctccacctcacactctacagctgccctgtcttcatactatttttgcatcgctctgggttatacaaatagcagcctgaacccgatcctgtatgcattcctcgatgaaaacttcaagaggtgttttcgggacttttgcttcccactgaagatgcggatggagcgccaatccactagccgggtccgcaacacagttcaagaccctgcttatcttagagatattgacggtatgaataaacctgtatag

SEQ ID NO: 127336 - DNA, 1101 bp, synthetic construct
  misc_feature 1..1101: note = Description of Artificial Sequence: Synthetic coding sequence
  source 1..1101: mol_type = other DNA
atggatagcccaattcaaatttttaggggggaacctggtcctacatgtgccccgtccgcttgcctgccccccaacagctccgccgggtccgaagacgctcaactggaacccgcccacatttcgcctgctattcctgtgatcatcaccgcagtttacagtgtggtgtttgtggtcggtttggtgggtaacagtctcgtgatgtttgtcattatccgctacaccaagatgaaaacagccaccaacatttacatattcaatttggccctcgccgacgccttagtgactactacaatgccgttccaatccacggtgtatctcatgaactcctggcccttcggggacgttctgtgtaagatcgttatatctattgactattataacatgtttacttcaattttcacactaaccatgatgtctgtggatcgctatatcgcagtctgccatccggtaaaggctctggacttccggactcccctcaaagctaaaataattaacatatgtatctggctcctttcctcttcggtagggataagcgcaattgtgctgggaggcacgaaagtccgtgaggatgtggatgtgattgaatgctccttacagtttccagacgacgattacagctggtgggatctgttcatgaaaatttgtgtgttcatcttcgccttcgttataccagttctaatcatcatcgtgtgttatacattaatgattctccgcttaaaaagtgttagactgttgtcggggtcccgcgagaaggatagaaatctgcggcgcataactcgcctggttctggtcgtcgtcgctgtgtttgtcgtgtgctggacccctatccacatcttcattttggtagaggccctcgggtctacatcgcacagcacggcagctctcagttcttattatttttgcatcgcacttgggtataccaattcatccttaaaccctattttatacgcgtttctggacgagaatttcaaaagatgcttcagggatttttgctttcctctcaagatgcggatggagcgtcagtccacatctagagttcgaaatacagtgcaggacccagcctatctgcgcgacatcgatggaatgaacaagccagtctag

SEQ ID NO: 127337 - DNA, 1143 bp, synthetic construct
  misc_feature 1..1143: note = Description of Artificial Sequence: Synthetic coding sequence
  source 1..1143: mol_type = other DNA
atggactctccgatccagatcttcagaggggagcccggacccacatgcgctccctctgcttgcctcccacccaatagcagcgcttggtttccaggctgggccgagcccgattctaatgggagtgcagggagtgaggacgctcagctggagcctgctcacatttcccccgctattccagtgattatcacggcagtctacagtgttgtttttgtagttggtttagttggtaacagcctggttatgttcgtgattatccggtacacaaagatgaaaacagcgacaaacatttatatcttcaatctcgctctcgcagacgctcttgtgaccacgactatgccgtttcaatccaccgtgtacctgatgaattcatggcccttcggggacgtgctgtgtaagatagtgatctcaattgactattacaatatgttcacaagtatctttacgttgaccatgatgtcagtggaccgatacattgcagtttgccatcctgtgaaagccttggatttcaggacccctttgaaagccaagattattaatatttgcatctggcttttgtccagctcagtcggaatcagcgcgattgtgctaggggggactaaggtccgggaagacgtcgatgtcatagagtgtagcctgcagtttccggatgacgattatagctggtgggacctctttatgaagatatgcgtattcatcttcgccttcgttatccccgtgcttattattattgtgtgctacactctgatgattctgcggctcaaaagtgttcgactgctttccggaagtcgtgaaaaggatagaaatctccgaagaattacaaggctggtcctggtggtcgttgcggtgttcgtagtttgttggacccccattcacattttcatattggtagaggctcttggaagcacatcacacagcactgccgccctgtccagctattatttctgcatagccttaggctacaccaatagtagtctcaaccccattctctacgcctttctggatgaaaacttcaagcggtgtttcagagatttctgctttccattaaagatgcggatggagcgccagagcacctccagggtgcgcaacacagtgcaggatcccgcgtaccttagagacatagatggcatgaacaaacctgtctag

SEQ ID NO: 127338 - DNA, 1344 bp, synthetic construct
  misc_feature 1..1344: note = Description of Artificial Sequence: Synthetic coding sequence
  source 1..1344: mol_type = other DNA
atgtccagacggccctgtagctgtgcactccgccctccccggtgtagctgctcagcatctcccagcgcagtcacagccgccggcagaccgaggcccagtgactcttgcaaagaggaatcaagcacactcagcgtgaagatgaagtgtgactttaactgtaaccacgttcactccggactgaaattggtcaagccagatgacattggaagactcgtgtcctatacccctgcttatctcgagggttcctgtaaggattgtataaaggattacgaacgcctcagctgtattggtagcccaatagtgtccccaaggatcgtgcagctggaaaccgagtcaaagagactgcacaataaggaaaatcaacacgtgcagcagacattgaattctaccaacgagatagaggctctggaaacctcacgactttatgaagacagtgggtactccagcttcagtctgcagagtggtctgagtgaacacgaggaaggatctcttcttgaagaaaatttcggcgactctctccagagttgtctcttacaaattcagagtcctgatcagtatcctaacaagaatttgttacccgtcttgcacttcgaaaaggtggtctgctctacactaaaaaaaaacgccaagcgcaatcccaaagtggacagagaaatgctcaaagaaatcattgcaaggggcaactttcgcttgcagaatatcatcggcagaaagatgggactggagtgcgtggatatactctctgagctcttccgcaggggtctgcgtcatgttctcgccaccatactggcccagttgagcgatatggatctcattaatgttagcaaggtttcgacgacttggaaaaaaattctggaagatgacaagggagcatttcagctttactctaaagctattcagagggttaccgagaacaataacaaattctcaccacacgcaagcacacgagagtacgtcatgttccgcacacccctcgccagcgtccagaagtccgctgcccagacatctttgaagaaggacgcccagaccaagctctctaaccagggggatcagaagggatctacttatagtcgtcataacgagttttccgaagtggcaaagaccctgaaaaaaaatgagagcctgaaagcctgcattagatgtaactcccccgctaagtatgactgctacctccagcgggctacatgcaaacgggaggggtgcggattcgactactgtacaaagtgcctgtgcaattatcatacgacaaaggactgtagtgacgggaagttgctgaaggcctcttgcaagattgggcctctgcccgggaccaaaaagtctaagaaaaatctgcgtagactgtag

SEQ ID NO: 127339 - DNA, 1203 bp, synthetic construct
  misc_feature 1..1203: note = Description of Artificial Sequence: Synthetic coding sequence
  source 1..1203: mol_type = other DNA
atggattcatctgcggctcccaccaacgctagtaactgcacagatgccctcgcatactcaagctgttcgcccgccccgtcaccaggatcctgggtgaacctatcacacctagacggaaatttgagcgacccctgcggacccaacaggacggatctgggcggccgcgattccttatgcccccctacaggatcacctagtatgattaccgcaattaccattatggccctttactccatcgtttgtgttgtagggctttttgggaattttctggtcatgtacgtgatcgtccggtatacgaaaatgaaaactgcaacgaacatatatatcttcaatctcgcccttgccgacgctcttgccactagcactctgccatttcagagtgtgaactacctgatgggcacatggcctttcggtaccattctgtgtaagatcgtgatctctatcgactactacaatatgttcacctcaatcttcaccctgtgcaccatgagcgtcgatcggtatattgctgtgtgtcatcctgtgaaggcgctcgacttccgcacgccccggaacgccaaaattatcaacgtgtgcaactggattttgagtagcgcaatcgggctgcccgttatgttcatggctaccacgaaatatcgtcaggggtctatcgactgtacccttacattcagccaccctacttggtattgggagaatctcctgaaaatatgcgtgttcattttcgcgttcattatgccagtgctcattatcaccgtgtgttatggcctgatgatcctgagactgaagtcagttcggatgctttctggcagcaaggagaaagatcggaacctgagacgcatcaccagaatggtgctcgtcgttgtggcagtgttcatcgtctgttggacgccaatccatatctatgtaataattaaggcccttgtcactattccggaaaccacctttcagaccgttagttggcatttctgtattgctttggggtataccaatagctgtctaaatcccgtactgtatgcgtttcttgatgagaacttcaagagatgcttccgagaattctgcattcctaccagttcaaatattgagcaacagaacagcacaagaattaggcagaatacaagggaccacccttctactgcaaacaccgtcgaccgaacaaaccaccaactcgaaaatcttgaggccgaaacagctccactcccttag

SEQ ID NO: 127340 - DNA, 1257 bp, synthetic construct
  misc_feature 1..1257: note = Description of Artificial Sequence: Synthetic coding sequence
  source 1..1257: mol_type = other DNA
atggactcctccgccgcacctactaatgcatccaattgcacagatgccctcgcctatagttcctgcagccctgcccctagcccagggtcctgggtgaacctgtcacatctcgacgggaacttaagcgacccttgcggccctaatcggaccgacttgggggggcgtgatagcctgtgccccccaactgggtctccttcgatgatcaccgctattactatcatggcactgtattccatcgtgtgtgtggttggtctgtttgggaacttcctggttatgtatgtcatagttagatatactaaaatgaaaaccgccacaaatatttacatctttaatctggcgctcgcagacgctctagcgactagcacgcttcctttccagtccgtgaactatctgatgggtacctggccatttggaacaattctatgcaagatcgtgatatccatcgactactacaatatgtttacttcaatctttacgctctgcaccatgtcagtggatcgctacatagccgtttgccatccagtcaaggcactggactttagaacaccccgcaatgccaagattataaacgtgtgcaactggatcctgtcttccgcaattggactccccgtcatgttcatggccacgacaaagtaccggcagggttcaatagattgcacccttaccttctctcatccaacctggtattgggaaaacttgttaaagatttgtgtatttatatttgctttcatcatgcctgtgctaattataacagtgtgctacggactcatgatcctccggctcaagagtgtgcgcatgctcagtggctcaaaggagaaagaccgcaacctgagacggataactaggatggtgttagtggtggtggcagtgttcatagtgtgctggaccccaatccacatttacgttattattaaggctttggtaactattcctgagacgacattccagaccgtctcatggcacttttgtatagcccttggatacacaaattcctgcctgaatcccgtgctgtatgcctttctagatgagaatttcaagcgttgtttccgggagttttgcatccccacgagcagtaatatcgaacagcaaaactccactcgaatcaggcagaatacacgcgatcatccctctactgccaatacagtcgaccgcaccaatcaccagccccctctggctgtgtccatggctcaaatattcactagatacccacctccaacgcaccgggaaaagacttgtaatgattatatgaagcgttag

SEQ ID NO: 127341 - DNA, 1209 bp, synthetic construct
  misc_feature 1..1209: note = Description of Artificial Sequence: Synthetic coding sequence
  source 1..1209: mol_type = other DNA
atggattcatccgccgctcccacgaatgcgtccaattgcaccgacgcgctggcttactcctcatgttcccctgcaccatcccctgggagttgggtgaatttatcccacttggacggtaatttaagcgacccttgtggaccaaaccgtacagacctgggaggcagggattccttgtgcccgccaacaggtagtccatctatgattactgccataaccataatggccctgtactcaatcgtgtgcgtggtgggtctgtttggaaacttcctggtgatgtatgtaatcgtgcgctacacaaaaatgaagaccgcgaccaacatttatattttcaaccttgcacttgcggacgcactggcaactagcactctgccttttcaaagtgtgaattacctgatgggaacatggcctttcggcacaatcctctgtaaaattgtgatttctatcgactattacaacatgttcacatccatcttcacgttgtgcacaatgtctgtagaccgctatattgcagtgtgtcatccagtgaaggccctggacttcagaacaccccggaacgcaaaaattatcaacgtgtgcaattggattttaagtagcgccatcggcctgcctgtaatgtttatggcaactactaagtatcggcaaggctctattgattgcaccctgacattctctcaccccacatggtactgggagaacttgctcaaaatttgtgtcttcattttcgctttcatcatgccagtgctcatcattaccgtgtgctatggattgatgatactcagactgaagtcagtgcgaatgctcagcggaagtaaagagaaagatagaaatctaaggagaatcacacgcatggtcctggtcgtggtggccgtgtttatagtttgctggacgccaattcatatctatgtgattataaaagctctcgtgacaattcctgaaactactttccagacggtgtcttggcacttctgtatcgctctgggctacacaaactcatgccttaacccagttctctacgccttcctggacgagaatttcaagagatgtttcagagagttttgtattcctacctcttcaaacatcgagcagcagaattcaactcgaatacggcagaatacccgtgaccatcctagtactgctaatactgtagaccgtacaaaccaccaaatccgcgatccaatcagcaatctgccccgggtgtccgtcttctag

SEQ ID NO: 127342 - DNA, 1212 bp, synthetic construct
  misc_feature 1..1212: note = Description of Artificial Sequence: Synthetic coding sequence
  source 1..1212: mol_type = other DNA
atggattctagcgctgcacccactaacgctagtaactgtacggacgctctcgcctacagctcttgctcccccgccccttccccaggctcctgggtaaaccttagtcatcttgacggcaacttgtcagacccctgtggtcccaatcgaacagatttgggagggagggattcgctatgcccacccacgggatcccctagcatgatcacagccattacgatcatggccctctacagtattgtgtgcgtggtgggacttttcggaaatttcttggtgatgtacgtgatagtacgatataccaagatgaagacggccactaacatctacatctttaatctggctctggccgacgctctggcaacctctaccctgcctttccagagtgttaactacttgatgggaacttggccattcggcaccattctttgcaagatcgtaatctccatcgactactataatatgttcacgtccatctttactctctgcactatgagcgtcgataggtatattgcagtgtgccaccctgttaaagcactggactttcggacccctcgaaacgcgaagatcatcaatgtctgtaattggatcctgtcatccgcaattggcctccctgtgatgttcatggctactaccaaataccgccagggctcaatcgactgtaccctgaccttttcccaccccacctggtactgggagaacctgttgaaaatctgcgtcttcatctttgctttcattatgccggtgctgattattacagtttgttacggcttgatgatcctacggcttaagtctgtgagaatgctgtctggaagcaaggaaaaagaccgtaatctccggcggataacgcggatggtgctcgtcgttgtggccgtgtttattgtgtgctggacaccgattcatatatacgttatcattaaagctctggtgaccataccggaaactacctttcagacagtaagctggcatttttgcattgcgcttggctacaccaattcttgtttgaatcccgtactctatgcttttctcgacgagaacttcaagagatgtttccgcgaattctgcattccaacttcatccaacattgagcaacagaactctacccgaataaggcaaaacacccgagatcatccctctaccgccaataccgtggataggacaaaccatcagggtccgccagccaagtttgtcgccgatcagttggcgggaagttcctag

SEQ ID NO: 127343 - DNA, 1263 bp, synthetic construct
  misc_feature 1..1263: note = Description of Artificial Sequence: Synthetic coding sequence
  source 1..1263: mol_type = other DNA
atggatagtagcgctgcacccaccaatgcatctaattgcactgatgccttggcctactcatcatgcagcccagccccatcaccaggctcctgggtaaacttatcacacctggatggcaatctcagcgatccttgcgggcctaaccgaactgacctgggcggccgtgactctttgtgtcccccaaccgggagcccctccatgattacagctatcaccataatggctctgtactcgatcgtttgtgttgtcggtctgttcgggaactttctcgtcatgtacgttatcgtgagatacacaaaaatgaagaccgccaccaatatttatatctttaatctggcccttgccgatgccctggctactagcaccttgcctttccagagcgtcaattatctcatggggacctggccttttggtaccatcctgtgtaagattgttatctctatagactactacaacatgtttacttctatttttacactgtgtacgatgtccgtggataggtacattgcagtgtgccacccagtaaaggcgcttgattttcggacacctagaaatgcgaagatcatcaatgtctgtaattggatcctgagctcagccatcggactgcccgtgatgttcatggccacaacgaaatataggcaagggtctattgattgtacattaaccttcagccatcctacctggtactgggaaaacctgctgaagatatgcgtattcatattcgccttcatcatgcctgtactgatcatcaccgtgtgctatgggctgatgatacttcgcctgaagtcagtacggatgttgtctggatccaaagaaaaggaccgcaatctcaggcggattacaaggatggttctcgtggttgtggcagtgttcatcgtgtgttggactcctatccatatttacgttattatcaaggcccttgtgaccatacctgaaaccacattccagaccgtctcgtggcacttttgtatagctcttggatatacaaactcttgtctcaatcctgtcttatatgccttcctcgatgaaaattttaagagatgctttcgggaattctgcatccctacatcctccaacatcgagcagcagaattccacccggatccgccagaataccagggatcatccaagcacggctaatacagtagacaggacaaaccatcaggtggaattgaacttggattgccattgcgaaaatgcaaagccctggccgctgagttacaacgctggccagagtcctttcccttttcccggccgggtctag

SEQ ID NO: 127344 - DNA, 1179 bp, synthetic construct
  misc_feature 1..1179: note = Description of Artificial Sequence: Synthetic coding sequence
  source 1..1179: mol_type = other DNA
atggactccagcgccgcccctaccaatgcatccaactgtactgatgcccttgcctattcgtcctgctctcctgctccaagcccagggtcctgggtgaatttatcccacctcgacggaaatctttccgacccatgtggcccaaataggacagatcttggaggtcgggattctctgtgtcctccaaccgggtctccatcgatgataaccgcaattaccattatggccctgtattctattgtttgcgtggtgggactgtttggtaattttctggtcatgtacgtgattgtcagatatactaagatgaaaacagccacgaatatatacatttttaacttagcactggccgacgctctggcaacgtcaaccttaccctttcagtccgtgaattacttgatggggacctggccttttggaacaatcttgtgtaagatcgttatctccatcgattactataatatgtttacatccatttttaccctctgcaccatgtcagtggatagatacattgcggtatgccacccggttaaagctcttgactttcgtacccctcggaacgcaaaaattattaatgtgtgcaattggattctgtctagcgccattgggctgcctgtgatgttcatggcaaccacgaagtaccggcagggcagtattgactgtacactcaccttctcccacccaacttggtactgggaaaatctattgaaaatttgtgtattcattttcgcgtttatcatgccggtgctgatcatcaccgtatgctatggactgatgatcctcagactcaagtccgtaaggatgctgtccgggtctaaagagaaagaccggaaccttcggagaattaccagaatggtgctcgtcgtcgtggccgtattcattgtgtgttggacgcctatccacatttacgtcattatcaaagctctcgtgaccatcccagaaaccacatttcagacagtatcttggcatttctgtatcgctctgggatataccaactcctgtctgaatcccgtgctctacgcatttttagacgagaattttaagaggtgcttcagagagttctgcattccaacctcatccaacatcgagcagcagaactcaactcgtattcgccagaatactcgcgaccacccgagtactgcgaacaccgtggaccggaccaaccatcaggttcgtagcctgtag

SEQ ID NO: 127345 - DNA, 1482 bp, synthetic construct
  misc_feature 1..1482: note = Description of Artificial Sequence: Synthetic coding sequence
  source 1..1482: mol_type = other DNA
atgtgtcttcataggagagtgcccagcgaggaaacctacagcctggatcgtttcgctcagaacccccccctatttcctccaccatccctccccgcgagcgaaagccgtatggctcacgcgccattgctgcagcggtgcggggctgcccggacaggtttttgcaagaaacaacaggaactgtggcagaggagaaaggaagcagccgaagcacttggaacgagaaaagtgagtgttctgctcgcaacctcccatagcggagcacggcccgctgttagcactatggattctagcgcagcacctacaaatgccagtaattgcacagacgccctggcatacagctcctgctctccagcccctagtccaggctcatgggttaacctttcacatttggatggcaacctcagcgatccttgcgggcccaacaggaccgatttaggcggtcgagactccctgtgcccaccgaccggttctccgtccatgataaccgcaatcaccattatggcgctttatagcattgtgtgtgtggtgggtctgtttggcaatttcctcgttatgtatgtcatcgtaagatataccaagatgaaaaccgcaactaatatctacatcttcaacctggccctggccgatgctctggccacctcaacattgccttttcagtccgtcaactatttgatgggcacctggcctttcggcacaattctgtgtaaaattgtgatctctattgattattacaacatgtttacctccatttttaccctgtgcacaatgtcagtggaccggtatatcgctgtctgtcaccctgtgaaagccctggatttcagaacgcctcgtaatgctaagattatcaatgtgtgtaactggatactctcgtcagccattggactgcccgttatgtttatggccaccacaaagtacaggcaaggctcaatcgattgcacactgacattttcacacccaacatggtattgggagaatctgctgaagatttgtgtgtttatcttcgcattcatcatgcccgtgctaatcatcaccgtttgctatggactgatgatcctccgactcaagagtgttaggatgctctctggctcaaaggaaaaagacaggaacctcagacggatcacaagaatggtactggtggtagttgccgtgttcatcgtctgctggacacctattcacatctatgtcataataaaagcccttgtaaccattcctgagacgacattccagacagtgtcatggcacttttgtatagctctcggttatactaattcgtgcttaaaccccgtcctctatgccttcctggatgaaaacttcaagcggtgcttcagagagttttgtatccccacctcctccaatatagagcaacagaactcaaccaggatacgccagaacacgcgggatcacccttcgacagccaatactgttgacaggacaaaccatcaactggagaatctcgaggctgagaccgcaccgctcccgtag

SEQ ID NO: 127346 - DNA, 1194 bp, synthetic construct
  misc_feature 1..1194: note = Description of Artificial Sequence: Synthetic coding sequence
  source 1..1194: mol_type = other DNA
atggattccagtgcagctccaactaatgcatcgaattgtactgatgcgcttgcctactcctcttgcagccctgcacctagccccggcagttgggttaatctgagccacctggatggcaatctgtctgacccgtgcggtccaaatagaactgacctgggtggaagagattcgctttgtccaccaaccggctcccccagtatgatcactgctatcaccattatggctctctattctatcgtttgtgtagtaggcctcttcggtaactttctggtgatgtacgtgatagtacggtataccaagatgaagaccgccacaaatatctatattttcaatctggctctcgctgacgctctggccaccagcacactgcctttccagtctgtgaattacctgatgggcacatggccatttggtacaattctttgtaagatagtaatttctatcgactattacaatatgtttacaagtatcttcactctgtgcactatgtcagtggaccgctatattgcagtctgccatcccgtgaaggcacttgactttagaacaccaaggaatgcgaaaattatcaacgtgtgcaattggatactgtcctcagcgatcggtctgcccgtgatgtttatggctaccaccaaataccgacaagggagcatcgactgcacattgaccttcagtcatcccacttggtactgggaaaacctcctgaagatatgtgtgttcattttcgccttcatcatgccagtcctcatcattacagtgtgttacgggcttatgatcctccgtctgaaatccgttcgaatgctttccggctctaaggagaaggatcgcaatctgcgacgcatcacccgaatggttctcgtcgtggtggcggtcttcattgtgtgctggacccccatccatatttatgttattattaaggctctggttacaattcccgagacaacatttcagacagtctcctggcacttctgcattgcgctgggctacaccaacagctgcctcaatcccgtcctctatgcgtttcttgatgaaaacttcaagcggtgcttcagggagttttgcattccaacttcttccaatattgaacagcagaattctaccagaattcgacagaataccagagaccacccctccactgctaataccgttgacaggacaaaccaccagagagaaaggagacagaaatccgactggtag

SEQ ID NO: 127347 - DNA, 1221 bp, synthetic construct
  misc_feature 1..1221: note = Description of Artificial Sequence: Synthetic coding sequence
  source 1..1221: mol_type = other DNA
atggactccagtgcagctcctactaacgcttccaattgcaccgatgctctggcttactcaagctgctccccagcaccgtctcctggtagctgggtcaacctctcacacctagacggtaatctgagcgacccatgtggcccaaatagaacggacttaggcgggcgggattccctgtgtcccccaacaggatcaccatcaatgattacggctattacaataatggctctatatagcatcgtgtgtgtcgtagggctctttggcaacttcctcgtgatgtacgtaatcgtgcgttacacaaagatgaaaacagcaacaaacatttacatcttcaatctcgctctggccgatgctcttgcgacaagcacacttccattccaatccgtaaactacctaatggggacatggcccttcggcaccatcttgtgtaaaattgtgatttctatcgactattacaacatgtttacgagtatcttcactctttgtacaatgtctgtcgaccgatacatcgccgtgtgccatccggtgaaagccctcgacttccgcactcctcgcaacgctaaaatcatcaacgtgtgtaattggattcttagcagcgcaatcggtctgcctgtgatgtttatggccacaaccaagtatagacagggaagcatcgattgcacactcactttttctcaccctacatggtactgggaaaatctgttgaaaatctgcgttttcatcttcgccttcatcatgcccgtattgatcatcacagtctgctacggtcttatgattttgcgacttaaatccgtccggatgctttctggctcaaaagagaaggaccgcaacttaagacggattaccaggatggttcttgtggtggtagccgtgttcattgtgtgctggacacccattcacatctacgtcatcattaaagcattggtgaccattcctgagacgaccttccaaactgttagctggcacttttgtattgctctcggttacactaattcctgtctgaacccagtgctgtacgcattcctcgatgagaactttaaacgatgtttccgggaattttgtattcctactagcagcaacattgaacagcagaactctactagaatccggcagaatacaagagaccacccctcaactgccaataccgtcgatagaaccaatcaccaaaagattgatctctttcagaaatcaagcctactgaactgtgagcacaccaaggggtag

SEQ ID NO: 127348 - DNA, 960 bp, synthetic construct
  misc_feature 1..960: note = Description of Artificial Sequence: Synthetic coding sequence
  source 1..960: mol_type = other DNA
atgatgagagcaaaaagcattagcactaaggcggggaaaccgtcaaggtacactaagatgaaaacagcgaccaatatatacatctttaatctggccctggctgacgcactcgcgacctcgactttaccattccagagtgtaaattacctgatgggaacctggcccttcggcacaattctctgcaagattgtgatctccatcgattactataacatgttcaccagcatctttacattgtgcacgatgtcagttgataggtacatcgccgtgtgccacccagtgaaggctctggactttcggacgccccgaaatgccaagatcattaacgtgtgcaattggattctatccagtgccatcggcctccctgttatgttcatggccacaacaaaatatcgccaaggctctattgattgtaccctgaccttctctcatccaacgtggtactgggaaaacctgttgaagatttgtgtgtttatcttcgcctttattatgccagtactcattatcactgtttgctatggtttaatgatcctgcggctgaagagcgtgagaatgctgagtggcagcaaggaaaaagatcggaacttgcggaggattacccggatggtgcttgtagtcgtggctgtcttcattgtgtgttggaccccaatccacatctacgtcatcatcaaagccctggtcaccatccccgaaactacattccagaccgtatcatggcacttttgcatcgcgctcggatacaccaactcctgcctcaacccggtcctctatgcattcctggacgagaatttcaaacggtgctttagggagttctgcatcccaacatcgagcaacatcgagcagcagaacagtacacgtataagacagaacacaagagaccacccatcaacggcaaataccgtcgaccgtactaatcaccaactggaaaatctggaagccgagactgcgcccctcccatag

SEQ ID NO: 127349 - DNA, 1209 bp, synthetic construct
  misc_feature 1..1209: note = Description of Artificial Sequence: Synthetic coding sequence
  source 1..1209: mol_type = other DNA
atggattccagtgcggcacctacaaatgcatcgaactgcactgatgcccttgcatactcgagttgtagccccgcacctagcccaggatcctgggttaatctttctcacctggacggcaacttaagtgacccatgtggaccaaacagaacagatctcggaggcagggattctctctgccctcccactgggtctccctccatgatcacagccatcaccatcatggccctgtattccatcgtttgcgtggtcggattgtttggaaattttctggtcatgtacgtgatcgttcgttatacaaagatgaagactgcaactaacatttacattttcaacctagccttggcagatgccctcgcaacctcaacccttcccttccagtcggtcaactatctcatgggtacctggccttttggaacaattttatgcaagatagtgatatccattgactactacaatatgtttacatcgatttttacattgtgcactatgtcagtcgatcggtatattgccgtgtgccaccccgtcaaagcactggacttcaggaccccacgaaatgctaaaattatcaacgtctgtaattggattttaagtagtgccatcggattgcctgtgatgttcatggctaccacaaaataccgacagggatccatcgactgcacactgactttttctcacccgacctggtattgggagaatctcctcaagatttgtgtatttatatttgccttcatcatgcccgtgcttattattactgtgtgctacgggctgatgatcttacgtcttaagagcgtgcgcatgctgagcgggtctaaagagaaagataggaacttacgccgaatcacacgtatggtccttgtggttgttgctgtgttcatcgtgtgttggactcccatccacatttacgttataatcaaggcccttgtgaccatcccagaaactacctttcagactgtatcctggcatttctgtattgctcttggctacacaaactcttgcttgaatccagtgctctacgccttcctggatgaaaattttaaacggtgcttcagagagttttgcattccaacgagtagcaacatcgagcagcaaaattccaccagaattcgacagaacacccgtgatcaccccagtaccgctaacaccgtggatcggaccaatcatcagatcagagatccgataagcaacctcccgagggtgtccgtattctag

SEQ ID NO: 127350 - DNA, 492 bp, synthetic construct
  misc_feature 1..492: note = Description of Artificial Sequence: Synthetic coding sequence
  source 1..492: mol_type = other DNA
atggtgcaagcgcgaactggcttttgtaagaaacaacaggaactgtggcaaagacgaaaagaggccgctgaggcactaggcacccgcaaggtgtccgtgctgctggccaccagtcattcaggggctaggcctgccgtttcaaccatggatagttcagccgctccgaccaacgcctccaactgcaccgatgcactggcatacagtagctgttcgcccgctcctagcccaggttcctgggtgaatctgagccacctagacggcaatctgtcagatccgtgcgggcccaacagaaccgacctgggaggacgcgatagtttgtgccctcccaccggcagtcccagtatgattactgccattactataatggctctgtattctattgtgtgtgtcgtgggactctttggtaactttttagtcatgtatgttatcgtgcgctacacaaaaatgaaaactgcgactaatatttatatttttaacttggctctggcgtag

SEQ ID NO: 127351 - DNA, 903 bp, synthetic construct
  misc_feature 1..903: note = Description of Artificial Sequence: Synthetic coding sequence
  source 1..903: mol_type = other DNA
atgaagacagccactaacatttatattttcaacctggccctggccgacgcactcgctacctctacactccccttccagagtgtgaactatctcatgggaacttggccctttggcaccatcctgtgtaaaattgtgatctccatcgattattacaacatgttcacatctattttcactctgtgcacgatgagcgtggacagatacattgcagtttgccatcccgtgaaagccctcgactttcgcaccccgcgtaacgctaagataatcaacgtctgtaactggattctaagttctgccattggcctacccgttatgtttatggccacaactaaataccgacagggctccatcgactgtacgcttacatttagtcacccgacttggtactgggagaatctgctcaaaatttgcgttttcatatttgcattcattatgccggtactcattatcacggtttgttacgggctgatgatcctaagattgaagagcgtccgcatgttatctggtagcaaagagaaggacagaaatctgcgtagaattactagaatggtgctggtcgtggttgcagtatttattgtgtgttggacacccatccatatctatgtaatcatcaaagcactggttaccattccagagactacctttcaaaccgttagttggcatttctgtatagcactcggctacacgaactcgtgcttgaacccggtgctttacgccttcctggacgagaattttaagcggtgctttcgggaattttgtataccaacgagttctaatatcgaacagcagaacagtactcgcattaggcagaatacaagggaccaccctagtactgccaacaccgtcgaccgcacaaaccaccagttagagaatctagaggcagaaacagcacctctgccatag

SEQ ID NO: 127352 - DNA, 903 bp, synthetic construct
  misc_feature 1..903: note = Description of Artificial Sequence: Synthetic coding sequence
  source 1..903: mol_type = other DNA
atgaagacggctaccaacatttacatttttaacctcgccttggcagacgccctggctacatccactctgccatttcagagtgtcaattatctcatgggcacctggccatttgggaccatcttgtgtaaaatagtgatcagtatagattattacaacatgttcactagcatcttcactctgtgcaccatgtccgttgataggtacattgctgtttgtcatcccgtcaaggctctagatttcaggaccccgaggaacgctaaaatcatcaacgtttgtaactggattctgtcatctgccataggcttgcccgtcatgtttatggctacgaccaagtatagacaggggtccatcgattgtacccttaccttcagccatcccacatggtattgggagaatttactgaaaatctgcgtgttcattttcgcattcattatgcctgtgctcatcatcacagtgtgttacggactcatgatattacggctgaaaagcgtgcgcatgctcagcggttccaaagagaaggaccgcaatctgagaagaatcacccggatggtgttggtggtggtggccgtctttatagtttgttggacacccatccacatttacgtgataatcaaagcactcgtcactatccctgagacaacttttcagactgtgtcatggcacttctgtattgcactgggctacactaattcttgtttaaaccccgtactttacgcttttttagacgaaaatttcaagagatgttttcgggagttttgtatccccacaagttctaacatcgagcagcaaaatagcaccaggattaggcagaatacaagagaccaccccagtaccgccaacactgtggaccgaactaatcatcaactggaaaacctagaggccgaaaccgctccactgccatag

SEQ ID NO: 127353 - DNA, 903 bp, synthetic construct
  misc_feature 1..903: note = Description of Artificial Sequence: Synthetic coding sequence
  source 1..903: mol_type = other DNA
atgaagactgcgaccaacatctacatcttcaatctggctctcgccgatgctctcgcgaccagtactttgccattccaaagcgtgaattacttaatggggacctggcccttcggcacaattctgtgcaagattgtgatttccatagattactataacatgttcactagcatattcacgctctgtacaatgagtgttgacagatatattgccgtatgtcaccccgtgaaggcactcgactttcggaccccccgaaacgctaagatcatcaacgtttgtaattggatcctcagctcagcaatcgggctccccgtgatgtttatggctactaccaagtatcgccaggggtctatcgactgcacactgaccttttcccatccaacttggtattgggaaaatctcctgaagatttgtgtgtttatcttcgccttcatcatgccagtcctcatcatcacagtctgctacggtctgatgatcctccgccttaaaagtgtacgcatgctgtccgggtctaaagagaaagatagaaatctgaggcgaataacaagaatggtcctggtagtggtggcagtctttattgtgtgctggaccccgatccatatttacgtgattattaaagcgttggttaccatccctgaaacaaccttccagacagtgtcttggcacttctgcattgccctgggctatactaacagttgcctgaatccagtactctatgcctttttggacgagaactttaagaggtgttttcgggagttctgtatccccacaagcagcaacatcgagcagcagaactctaccagaatccgccaaaacacacgggatcatccaagtacggctaacaccgtggaccgaactaatcaccagctagagaatctggaagccgaaaccgcccccctgccatag

SEQ ID NO: 127354 - DNA, 1209 bp, synthetic construct
  misc_feature 1..1209: note = Description of Artificial Sequence: Synthetic coding sequence
  source 1..1209: mol_type = other DNA
atggattcctcggccgccccgaccaacgcctccaactgtaccgatgctctagcctactcctcctgcagtccagctccatctccaggctcctgggttaatttgagccatctagacggcaatttgagcgatccctgcggccctaatcggaccgatctgggaggacgtgactcactgtgtccaccaacagggtccccatctatgataaccgctattaccataatggccctctacagcatcgtttgcgttgttgggcttttcggaaactttctcgttatgtatgtgattgtgcggtatactaagatgaagaccgcaaccaatatatacattttcaatttggcactggctgacgcgttagccacttcaacactcccgttccagtccgtcaactaccttatgggaacatggccgtttggaaccattctgtgtaagatagtgatatccatcgactactacaacatgtttacttctatcttcaccctgtgcactatgtctgtagatcggtacatagcagtgtgtcaccccgtgaaagcactggacttcaggaccccaagaaacgcgaagatcatcaatgtttgcaactggatactgtcgagcgcgataggcctgcccgtcatgttcatggccaccaccaaataccgccagggctcgatcgactgtacactcactttctcacaccctacttggtactgggagaatctcctgaaaatttgcgtgtttatcttcgccttcataatgccagtcctcattataaccgtgtgttatggcctgatgatcctgaggttgaagagtgtcagaatgctttccgggtcaaaggagaaagataggaatctgaggagaattacccggatggtcctggtggtcgtggcggtgttcattgtctgttggacacccatccacatctatgtcatcattaaggcactggtgaccattcccgaaactacctttcagaccgtttcctggcacttctgtatcgctctaggctacactaactcttgtctgaaccccgtgttgtacgcattcctggacgagaactttaaacgttgctttcgcgaattttgtattcccacgtctagtaacattgagcagcagaacagtacacggatccgccagaatacccgcgaccatccatctactgccaatacagtggatcgcaccaatcatcagatccgagatcccattagcaacctgccgcgagtgtctgtcttctag

SEQ ID NO: 127355 - DNA, 561 bp, synthetic construct
  misc_feature 1..561: note = Description of Artificial Sequence: Synthetic coding sequence
  source 1..561: mol_type = other DNA
atggattcatctgcagctccgactaatgctagtaactgcacagacgctctagcctattcaagttgctctccagcgccttctcccggatcatgggttaatctgagccaccttgatggcaacttgtctgacccttgtggaccgaaccgtacggaccttggagggagggattcattgtgtccccccacaggcagtccctcaatgataactgctatcaccataatggccctatatagcatcgtttgtgttgttgggcttttcggtaactttcttgtgatgtacgtcattgtaaggtttcaccgactgtacactaacatcttgtctagcaaccttgtgctgggcaaacccgctgaagatctgtgtttccatttacgtctgcactatgctagcgcacaccattatagggtgctctggactgatgacctggctccccaggaatgccctcacgccctctggctgcagcgcaaagggcaggaatcatcaaaagaccatcaggatggcgcaggcggaggggggtgtgtgcacaggctcctcgactcgcattcgcatttgcgacaccattag

SEQ ID NO: 127356 - DNA, 1170 bp, synthetic construct
  misc_feature 1..1170: note = Description of Artificial Sequence: Synthetic coding sequence
  source 1..1170: mol_type = other DNA
atggactcttcggctgctcccactaacgcgagtaactgtacagacgccttagcatactcttcttgtagcccggctccttccccggggtcctgggtaaatctgtcccatttggacgggaacttaagcgacccttgcggacctaatcgcacagatctggggggacgcgatagtctgtgccccccaaccggaagtcctagtatgattaccgccatcactatcatggcactgtactcaatagtctgtgtggtcgggctgtttgggaactttcttgtgatgtatgtaattgttagatacaccaagatgaaaacagcaaccaacatctatatttttaacttggcactggccgacgcgcttgctaccagcacactcccttttcagtccgtcaactatcttatggggacctggccttttggcaccatattatgtaagattgtgattagtatcgattattataatatgtttaccagtatattcactctgtgtaccatgtcagtcgacaggtatatcgcagtgtgccatccagtaaaggccctggacttccggacaccccgtaacgcaaagatcattaatgtttgcaattggatcttgagcagtgctattgggttgcccgtcatgttcatggctactaccaaatacaggcagggaagcattgattgcactcttactttcagccatccaacctggtactgggagaatctgcttaaaatctgcgtgttcatcttcgccttcatcatgcccgtgctaattattaccgtgtgttatggtcttatgatcctccggcttaaaagcgttcggatgctgtccgggagcaaggagaaggaccggaatcttcgtaggatcactaggatggtcctggtggtagtcgcggtgtttattgtctgttggaccccaatccacatctacgtgattattaaagccctggttacgattcccgagactacattccagacagtgtcttggcatttttgtattgcacttggttatacaaacagctgcctcaaccccgtgctctacgcattcctagacgaaaattttaaacgttgttttagggagttttgtatacccacttcaagcaatattgagcagcaaaatagcacaaggattcgccagaacacccgggatcatcccagcactgcgaacacagtcgataggaccaatcatcagtcctag

SEQ ID NO: 127357 - DNA, 1095 bp, synthetic construct
  misc_feature 1..1095: note = Description of Artificial Sequence: Synthetic coding sequence
  source 1..1095: mol_type = other DNA
atggcccaacagtggagtctgcagcgactcgctggacggcacccacaggatagctacgaagacagcacccagagtagcatcttcacttatactaactcaaactcaacgagaggtcctttcgaggggccaaactatcacatcgcccctcggtgggtgtaccacctgaccagtgtttggatgatctttgttgttactgcctcagtatttactaatgggctagtcctagcggctacaatgaagtttaagaaactaaggcatcccctaaattggatactcgtcaacctcgccgtggctgacttagcagagacagtaatcgctagcactatcagcattgttaatcaggtgagcggatatttcgtgttggggcatcctatgtgtgttttagaaggttacactgtttctttatgcggaataacagggctgtggagtttggccatcatatcatgggaacggtggctggtggtgtgcaagccgttcggcaatgttcgctttgacgccaagttggccatcgtgggaatcgctttcagctggatttggtctgccgtgtggactgccccacctatttttggctggtctaggtattggccccatgggttaaagacttcttgcggacccgacgtctttagcggtagttcgtatccaggagtacaatcctacatgatcgtgctcatggtcacctgctgcattatacctctcgcaattatcatgctgtgctacctgcaggtgtggctggctatccgggccgtggcaaaacaacagaaggaatcagagtccactcagaaagccgagaaggaagtgacccggatggtggtggtcatgatttttgcttactgtgtatgctggggaccatacactttcttcgcgtgttttgccgctgctaacccaggctatgctttccaccccctcatggcagcgctgcccgcctactttgccaaatctgccacgatctataacccagtcatttatgtgtttatgaatcggcagtttcgcaattgcattctgcagttatttgggaagaaggtagacgacggctccgagctgtcttccgcaagtaagacggaggtttcctctgtttcatccgtgtcacccgcctag

SEQ ID NO: 127358 - DNA, 1095 bp, synthetic construct
  misc_feature 1..1095: note = Description of Artificial Sequence: Synthetic coding sequence
  source 1..1095: mol_type = other DNA
atggcacagcagtggtcattgcaaagactcgcaggcaggcacccacaggacagctatgaggattccactcagtctagtatatttacctacacaaattctaattcaacacgcggccctttcgagggcccaaattatcatatcgcgcctaggtgggtgtaccatctaacatcggtctggatgatcttcgtcgtgattgcttccgtcttcactaatggcctcgtactcgctgccacgatgaagtttaaaaaactccggcaccccctgaattggattctggtcaaccttgctgtagctgacttagcagaaactgttatcgccagcaccattagcgtagtcaatcaggtgtatggctacttcgtgctggggcatccgatgtgtgtactggaaggctataccgttagcttatgtggaatcacggggctgtggtccctggccattatttcttgggaacgctggatggttgtgtgtaagccgttcggaaacgtcaggtttgacgccaaattggccatagtcggcattgctttttcttggatctgggctgctgtatggacggccccacccattttcggctggtctcgttattggcctcacggactgaagacttcctgtggccccgacgtgtttagcgggtcttcatacccaggcgtgcagagctacatgattgttctcatggttacttgctgcataacccccctgtccataatcgttttgtgctatctgcaggtctggctggcgatccgcgcagtggctaagcagcagaaggaatctgagtccacccagaaggccgagaaagaggtgaccagaatggtcgtagtcatggtgctcgccttttgcttctgctggggcccttacgctttcttcgcatgttttgccgccgccaatccgggttacccttttcatcccctgatggcagcccttcctgcattctttgctaaatccgccaccatttacaatccagtcatctacgtcttcatgaaccgacagttcaggaactgcatcctacaattgtttggcaaaaaggtcgacgatggatccgaactttcttcagcatctaaaacggaggttagctccgtttcctccgtgtcacccgcctag

SEQ ID NO: 127359 - DNA, 1047 bp, synthetic construct
  misc_feature 1..1047: note = Description of Artificial Sequence: Synthetic coding sequence
  source 1..1047: mol_type = other DNA
atgagaaagatgagcgaggaagaattctatctgttcaaaaacatatcctctgtgggtccttgggacggcccgcaataccacatcgctcctgtttgggccttctatctccaggccgccttcatggggacggttttcctgatcggattcccactgaatgccatggttctggtggcaacacttcggtataagaagcttcggcaacccttaaattacattcttgtgaatgtctcattcggcggctttcttctgtgtatattctctgtcttccctgtattcgtggcctcttgtaatggctacttcgtgtttggcagacatgtctgcgctctggagggttttttagggactgtagctgggctggttaccggttggtccctggctttcctggccttcgagagatatatcgtgatctgcaaaccctttggcaatttccggttctcctctaaacatgccctaacagtcgttttggctacgtggacaatcggcatcggggtgtccatacctcccttttttggttggagccggtttatccccgagggcctacagtgtagctgtggaccggattggtataccgtcggtacaaagtacaggagcgagtcctatacctggtttttgtttattttttgttttatcgtcccactgagcttgatctgcttttcatacactcaactgctccgtgcactcaaggcagtggccgcccaacagcaggaaagcgcgacaacgcaaaaggcggagcgcgaggtttcacgcatggtggtggtgatggttggcagcttctgtgtttgctacgttccctacgctgcctttgctatgtacatggtgaacaatagaaaccatgggctggacctgcgactggtgacaatcccgtcctttttcagcaagagcgcctgtatttacaatccaattatctactgtttcatgaacaagcagttccaggcatgtattatgaaaatggtctgcggcaaagccatgacggacgagagcgatacctgcagctctcagaaaaccgaggttagcactgtttcaagtacccaagtggggcccaattag

SEQ ID NO: 127360 - DNA, 972 bp, synthetic construct
  misc_feature 1..972: note = Description of Artificial Sequence: Synthetic coding sequence
  source 1..972: mol_type = other DNA
atgtactcagggaatcgtagtggaggtcatggatactgggacggcggcggcgccgccggcgctgaagggcccgcacctgccggcaccttgtcccccgccccactcttctcacctggcacctacgagagactagccctgctgctcggctccatcggcttacttggagtgggaaacaacctactagttttggtgttatattacaaatttcagcgcctgagaacccctacccacttgctcctcgtgaatatcagtttgagtgacctgctcgtgagcttattcggagttacatttacatttgtgtcttgccttcggaacggatgggtctgggacacagtgggatgcgtatgggacggctttagcggctcactgtttgggtggatctcgcagttacaagccgctacgcgcgaggcgagggcttctatggggcctgtgcagcagggtacaatctgtatgcagttgcgctgcgtggaggacctgcagactattcaggtgatcaagatcctcaaatacgagaaaaagctggccaaaatgtgtttcctgatgatatttactttcttagtctgctggatgccctatattgtgatctgttttctggtcgtaaacggccatggacacctggtcacccctaccataagtatcgtatcctatttgttcgctaaatcaaacaccgtgtataacccagtgatctatgtgtttatgatcagaaaatttagacggtctctcctgcagttgctctgtctaaggctgttaaggtgccaaaggcccgcaaaggatctcccagccgccgggtctgaaatgcagatacgcccaatagtaatgagccagaaagacggggacaggccaaagaaaaaggtgacttttaacagttcttccatcattttcataataacatccgacgaaagcctcagcgtggacgatagcgacaagaccaacggcagtaaggtggatgtgatccaggtgcggcccctgtag

SEQ ID NO: 127361 - DNA, 1209 bp, synthetic construct
  misc_feature 1..1209: note = Description of Artificial Sequence: Synthetic coding sequence
  source 1..1209: mol_type = other DNA
atgtacagtggaaacaggtcgggaggccacggctattgggacggcggtggtgccgctggggccgagggcccagctcctgcaggcacattgtctcctgctcccctcttctcccccggtacgtatgaacggctggcccttcttctggggagcatcggattactgggagtcggcaacaacctgctcgttttagtgctctattacaagtttcaacggctccgaacgcctactcacctgctgttagttaatatcagcctgtccgatctgcttgtctcattattcggtgtcacgttcacatttgtctcttgtctgagaaacggctgggtgtgggataccgtcggctgcgtgtgggacggattcagcggcagtctttttggcatagtgtccattgcgacacttacagtgctggcatacgagagatatatccgggttgtccacgctcgcgtcataaactttagctgggcctggcgggccataacttacatttggctgtattccctcgcctgggctggagctcccttattggggtggaatcgctatatcctggatgttcacggtttgggatgtactgtcgactggaaatcaaaagacgccaacgatagctctttcgtcttgtttcttttcctgggctgcctggtcgtccccctgggcgtaattgcacattgttatggccatattctctattctattcggatgcttcgctgtgtggaggacctgcaaaccatacaggtcatcaagatcctaaaatatgaaaagaaactagccaaaatgtgttttcttatgattttcacgtttcttgtgtgctggatgccgtacatcgtaatctgctttctggtggtgaatggccatggccatttggttaccccaaccatatccattgtgtcttacctgttcgccaagagcaatactgtttacaatccggttatctacgtgttcatgataagaaagttccgacgcagtctgctgcaactcctgtgtttacgactgctccggtgtcaaaggcccgcgaaggatcttccagctgcaggtagcgagatgcagatccgccccattgtgatgagccagaaagatggcgaccggcctaagaaaaaagtcaccttcaattcaagcagcatcatctttatcatcacatctgacgaaagtctgtctgtcgacgattcggataaaactaatggctctaaggtggacgtgatccaggttcggcctctctag

SEQ ID NO: 127362 - DNA, 2886 bp, synthetic construct
  misc_feature 1..2886: note = Description of Artificial Sequence: Synthetic coding sequence
  source 1..2886: mol_type = other DNA
atgtggaggcttcgccgcgccgccgtggcatgtgaagtgtgtcagagtcttgtcaaacatagttcaggtataaagggctccctgccgctccagaagctgcacttagtatcccggtcaatctatcattcacaccaccctacgctgaagttacagcgccctcaacttcggacatcttttcagcagttcagttctctcacaaaccttccgttgcggaagctgaagttttcgccgattaagtatgggtaccagcccaggagaaatttctggccggcacgcttagccacccggctgttgaaattgagatacctgatcctaggatcggccgttggtggcgggtacactgcgaagaaaacgtttgatcagtggaaagatatgattcccgatttgagcgagtataaatggatcgttcctgacattgtgtgggagatcgacgaatatattgatttcggaagtccggaggaaacagcatttcgagcaactgaccggggctctgagagcgataaacactttaggaaaggactcctaggcgagcttatccttttgcagcagcaaattcaagaacacgaagaggaagcgcgtcgggctgctggacaatactcgacatcctatgcccagcagaagaggaaggtgtccgataaggaaaaaatagaccagctgcaggaggaactgttacatacacagctcaagtatcaacggatactcgagaggctagagaaggagaacaaagaattgcggaaacttgtgctgcaaaaggacgacaaggggatccaccatcgaaaactgaaaaaatcactcatcgatatgtattcggaagtgctggacgtgctgtctgactacgatgcatcatacaatacacaggaccatctcccacgggttgtggtggtgggcgatcagtcagccgggaaaacttctgtcctcgaaatgatcgctcaggcccgcatcttccctaggggtagcggggaaatgatgacccgatcacccgtgaaagtgactctcagtgaaggtccgcaccacgtagcactttttaaagattcgtcacgcgaattcgatttgacaaaagaggaagacttggccgccttaagacacgagatcgaactgcggatgagaaaaaatgtcaaggaaggctgtactgtcagtccagagactatcagtctgaacgtgaagggccccggcttgcagagaatggtgctggtggatcttccgggggtgattaacaccgtcacatcagggatggcccctgatacaaaagagaccatcttctcgatctccaaagcatacatgcagaaccctaatgctatcattctatgtatccaggacggctccgtcgatgccgagcgatccatagtcactgatttggttagccagatggacccccacggccgaagaaccatttttgtgttaaccaaagtggacctggctgaaaagaatgtggcatcgccgtcacgaatccaacaaattatcgaagggaagttgttccccatgaaggccctgggctactttgccgtcgtgactggcaaagggaatagctccgagtcgatcgaagctatccgggagtacgaggaggagttctttcagaattcaaaattactgaagacatctatgttgaaggctcaccaggtgaccactaggaatttatctctcgcagtgagcgattgtttctggaagatggtcagagagagcgtagaacagcaggccgattcttttaaagctactagattcaacctggagacggaatggaaaaacaattacccaagacttagggaactagatcgaaacgaactcttcgaaaaggcaaagaacgagattctggacgaagtcattagcctgtctcaagtgacccccaaacattgggaggagatcctccagcagtctttatgggaaagggtgtcaactcacgtaattgagaacatctatctcccagcggcccaaacaatgaattctggcactttcaacaccacggtggatatcaagcttaaacagtggactgacaagcaattaccaaataaagccgtcgaagtcgcgtgggaaactctgcaggaagagttcagcagatttatgaccgagcccaaagggaaggagcacgatgacattttcgacaaattaaaggaagccgttaaggaagaatccattaaacgccataaatggaatgactttgcggaggactcccttagggtcatccaacacaacgctctcgaggatcggtctatttccgacaaacagcagtgggatgccgccatctattttatggaggaagccctgcaagcccggctcaaagatactgaaaatgcgattgagaatatggttggaccagactggaagaagaggtggctgtactggaaaaatcgaacacaggaacagtgcgtgcacaacgagaccaagaacgaattagaaaagatgttgaagtgcaacgaggaacatcctgcctacttggcctctgatgagattaccacggtccgcaaaaatctggagtctcggggcgtagaggttgacccttctcttatcaaagatacctggcaccaggtttatcgccggcacttcttgaaaactgctctgaatcattgtaatctgtgcagaaggggcttctattattatcaacgccatttcgtggattccgaacttgagtgtaacgatgtggtgctgttctggaggatacagcggatgctggcaataactgctaataccctgaggcagcagctgaccaatacagaggtccgccggctggaaaagaatgtgaaagaggttctggaggactttgccgaagatggagagaaaaaaattaaactattgacagggaagagagtgcaactagccgaagatctgaagaaagttagggagatccaggagaaactggatgccttcattgaggctttgcaccaagaaaaatag

SEQ ID NO: 127363 - DNA, 3048 bp, synthetic construct
  misc_feature 1..3048: note = Description of Artificial Sequence: Synthetic coding sequence
  source 1..3048: mol_type = other DNA
atgtggcggctgaggcgcgcagcagtggcctgtgaagtgtgtcagtctctagtgaagcattcttcggggattaagggttcattaccactgcaaaaactgcatctggtcagccggtccatatatcactcacatcatcctactttgaagctgcagcgcccccaactgagaacctcatttcaacagttctcttccctcacaaacctgcccctgcgtaaacttaaattcagtccaattaaatacgggtatcagccacgacgtaatttctggcccgcccgcttggctactcgtttgctgaaactgcggtaccttatccttggctcagctgtcgggggcgggtacacggccaagaagaccttcgaccagtggaaagacatgatcccggacctgagcgagtacaaatggatcgtgccggacatcgtgtgggagatcgacgagtatatcgactttgagaagattaggaaggctctaccctccagcgaggacctggtcaagctcgcacctgacttcgacaagatcgtcgagtccctttcactgctcaaggatttcttcacaagcggtcataaattggtgagcgaagtcattggagcatctgatctcctgctcctcctgggatcccccgaggagacagcctttagagctaccgaccgcgggagtgaatctgataaacactttcgaaaaggcctactcggcgagttgatcttgctacagcagcagatacaagaacatgaggaggaagcccggcgcgctgctggacagtatagcaccagctacgcacagcagaaacgtaaagtgagcgacaaagagaaaatcgatcagttacaagaagagctgctgcatacccagctgaagtatcagcgcatcctggaaaggttagaaaaagagaataaggaactgaggaaactggtactccagaaagatgacaaaggcattcaccatcgcaaactcaagaagtccctcatagatatgtattctgaggtcctggatgtcctgagcgactatgatgcctcttataacacccaggaccaccttccgcgcgttgtcgtggtgggagatcagtccgcaggcaaaactagcgttctcgagatgattgcacaggcacggatattcccccgcggcagcggcgaaatgatgacaagatcccccgtgaaggtaactctgtccgaaggtccccaccacgtcgcgctgtttaaagattcttctcgggaattcgacttgaccaaggaggaagatctcgctgccctccggcacgaaatcgaactcagaatgaggaagaacgtaaaggagggctgtactgtgtcaccagaaaccatttcgctgaacgtgaaaggccccgggctacagcggatggttttggtagacctccccggggttataaacaccgtgaccagcggaatggcaccagacactaaagagacaattttctccatctccaaagcctatatgcagaatccaaatgctataattctgtgtattcaagatgggagcgttgacgccgagcgttccatcgtgacagacttggtgagccaaatggacccccatggaagacgcacaatctttgtgctcacaaaggtagacctggctgaaaaaaacgtggccagtcctagcaggatccagcagattatcgagggtaagctctttcctatgaaagctttagggtactttgctgtggtgaccggcaagggaaacagttctgagtcgattgaagccatccgagagtacgaagaggaatttttccagaattcaaaactcctaaaaactagtatgctgaaggcccaccaggtgaccacccggaatctgtcactcgcagttagcgattgtttctggaaaatggtgcgtgagagtgtagagcaacaagctgactcgttcaaagccactcgttttaatcttgagactgagtggaagaacaattaccccagattgagggagcttgataggaacgagttatttgagaaggccaaaaacgagatcctggacgaggtgattagcttgagccaggtcactccaaagcattgggaggaaatcctgcagcagtccctgtgggagcgcgtgtcaacacacgttatagagaatatttacctaccagccgcccagaccatgaattccgggacattcaataccaccgtggatattaaactcaagcaatggacagataagcagctgcccaataaggccgttgaggtcgcctgggagactctacaagaggagttctcgagatttatgaccgaacctaaaggcaaggaacatgacgatatttttgataagctgaaggaggctgtgaaagaggaatccattaagcgccataaatggaatgatttcgccgaggactctctgcgtgtcattcagcacaacgcactcgaagacaggtcaataagtgacaagcagcaatgggacgcagctatatactttatggaggaggccttacaagctcggctgaaggacacagaaaatgctatagaaaatatggtcggcccagattggaagaagaggtggctctattggaagaaccgaacccaagaacaatgtgtgcataacgagactaaaaatgaattggaaaagatgctaaagtgtaatgaggaacaccctgcctacctcgcaagcgacgagatcacgactgttcgaaagaatctagagtctcgaggtgtggaggtcgaccctagcctcataaaggacacttggcatcaggtgtatagaagacatttcttaaagaccgctctgaatcattgtaatctgtgtcgcaggggtttttattactaccagcgacattttgtggactctgagttggagtgcaacgatgttgttctgttctggcggatccagcgtatgctagcaataactgccaataccctgcgccagcagttaacaaataccgaggtaagaaggctggaaaagaatgtcaaggaggtcctggaggatttcgctgaagacggggagaaaaaaatcaagctgctgacaggtaaacgggtacaactggcagaggatctcaagaaggtcagggagattcaggaaaaattggatgcctttatcgaagctctacaccaggagaaatag

SEQ ID NO: 127364 - DNA, 2940 bp, synthetic construct
  misc_feature 1..2940: note = Description of Artificial Sequence: Synthetic coding sequence
  source 1..2940: mol_type = other DNA
atgtggcggctaaggagggctgctgtggcctgtgaggtgtgtcagagtctggtgaaacatagttccggaatcaaaggatctttgccactccagaagttgcacttggtgtccagaagtatctaccactcccatcatccgacccttaaacttcaacgaccccagctcaggaccagttttcaacagttcagtagccttacaaatctccccctcaggaaactcaaattttctcctataaagtatggttatcagcctcgtcggaatttctggcctgcccgtctggcaacacgtctgttaaagctgagatacctgatcctgggctctgccgtgggtggggggtacaccgctaaaaaaacctttgatcaatggaaagacatgatcccagatctgagtgaatacaaatggattgtgccggatatcgtttgggaaattgacgaatacattgattttggccataaactcgtgtctgaagtgatcggcgcctcagacctgctgttgctgctgggatctccagaagagaccgcttttagagctactgataggggaagcgagtcagacaaacacttcaggaagggcttgctgggggagctgattctgttgcagcagcaaatccaggagcatgaggaagaagctcgccgcgctgccggacagtacagtacgagctacgcacagcagaaacgaaaagtttccgataaagagaagatcgatcaattacaggaggaactcctccacactcagttgaaataccagaggatccttgagcgcctcgaaaaggagaacaaggagttgcgtaaactggtgctgcagaaggacgacaaggggattcatcatagaaagctgaagaagtctctaattgacatgtattcggaagtcctggacgtcctttctgactacgatgccagctataacacacaggaccacttgccacgggtcgtagtcgtcggagatcagagcgccgggaaaacatccgtgctcgagatgatagcccaggcgcgcatcttccctcggggcagcggtgagatgatgacacggtcaccggttaaggtgacactctccgaggggccccaccatgtagcactgtttaaggattcctctcgcgagttcgatctgaccaaggaggaggatctggcagctctgcgccacgaaatcgaactacggatgagaaagaatgtgaaagaaggctgtacagtgtctcccgagaccattagtctgaatgtaaagggccctggtctgcagcgaatggttctggtggacctgcccggagtcatcaacactgtaacctccggaatggctcctgacactaaagagaccatcttttcaatctctaaggcatacatgcagaaccccaatgctatcatactatgcatccaggatggctcagtggacgccgagaggtcgatcgtcacagatttagtgtcccagatggatccccatggtaggcgcactattttcgttctgacgaaggtcgatcttgctgagaagaatgtggcttcaccctctagaatccagcagatcattgagggaaagttattcccaatgaaggccttaggttatttcgccgttgtcactggtaagggtaactccagcgaaagcatcgaagctatacgtgagtatgaagaggaatttttccaaaattctaagctgttgaaaacttctatgctgaaggctcatcaggttacaaccaggaatctgagtctcgccgtttcagattgcttttggaagatggtccgagaatccgtggaacagcaggctgatagtttcaaagccacccgctttaacttggaaacagagtggaagaataactaccccagacttcgcgagttggatcgcaacgaactctttgaaaaggcaaagaacgagattctggacgaagtcatcagcttgtcacaggttacccccaaacactgggaagaaatcttacaacagtctctgtgggagagggtttctacgcatgttattgagaacatttaccttcccgcagcacagacaatgaattccggcacctttaacacaactgttgacatcaagctgaaacagtggaccgacaagcagcttcctaataaggcagttgaggtggcttgggaaaccctccaggaagagttttcccgtttcatgaccgagcccaaggggaaggaacacgatgacatctttgacaaattaaaggaggcagttaaggaggagagcattaagaggcataagtggaatgactttgcggaggattcactaagggtaattcagcataacgccctggaagatcgctcgatcagcgacaagcaacagtgggatgccgccatttattttatggaggaagcactgcaagcccgactcaaggataccgaaaacgctatagaaaacatggtcggtccagattggaaaaagcgctggctgtattggaaaaatcgaacgcaggaacagtgcgtgcataacgaaaccaagaatgagctggagaaaatgctcaagtgcaacgaagagcatccagcatatctggcatcagatgagattactacagtgaggaagaatctagaatcgcgtggggttgaggtagaccctagcctgattaaagacacttggcaccaggtctatcgccgtcacttcctgaagactgcgctcaaccactgtaacctgtgccgtagaggattctattactatcagcgacactttgtggactcagagttagagtgcaacgacgtcgtcttattttggcgcatccagcgcatgctcgcgataacagcaaacaccttacgccagcagcttaccaacaccgaggtccgcagattggaaaagaatgtgaaagaggttttagaggattttgccgaggacggggagaagaaaataaaactactcaccggcaaaagggttcaactggctgaggatctgaaaaaggtgcgggagattcaggaaaagctcgacgcttttatcgaagcactgcatcaggagaaatag

SEQ ID NO: 127365 - DNA, 2937 bp, synthetic construct
  misc_feature 1..2937: note = Description of Artificial Sequence: Synthetic coding sequence
  source 1..2937: mol_type = other DNA
atgtggcggcttcggagagccgcggtggcctgtgaggtctgccagtccctggttaagcattctagcgggatcaagggcagcctgcccctgcagaaactgcacctagtgtctaggagcatataccactcacatcacccaactcttaaactgcaacggccacaactgcgcacatccttccagcagtttagcagtttaactaatctgccactgcggaagctgaaattctctcctatcaagtacggctaccagcctagacgcaatttttggcccgcgcgattagctacacgcctcttgaagctgagataccttattctgggcagtgcagtcggtgggggctacacggctaaaaaaacatttgaccagtggaaagacatgatcccggaccttagcgaatataagtggatcgtccctgacatagtctgggaaatcgatgagtatattgactttgaaaaaatccgtaaagcattgccatcctccgaagatttagtcaagttagctcccgacttcgataagatcgtggagtctctcagccttctgaaagacttttttacaagcggccacaagctcgtctccgaggttatcggtgcttcagacctgctcctgctgctgggaagccctgaggagaccgcatttcgggcaacggatcggggctctgagagtgataagcacttccggaaagtctcagacaaggagaaaatcgatcagctccaggaagaactattacatactcagctgaagtaccagcgcatcctcgagcgcctggagaaggaaaataaggagctgaggaagctggtccttcaaaaggacgataaagggatccatcacagaaagctgaaaaaatcccttatagacatgtactccgaagtacttgacgtgctttcagactatgatgccagttacaacacacaagatcacctcccacgcgtggtggtggtcggcgaccaatccgccgggaaaacatctgtgctagagatgatcgcacaagcacgcattttcccacgtggcagcggggaaatgatgactaggagcccagtcaaggtgactctgagcgagggtcctcaccatgttgctttgtttaaggacagtagccgtgaattcgacttaactaaggaggaggatctagcagccctgcgtcacgaaatagagctccggatgcgtaagaatgtgaaggaaggctgtactgtgtcccccgagaccatcagtctcaatgtaaaggggcctggactgcaacgtatggtcctggttgatctccctggggtgattaacacagtgacatccggtatggctccagatactaaagaaactattttttcgattagcaaagcctatatgcagaaccccaacgccattatcctgtgcatacaggacggttctgtggacgcggagcgctctattgtgactgatttggtctcccagatggaccctcacggccgtcggactatcttcgtgctgactaaagtcgacttagcagaaaaaaatgtggcctccccctccaggatacagcagattatagaggggaaactctttccaatgaaagcgttggggtatttcgccgtggtgacgggtaaaggcaactcgagcgagagcatcgaagcaattagggagtacgaagaggagtttttccagaatagtaagctgcttaagacctctatgctgaaggcacaccaggtaacgacacgaaacctgagtttggctgtctctgactgtttttggaagatggtccgggagtcggtggaacagcaggctgactcattcaaggctacgcgattcaacctagagacagagtggaagaacaactacccgcgcctgagagagctggatcggaatgagctgttcgaaaaagccaagaatgagatccttgacgaggtgatctctctgtcacaggtcaccccaaagcactgggaggaaatcctgcaacaatcactgtgggaacgggtatctacacatgtcattgagaatatctatttgccagcggcccagaccatgaactcaggcactttcaacaccaccgtcgacataaaactcaagcagtggaccgacaagcagcttcccaacaaagctgtagaagttgcctgggagaccttgcaggaagagttctcccgttttatgaccgaacctaaaggcaaagagcatgatgacatcttcgataaactgaaggaggcggttaaggaagaatcgatcaagagacacaaatggaatgacttcgctgaggactccctgcgcgtcatacagcacaacgcactggaggacagatcaatttctgacaagcagcagtgggatgcagccatctatttcatggaggaagcactccaggcccggctgaaagacaccgaaaatgccattgagaatatggtcggaccagactggaagaagcggtggctctattggaagaaccgtacacaagaacagtgcgttcacaatgagacaaagaacgagttggaaaagatgctgaagtgcaatgaggagcaccctgcttacctggcttctgacgagattacaacagttcgaaaaaatttggagagtcggggcgtggaggtggatcccagtttgattaaagacacatggcaccaggtgtaccggcggcatttcctcaaaaccgccttgaaccactgcaacctgtgcagacggggattctattactaccaacgccatttcgtcgattccgaattggagtgcaacgacgtcgtgctgttttggagaattcagaggatgctcgccatcacagctaatacactgcgtcaacaactgacgaacacggaggttagacgactggagaagaacgtgaaagaagtgttggaagattttgcagaggacggcgaaaaaaaaatcaaattgcttaccggcaagcgcgtccagcttgctgaggacctgaaaaaggtacgcgagatacaggaaaaattagatgccttcattgaggccttacaccaggaaaaatag

SEQ ID NO: 127366 - DNA, 2994 bp, synthetic construct
  misc_feature 1..2994: note = Description of Artificial Sequence: Synthetic coding sequence
  source 1..2994: mol_type = other DNA
atgtggagactgagaagggcagctgtggcctgcgaagtgtgtcagtctttggtgaaacattcgtccggcatcaagggttccttgcccctgcagaaactgcacctggtgtcacggtcgatctatcactctcaccaccctacattgaaactccagcggccacagctgaggacatcatttcaacagtttagttctctaactaatctgcctttgagaaagttaaaatttagtcctattaagtacgggtaccaaccccgccgtaatttttggcctgcccgtctagcaactaggctgctgaaactccgctacttaattttggggtccgccgtgggcggtgggtatacagcaaagaaaacttttgaccagtggaaggacatgataccagacctctcagaatacaagtggatcgtgcccgatatcgtctgggaaattgacgaatatatcgatttcgagaagattaggaaggctttacctagttctgaagatctggtgaagctggcccccgacttcgacaagattgtggaatcactttccctgctaaaagattttttcacaagcgggtccccggaagagacagcatttcgagccacagacagagggtcagaatcggacaaacacttccgtaagggtctgttgggcgaactgattctgctgcagcagcagatccaggagcacgaggaagaagcccggcgggcggcggggcaatacagtacttcttatgcacagcaaaaacggaaagtgagtgataaagagaaaatcgatcaattgcaagaggaactgttgcacacccagttgaaataccagaggatacttgagagactggaaaaagaaaataaagaacttagaaaactagtattgcaaaaagacgataagggcattcaccatcgcaagctgaagaaatctctcatcgatatgtactcggaagtgttggacgtgctttccgactacgacgcatcctacaatactcaagatcatctccccagagtagtggtcgtcggtgatcagagcgcaggtaaaacctcagtattggaaatgattgctcaggcaagaatttttccaaggggatccggggagatgatgactcgctctcctgttaaggtcactctgtcggaggggcctcatcatgtggctctgttcaaggattcctccagagagtttgatctgacaaaggaggaggacttagctgccctgcggcatgagatcgagctgcgcatgagaaaaaacgtaaaagaaggatgcaccgtctcacctgagactatatccctcaatgtgaaaggaccgggactccagcgcatggtgctggtcgacctcccaggcgtgattaacactgtgacgtcaggcatggctcctgatactaaagagacaatcttcagcatatccaaagcctacatgcagaatccaaatgctattatactctgtatccaagatggcagcgtcgacgctgaacgatcgatcgttactgacctggtctcccagatggatccgcatggacgccggaccatatttgttttaactaaggtcgatctggctgagaagaacgtggcaagcccttctagaatacagcaaattatagaggggaaactgtttcctatgaaagctctggggtactttgccgtggtaaccggtaaggggaattcatccgagtccattgaagctattcgtgaatatgaggaggagttctttcaaaatagcaagctgctgaaaacatccatgctgaaagcccaccaagtaacaacccgcaatctcagtctggccgtctctgattgtttctggaaaatggtgcgagaatctgtggagcaacaggcagactccttcaaagcaaccaggttcaacttggaaaccgaatggaaaaataattatccccggttgcgcgaactggaccgcaacgagttgttcgaaaaagcaaaaaatgagatactcgatgaagttatctcactttcacaggtgaccccaaagcactgggaggaaatactgcaacagagcctctgggaaagagtgtcaacccatgtgatagaaaacatctatcttcctgcagctcagactatgaattcaggtacctttaataccaccgtcgacattaagctcaaacagtggacagataaacagcttccaaacaaggccgttgaggtggcttgggagactttacaggaagagttctcaaggtttatgacagagcccaaggggaaggagcacgatgacatattcgacaaactgaaagaggctgttaaggaggaaagcatcaagcggcataaatggaatgacttcgctgaagactcgctgagagtgattcaacacaacgccttagaagatcgcagcatttctgacaagcagcagtgggacgctgccatttatttcatggaagaggcgctgcaggcaagacttaaagacaccgagaatgcaatcgagaatatggtgggcccggattggaagaagcgctggctctactggaagaatagaacccaggaacaatgtgtgcataatgagacaaagaatgaactggaaaagatgttaaaatgcaatgaggaacatcccgcatacttggcctctgacgagattaccacagttagaaagaatctggagtcacggggggtggaagtagatccaagcctcatcaaagatacatggcatcaggtttatcgccgccatttccttaaaacagccctcaaccactgtaacttgtgtaggagagggttctactactaccagagacacttcgttgatagcgaactcgaatgcaatgacgtggtcctcttctggcgaattcagagaatgttagccataactgccaatactcttcgacagcaactgacgaacaccgaagttcgcaggctcgaaaagaacgttaaagaggtgctcgaagacttcgcagaagatggtgaaaaaaagataaaactgctgacagggaaaagagtgcagctggcggaagacctaaaaaaggttcgggagattcaggagaagttggacgccttcattgaagcactgcaccaagaaaagtag

SEQ ID NO: 127367 - DNA, 501 bp, synthetic construct
  misc_feature 1..501: note = Description of Artificial Sequence: Synthetic coding sequence
  source 1..501: mol_type = other DNA
atgtggcgcctgcggagagctgctgtcgcatgcgaggtgtgccagagtcttgtgaaacatagcagcgggatcaagggatcattacctttgcagaagctgcatctggtatctcgcagcatttaccattcgcaccaccctacgctgaagttgcagcgcccacaacttaggacatcatttcagcagttctcctccctgactaacctgcctcttaggaaactgaagttcagtcctataaagtatggctaccaacctcgacggaacttctggccagcacgtcttgctacaagactgctaaagctacgatatctgatcttgggctcagcggtaggtgggggttatactgctaagaaaacttttgaccagtggaaggatatgataccagatctgtccgagtataaatggatcgtgccagacatagtctgggaaatcgacgagtatatcgacttcggatctccagaggagaccgcatttcgggctactgatagaggcagcgagtcctag

SEQ ID NO: 127368 - DNA, 2883 bp, synthetic construct
  misc_feature 1..2883: note = Description of Artificial Sequence: Synthetic coding sequence
  source 1..2883: mol_type = other DNA
atgtggcgcctgcgccgggcggctgtggcatgtgaggtctgccagtctctcgtgaagcattcctctggtatcaagggctctcttccgttacagaaattgcatctcgtgtccagatccatttatcacagccatcatccaaccctgaagttacagagaccgcaactcagaacctccttccaacagtttagcagtctaacaaatctaccactccggaaactgaaattctctcccattaagtacggctaccagccccgaagaaatttttggcccgccagactcgctacacgtctgctcaaactgagatatctgatcctaggctcagcagttggcggtggatacacagccaaaaagacatttgaccagtggaaagatatgatccccgatctgtccgagtataaatggatagtgcctgacatcgtctgggaaattgatgagtatattgacttcgaaaagataagaaaggcgctcccttcttctgaagatctggtgaagttagccccggacttcgataaaatcgtagagtctctgtcgctgttgaaggacttcttcaccagtgggagccctgaggagacagcgttccgcgcgaccgaccgtggcagcgaatcagataagcacttcaggaaggttagtgataaggagaagattgaccaattgcaagaagagctgctgcacacccagctcaaatatcagagaatattagagagactggaaaaggagaacaaggagctgcgtaagttagttctccagaaagatgataagggcatccaccacaggaaattgaagaagagtttaattgatatgtactcggaagtgctagatgtgctcagtgattacgacgcatcttataatacgcaagaccatctgcctagagtagtcgttgtcggggaccagagtgccggaaagacatctgtattagaaatgatcgctcaggcgcgcatttttccgagaggctctggcgagatgatgactcgatctcctgtcaaggtcacactcagtgagggcccccaccatgtagcactgtttaaagactcatccagggagttcgacctgaccaaagaggaagacctcgccgccctgcggcatgaaatagaactccgaatgcgcaaaaacgtcaaggagggttgcacagtttccccagaaacaatcagcctcaatgtaaagggccccgggctacagagaatggtccttgtggacctgcccggggtaattaatactgtaacatccggtatggcccccgatactaaagaaacaatcttctctatcagtaaggcttacatgcagaaccccaatgccataattctctgcattcaagatggaagcgtggacgcagagagaagtatagtgacagaccttgtgtcacagatggatccgcacggcagaaggactatctttgtgcttaccaaagtcgatctcgccgaaaagaacgttgcctctccttcgcgcattcaacagatcattgagggcaaactctttccaatgaaggctcttggttacttcgccgtcgtcaccggcaagggcaattcaagcgagagcattgaggctatccgtgagtacgaggaagagttcttccagaattctaagctgctgaagacatcaatgctgaaggctcaccaggtgactacccgtaatctatcccttgctgtgtccgattgtttttggaaaatggtgcgggaatccgttgagcagcaggcagactcctttaaggccacccggttcaatctggagacagagtggaaaaataattaccctcgcctgcgcgagctcgatcgcaacgaactgttcgagaaagctaagaatgagatcttggatgaagtgatttccctttcccaggtgacacccaaacactgggaagagatcctgcagcaaagcctttgggaaagggtgagtacccacgtcattgagaatatttacttgcccgcagctcagacaatgaattcaggcaccttcaacacaacagttgatataaaactcaagcaatggaccgacaagcagctccctaataaggcggtggaggtggcatgggagacgctgcaggaagagttttcacgcttcatgactgaaccaaagggtaaggagcacgatgacatttttgataagcttaaagaggcagtcaaagaggagtcaatcaaaaggcataagtggaacgatttcgccgaggacagtctgagagttatacaacacaatgcactcgaggacagatccattagtgacaagcaacagtgggatgcagctatttattttatggaggaggccctgcaggccagattaaaagacactgagaatgctatcgaaaatatggtgggaccagactggaaaaaaagatggttgtattggaaaaaccgcacccaggagcagtgcgtccacaacgagactaagaacgaactagagaaaatgctcaagtgcaacgaggagcaccctgcttacctggctagcgacgagatcacaaccgttagaaaaaatttagaatccagaggcgtggaagtggatcccagtctcattaaggacacgtggcaccaggtctatcgtaggcacttcctcaaaacagcactcaaccattgtaatttatgccgccgaggattctactactatcagcgccatttcgtggacagcgagttggaatgtaacgacgtcgtgctattttggcgaatacagcggatgctggctatcactgcgaacactttgcgacagcagctgactaatacagaggtaagaaggcttgagaaaaacgtgaaggaagtgctcgaggatttcgcggaggacggggaaaaaaaaataaagctgctcaccggaaaaagagttcagctcgctgaagatcttaaaaaggtccgggagattcaggagaagttagacgcttttatagaagccctccatcaggaaaagtag

SEQ ID NO: 127369 - DNA, 558 bp, synthetic construct
  misc_feature 1..558: note = Description of Artificial Sequence: Synthetic coding sequence
  source 1..558: mol_type = other DNA
tgatatctgatcctggggagtgcagttgggggggggtacacagccaagaaaacttttgaccaatggaaggacatgatccccgatctgagcgaatataagtggatcgtcccggacatcgtctgggagattgatgagtatatcgacttcgagaagatcaggaaggcgctgccctccagtgaggacttggttaagctggctcccgacttcgataagatcgtcgagtcactctctctcctgaaagacttttttacgtctggacataagctagtttccgaagtaatcggcgccagtgatctccttttgttgttgggctcaccggaagaaactgcatttcgcgcaaccgatcgcggatctgagtccgacaagcactttcgcaaggttagcgacaaagaaaagattgatcagctgcaagaggagctgctccacactcaactgaagtaccagcgtatactggaaaggttggaaaaagaaaacaaagaattgcggaaactggtgctgcagaaagacgacaaaggaatacatcatcggaagctcaagaagtcactgatcgacatgtag

SEQ ID NO: 127370 - DNA, 540 bp, synthetic construct
  misc_feature 1..540: note = Description of Artificial Sequence: Synthetic coding sequence
  source 1..540: mol_type = other DNA
atggtggtgggtgctttcccaatggccaagctgctgtacctgggcattcgccaggtgtccaagcccctggccaaccggatcaaggaggcggcgaggaggtctgagttctttaaaacctatatctgcctgccccctgcacagctctaccactgggtcgagatgaggactaaaatgcggatcatgggctttcggggaacagtgatcaagcctttgaatgaggaagcggccgccgagctgggggctgagctgcttggcgaagccactatattcatagtgggcgggggatgtctagtgctggaatactggcgacaccaggcccagcagagacacaaggaagaggagcagagagccgcttggaatgctttgagggatgaggtcggacacctcgcgttggctttggaagccctgcaggctcaggtacaggcggctcctccccagggcgctttggaagaactcagaaccgagttgcaggaagtgcgggcacagctctgcaacccagggagatcggcatcccatgcagtacccgcctcaaaaaagtag

SEQ ID NO: 127371 - DNA, 543 bp, synthetic construct
  misc_feature 1..543: note = Description of Artificial Sequence: Synthetic coding sequence
  source 1..543: mol_type = other DNA
atggttgtgggagcctttccgatggcaaaactgctctaccttggaatccgccaagtctccaagcccctcgccaaccgaataaaggaagcggctcggcggtccgaatttttcaaaacctatatttgcctcccaccagcacagctgtatcactggttagagatgagaaccaaaatgagaataatgggatttaatgctgccgctattaaaccgctgaacgaaggcgctgcagctgaactgggggccgaactcctaggcgaaggaatcatcttcattacagcctgttcctgcctcatgctggagtattggaggcatcagctgcagcaacggcgcaaagaaaaggaacgcagagtggctcgggaggctttacgaggggaagtgggtcaccttggcctggcactagaagaattacaagcacaagtacaggcgaccagtactcagcttgccctcgaggagctccgggcccagctgcaggaggtgagagcccatctctgcttacgggacccaccacccgccccacctgttgcacccgcgagcgaaaagtag

SEQ ID NO: 127372 - DNA, 381 bp, synthetic construct
  misc_feature 1..381: note = Description of Artificial Sequence: Synthetic coding sequence
  source 1..381: mol_type = other DNA
atgagaactaagatgcggattatgggattccggggtactgtgatcaaacctctgaacgaggaggctgccgctgagctgggcgccgaactgctgggtgaggcgacaatatttatcgtgggcggcggctgtctcgttctagaatattggcggcatcaggcacagcagagacataaggaagaagaacagcgcgccgcctggaacgctttacgcgatgaggtgggtcaccttgctctggccttagaagctctgcaagcacaggtacaggccgctcctcctcagggagccctggaggagctgcgtactgaactgcaggaggttcgagctcagctctgcaatcccggacgcagcgccagccacgccgtacctgctagcaagaagtag

SEQ ID NO: 127373 - DNA, 1734 bp, synthetic construct
  misc_feature 1..1734: note = Description of Artificial Sequence: Synthetic coding sequence
  source 1..1734: mol_type = other DNA
atgagtcatcagcctttatcatgcttaactgagaaagaggattcgccctccgaaagcacaggcaatggtccacctcatcttgcccaccccaacctggacacctttactcccgaggagctcctgcagcagatgaaggagttacttacagagaaccatcagctgaaggaagctatgaagcttaacaaccaggcgatgaaagggcgcttcgaagaactgagtgcgtggaccgagaagcagaaagaggaacgtcagttctttgagatccaatcaaaggaagcaaaggaacgtctgatggctctttctcacgaaaatgaaaagttaaaggaagaattggggaaattgaaggggaagagcgagagaagttccgaagatcccacagatgacagtcgactgccacgggccgaagccgagcaggaaaaggaccagcttagaacgcaagtagttcggcttcaggccgagaaagccgacctcctaggaatcgttagtgaactacagctgaaactgaacagttctgggagttccgaagattctttcgttgagattcgcatggcagaaggggaggccgagggctcagtaaaagaaatcaagcactctccagggccaacacggactgtgtccaccggaacggctttgtccaaatacagatcacgcagcgctgacggggccaagaattatttcgaacacgaagagctgactgtgtctcagcttttgttgtgcctgcgcgagggtaaccagaaggtcgagcgccttgaagttgctctgaaggaggccaaagagagagtctctgactttgagaagaaaacaagcaacagaagtgaaatcgagactcagaccgagggcagcaccgagaaagagaacgatgaggagaaaggccctgaaacagtcggcagcgaagtagaggctttgaatctgcaggtgacatccctctttaaggagctccaagaggctcacacaaagctgtcgaaggctgaactgatgaaaaaacgcctgcaggaaaagtgccaggccttggaaagaaaaaactccgcgattccgtcagagctgaatgaaaaacaggagctcgtctacaccaacaagaaactggagctccaagttgagagcatgttgtctgaaattaaaatggagcaggctaagacagaggacgagaagtcgaagttaacagttcttcaaatgacccataacaaattactccaggagcacaacaatgctctcaaaaccattgaggaacttacaagaaaagaatccgagaaggtggaccgggcggtgctcaaagaactttccgagaagctggagcttgccgaaaaagctctggcctccaagcagctccagatggacgagatgaagcaaactattgcaaagcaggaagaagacttggaaactatgactattctgagggctcagatggaagtttattgtagtgactttcatgccgaacgagcggccagagagaagatccatgaggaaaaggagcagctggcactacagctggccgtgctgcttaaggagaatgatgcctttgaagatgggggacgccagtccttaatggaaatgcagtctaggcacggcgcaaggacttctgattctgatcagcaggcttatttagtgcagaggggagctgaggatcgtgattggaggcagcagcgaaacatccccatccacagctgcccaaaatgcggtgaggtactccctgatatagataccctgcaaattcatgtgatggactgcataatctag

SEQ ID NO: 127374 - DNA, 1734 bp, synthetic construct
  misc_feature 1..1734: note = Description of Artificial Sequence: Synthetic coding sequence
  source 1..1734: mol_type = other DNA
atgtcacatcagcctctttcctgccttactgaaaaagaagactctccatccgaatctactggaaacgggccccctcatttagcccaccccaatctcgacacttttactccagaggagctcctacaacagatgaaagagcttctcactgaaaatcatcagctcaaagaggccatgaaactgaataaccaggctatgaagggaaggttcgaggaactttccgcgtggacagaaaaacaaaaggaggaaagacagttctttgagatccagtcaaaagaagctaaggagcgccttatggccctcagtcacgaaaatgaaaagttgaaggaagagctgggtaaattgaagggtaaatccgagcggtctagtgaggatcccaccgatgactccaggctgccacgggccgaggcagaacaggaaaaagaccagctccgaacacaagtcgtacgccttcaagctgagaaagccgacctattggggatcgtttccgaactccaattgaagctaaacagctctggcagctcagaggactcctttgttgagattcgaatggccgaaggggaagccgagggctcagtcaaggagatcaagcactcccctggacctacgaggacagtatccactggaaccgcactgtcaaaatatagatctcggtcagccgacggggcaaaaaattattttgagcacgaggagctgactgtctctcagctgcttttgtgccttcgtgagggaaatcagaaagtggagagactggaagtggcgcttaaagaggccaaagagagggtatccgattttgagaagaaaaccagcaaccggtccgagattgagacccagactgagggtagcaccgagaaggagaacgacgaagagaaagggccagaaaccgtgggtagcgaagtggaggccctgaacttacaggtcacgtcattatttaaagaactgcaagaggcgcatactaaactctcaaaggccgagctgatgaaaaagcgattacaggaaaagtgccaagccctcgaaagaaaaaacagcgccattcctagcgagctgaatgaaaaacaagagttagtctatacaaacaaaaaactagagttgcaggtagagtccatgctatcggaaatcaagatggagcaggccaaaactgaggacgagaagagtaagctgaccgttctccagatgacacataacaagctgctgcaggaacacaataacgccctgaagacgatcgaggagctgacgagaaaagagagcgagaaggttgatcgggccgtgctgaaggagctttcagagaagctagagctggcggaaaaagcgttggcaagcaagcagcttcaaatggatgaaatgaagcagacaattgccaagcaggaagaagatttagaaactatgacaattctgcgtgcccaaatggaggtgtactgttcagactttcatgcagagagagcagctcgcgagaaaattcatgaggagaaggaacagctggctctgcagttagctgtactgctgaaggagaatgacgcctttgaggacggcggacgacagtcactgatggaaatgcagtcccggcacggcgcgcgcactagcgactccgaccaacaggcataccttgttcagagaggagctgaggatcgtgactggcgccagcagcgtaacataccaatacacagctgcccaaagtgcggcgaagtgttacctgacatcgacacactgcagatacacgtaatggactgcattatttag

SEQ ID NO: 127375 - DNA, 1734 bp, synthetic construct
  misc_feature 1..1734: note = Description of Artificial Sequence: Synthetic coding sequence
  source 1..1734: mol_type = other DNA
atgtcccatcagccgctgtcatgcctgacagagaaggaagactcccccagcgaatccacaggaaacggacctccgcacctggcacaccctaatctggacacattcacccccgaagagcttctccaacagatgaaggagctgctgacagagaaccatcagctaaaggaagctatgaagttaaacaaccaagcgatgaaggggcgcttcgaggagctgtctgcctggaccgagaaacagaaagaagaacggcagttctttgaaattcagtcgaaggaagcaaaggagcggctgatggctctgagccatgaaaatgaaaagctgaaagaagagctgggcaagttaaaagggaaatccgagcgtagttctgaagaccctactgatgatagccgcctgccaagagctgaagcagagcaggagaaagatcagcttagaactcaggtggtgcggttgcaggccgaaaaggccgatcttctcgggattgtttcggagctgcagctgaagcttaactcatctggctcatcagaagattcgttcgtggagattagaatggcggagggggaagccgaaggtagtgttaaggaaatcaaacactcgcccggaccaacaagaacagtatctacgggaactgcgttgtcaaagtatagatcccgcagcgctgatggcgctaagaactattttgaacacgaagaactgacggtctcccagctgctgctttgcctccgtgaaggtaaccagaaggtagagcggctggaagtggccctgaaggaggccaaggagagagtgagcgattttgaaaagaaaactagcaataggagtgagatcgagactcagacagaaggcagcacagaaaaggaaaacgatgaagagaagggcccggagacggttggctctgaggtggaggccctgaatctgcaggtcacttcgctctttaaagagctccaagaggcccacacgaagttgtccaaagctgagctcatgaaaaagcgcctgcaggagaagtgtcaggctctcgaacgaaaaaattctgccatcccgagcgagctaaatgaaaaacaagagctcgtttataccaacaagaaacttgaactccaggtggagtccatgctctccgaaattaaaatggagcaggctaagacagaagatgagaaatctaagctcactgtgcttcaaatgacccacaacaagctgttacaggaacacaataatgcacttaagacaattgaggagctgaccaggaaggagagcgagaaggtggatcgggcggtattgaaagaactatcagagaagttagaactcgctgaaaaagctttagcgtcaaaacaattgcagatggatgaaatgaagcagaccatcgctaagcaggaagaagacttagaaaccatgacgatcctcagggcacagatggaggtgtactgcagtgattttcacgctgagagagctgcacgggaaaaaattcatgaagaaaaggagcagctggcattgcagctcgctgtcctgcttaaagagaacgacgccttcgaggatggcggtcggcaaagcctgatggagatgcaatcacgccatggggcccgtacttccgactctgatcagcaggcttatttggtgcaacgcggcgcagaggatcgggattggcgacagcaaagaaatattcccatccattcctgtcccaagtgcggcgaggtattgcccgatatcgataccctgcagattcatgtgatggattgcatcatatag

SEQ ID NO: 127376 - DNA, 1716 bp, synthetic construct
  misc_feature 1..1716: note = Description of Artificial Sequence: Synthetic coding sequence
  source 1..1716: mol_type = other DNA
atgagccatcaacctcttagctgtctgactgagaaggaggattcaccttcagaaagcacaggtaacggcccaccacaccttgcacatccaaatctagatacatttacacccgaagagctgctgcagcagatgaaagagctactgactgaaaatcaccaactgaaagaggctatgaagctgaacaaccaggcaatgaaagggcgattcgaggaactgagcgcctggacagaaaagcagaaggaggagaggcagttctttgagatacagagtaaagaggccaaagagagacttatggccctcagtcacgaaaacgaaaaactcaaagaggagctgggcaagctcaaaggcaagtctgagcggtcatctgaggatccaactgatgatagcagactaccacgggcagaagcggagcaggagaaagatcaactcagaacccaggtagttcgccttcaggcggagaaagcagacctgctcggtattgttagcgaactacagctgaagctgaatagttccgggtcatccgaggactccttcgttgaaatccgaatggctgagggggaggccgagggctcagtgaaggaaattaaacactctcctggacccacccgcactgtcagcacggggacaagcagatcggctgatggagccaaaaactattttgagcatgaagagctgaccgtctctcagctgctgctttgccttcgcgaagggaatcaaaaagtggagagattagaggtggccttaaaagaggcaaaagaaagagtatccgatttcgaaaaaaagacctcgaacaggtcagaaatcgagactcagacggaggggagcaccgagaaagagaatgatgaggagaaagggcccgaaacagtcggaagtgaggttgaagccttaaatcttcaagttacgtccctgttcaaggagcttcaggaggcccacactaagttgtcgaaggctgagctcatgaagaaaaggcttcaggagaaatgtcaggctctggagcgtaaaaactccgccattccgtcagagcttaacgaaaaacaggaactagtgtacacgaacaaaaagctggagttgcaggtagagtcgatgttgtccgagatcaaaatggagcaggctaagacagaagacgagaaatccaaactgacagttttacaaatgacacataacaaactgctccaggagcataacaacgccctgaaaacaatagaagaactgacgcgtaaagagtcagaaaaggtggaccgggccgtgctgaaagagctttccgagaagctggaactggcagagaaagccctggcctctaagcagctgcaaatggacgaaatgaaacagaccatcgcgaagcaagaggaggatctcgagacaatgaccatcctgcgcgctcagatggaggtatattgctcagacttccatgcagagcgggctgcccgggagaagatacacgaagagaaggagcaactagccttgcagttggccgtgttactcaaggagaatgacgcattcgaggatggaggccgccagtccctcatggagatgcagtccaggcatggagcccggacatccgacagcgaccagcaggcttacctggtgcagagaggggctgaagaccgggattggcgtcagcagcggaacattcccatccactcctgccccaagtgtggagaagtgttgcccgacatcgacactctgcagatacacgtcatggattgcattatttag

SEQ ID NO: 127377 - DNA, 1734 bp, synthetic construct
  misc_feature 1..1734: note = Description of Artificial Sequence: Synthetic coding sequence
  source 1..1734: mol_type = other DNA
atgtcccatcaaccactttcctgtctgactgaaaaggaagatagtccttcagaaagcacagggaatgggccaccacaccttgctcatcccaatctggatactttcacccccgaagagctgctgcaacagatgaaagagctgttgaccgagaatcaccagcttaaggaggctatgaagctgaacaatcaggcaatgaaagggcgtttcgaggaactctccgcttggaccgagaagcagaaggaggagcggcaatttttcgagattcagtcaaaggaggctaaagagcggctcatggcgttgtcccacgaaaatgagaagttgaaggaagagttagggaagctcaagggaaagagcgagagatcaagcgaagacccaactgacgattcaagattacccagagccgaggctgaacaagagaaggaccagctaagaacacaggtagtgcggctgcaggcagaaaaagcggatcttctggggatcgtttcggagctgcaattaaaattaaactcatctggtagcagtgaggactcgttcgtagagatccggatggccgaaggagaagccgagggctccgtaaaagaaattaaacactctcccggtcccacccggacagtgtccacaggcacggctctatcaaaataccgaagcaggagcgccgatggcgccaagaattacttcgagcacgaggagctgactgtgtcgcagttactgctgtgccttagagaaggcaatcagaaagttgagcgcctggaggtggcacttaaggaagcaaaggaacgcgtttccgactttgaaaaaaagacttcaaatcgatcagaaatcgagacacagacagaaggctcaaccgaaaaggagaacgatgaggaaaaaggtcctgaaactgtgggctctgaggtggaagcccttaacctacaggtaacttccctttttaaggagctgcaagaggcccataccaagctgagtaaggccgaactgatgaagaaacggctccaggaaaagtgtcaggccctcgaaagaaagaactctgccattcccagtgaactgaatgagaaacaagagctggtttataccaataagaagctggaacttcaggtagagagtatgctgtctgagattaagatggagcaggcaaagaccgaggatgaaaaatccaaactgaccgtcttgcagatgacccacaataaactattacaggagcacaataatgcactgaagacaatagaggaattgacaaggaaggaaagcgaaaaggttgatagagcagtgcttaaagagctttcggagaagctggaattggccgaaaaagcgctcgcgtccaaacagctccagatggacgaaatgaaacagaccatagcaaaacaagaagaggatttggagaccatgacaattcttagggcccagatggaggtttactgctcagatttccacgccgagcgtgccgccagggaaaaaatacacgaagagaaggaacaactcgcactccaacttgctgtcctcctgaaggaaaatgatgcttttgaggatggcggacgacagtccctcatggagatgcagtcgcgccatggcgctcgcacatctgattccgatcagcaggcatatctggtgcagagaggcgcggaagatagggactggagacagcagcggaacatccccattcactcctgcccaaaatgtggcgaagtccttcctgacatcgacaccctgcagatccacgttatggattgtatcatctag

SEQ ID NO: 127378 - DNA, 1716 bp, synthetic construct
  misc_feature 1..1716: note = Description of Artificial Sequence: Synthetic coding sequence
  source 1..1716: mol_type = other DNA
atgtcccaccagccattgagctgcctcactgagaaggaggacagtccatccgaatcgaccggcaatggcccgcctcacctcgcccatcctaatctcgacacattcacgcccgaggagctgctgcaacaaatgaaggagctgttaacagagaaccatcagctgaaagaggcaatgaaattgaacaaccaagccatgaaagggaggttcgaagaacttagtgcgtggacagagaagcagaaggaggagcggcagtttttcgagatccaaagtaaggaggccaaggagagactgatggcactgagccacgagaatgagaaactgaaggaagagcttggaaaattaaaaggcaagagcgaacggagtagcgaggaccctaccgacgattcaagacttcctagggccgaggcagaacaggagaaagaccagcttaggacccaggtcgtgcgcctgcaggctgagaaagccgatctgttaggcattgtctctgagctgcagctcaaactgaacagctcggggtccagcgaagatagttttgtagagattagaatggctgagggggaggctgaaggcagtgtgaaagaaatcaaacatagccctggaccgacacgcacggtgagcacaggaacatcccgaagcgcagacggagcaaagaactatttcgagcatgaggagctgaccgtgtcccaacttctactatgtctccgtgaaggaaatcagaaggtggaaaggcttgaggtggcactgaaggaagcaaaggagcgagttagcgatttcgagaagaagacatcaaaccggagtgaaatagaaactcaaacagaggggagcactgagaaagagaacgatgaggagaaagggccggaaacagtgggatcagaggtcgaggcactcaatcttcaggttacatctctcttcaaagaactgcaggaagcgcacactaaactctctaaagctgagctgatgaagaaacggttgcaggagaagtgtcaggctctggagcgtaaaaattcagcgatcccctccgagctcaacgagaaacaggagctggtgtatactaataaaaaattagagctgcaggtggaaagtatgctttccgagatcaaaatggagcaggccaagacagaggacgagaaatctaagctgacggtgttacagatgacacacaataagctgctgcaagaacacaacaatgccctgaagaccattgaagaattgacacggaaggaaagtgagaaagtggaccgcgccgtactaaaagagctgagcgagaagcttgaattggccgaaaaggccctcgcttccaaacagctccaaatggatgaaatgaaacagactatcgctaagcaagaggaggacctggagaccatgactatactacgggcccaaatggaagtgtactgttccgactttcacgccgaaagggccgcacgggagaaaatccatgaggaaaaggagcagctcgctctccaacttgcagtcctcttaaaagagaacgatgcctttgaggacggtggacggcagagcctgatggagatgcagagcagacatggggcacgtaccagcgactctgatcagcaggcctacctcgtgcagaggggtgccgaggaccgcgattggcgtcaacagcgcaatatccctatccactcttgtccgaaatgtggcgaggtcctgccagacattgacacactgcagatccatgtgatggactgtatcatttag

SEQ ID NO: 127379 - DNA, 381 bp, synthetic construct
  misc_feature 1..381: note = Description of Artificial Sequence: Synthetic coding sequence
  source 1..381: mol_type = other DNA
tgaggtgaggctgagggcagtgtgaaggaaatcaaacacagcccaggacctactaggacagtgtccaccggaacagctttgagtaaatacaggagccgcagcgccgatggggctaagaactactttgaacatgaggagcttacagtgtctcagctgctgctgtgccttcgggaagggaatcagaaggtggagaggctagaggtcgccctgaaagaggccaaggagcgggtgtccgattttgagaagaagacatccaacagaagcgagatcgagacccagacagaagggtcaacagaaaaagagaatgatgaagaaaaaggccctgaaacaaccggcttccatcatgttgggcaggatggactggatcttttaaccagctag

SEQ ID NO: 127380 - DNA, 444 bp, synthetic construct
  misc_feature 1..444: note = Description of Artificial Sequence: Synthetic coding sequence
  source 1..444: mol_type = other DNA
atgaagcttaacaaccaggccatgaagggccgcttcgaggagctgtcagcctggactgaaaagcagaaggaagagcgccagtttttcgagattcaaagcaaggaagccaaggaaagactcatggcactctcgcatgagaacgagaagctgaaagaggaactggggaaactcaaagggaagagcgaacggtcttcagaagatcctacagacgacagcagactgccgcgcgccgaggcagagcaagagaaggaccagctcagaactcaagtggtccggctgcaggctgagaaagcagacctgctgggtatcgtttctgaattgcagctcaaactaaactcctccggcagtagtgaagattctttcgttgaaatcagaatggccgagggagaggctgaaggtagtgttaaggaaattaagcactcacccggcccaacccgaacttag

SEQ ID NO: 127381 - DNA, 912 bp, synthetic construct
  misc_feature 1..912: note = Description of Artificial Sequence: Synthetic coding sequence
  source 1..912: mol_type = other DNA
atgcaccccgaaccagcacctcccccatcaaggtcctcccccgagctccctccaagcggcggctcaaccacctctggcagccgcaggtctcgaagacgttcaggggacggcgaacctccgggcgcacctcccccacccccgccaccctcagcggtgacctaccccgattggatcgggcaaagttacagcgaagttatgtccctaaacgagcatagcatgcaggccctatcttggagaaagctgtatctgagtcgcgctaagttgaaggcctcaagtcggacttcggcactgctgtccggattcgccatggtcgcgatggtcgaagtgcagctcgacgccgaccacgactaccccccaggtctgctgatcgcttttagtgcctgcacgacggtactggtggcggttcacctgtttgcgctgatgataagcacttgtattctgcccaatatcgaagcagtgtcaaatgtgcataatcttaatagcgtgaaggaatcacctcatgaaaggatgcatcgccacatagagctggcatgggccttttccactgttatagggaccctcctgttcctcgccgaggtcgttctcttgtgctgggtcaaatttctacctctgaaaaagcaacccggacaaccaaggcccacatcaaagccccccgcttccggcgctgctgccaatgtcagtacatccgggataactccagggcaggcagcggccatcgcttctacaacaataatggtgcccttcggtctgatctttatagtatttgcagtgcatttctatagaagtttagtgtcccacaaaaccgacagacagttccaggaactaaatgaactggcagagttcgctaggctgcaggatcaattggaccatagaggcgaccacccgctaacacccgggtcccattatgcatag

SEQ ID NO: 127382 - DNA, 765 bp, synthetic construct
  misc_feature 1..765: note = Description of Artificial Sequence: Synthetic coding sequence
  source 1..765: mol_type = other DNA
atgtccgccgagctaaatgttccgatcgaccctagtgccccagcttgccccgagcctggacataaggggatggattatagagactgggtgcgaagatcatatcttgagcttgttaccagtaaccaccacagcgttcaagccctgtcatggcgcaagctgtacttgagccgggcgaaactgaaggcgtccagtaggactagtgccctgcttagcggctttgcgatggtagctatggtggaggtgcagttagagactcaatatcaataccctagacctctgttgatcgccttttccgcctgcaccactgtgctggtggctgtgcacctgttcgcgctgctcatctctacctgtatcctacctaacgtggaggccgtttctaatatccacaacctgaattcaatttctgagagtcctcatgagagaatgcacccatatatagaactggcttggggattcagcactgtgctgggcatcctcctgttcctggcagaggtggtactcctgtgctggatcaagtttctccctgtagatgctcgaaggcaacctggtcctcctccaggacccggaagtcataccggatggcaggcagccctcgtgagcaccattatcatggtgcccgtgggattgattttcgtggttttcaccatacatttttatagaagcctggttaggcataaaaccgaaaggcacaatcgagaaatagaggagctccacaagctgaaggtgcagctggacggccacgaacgatccctgcaggtgctatag

SEQ ID NO: 127383 - DNA, 765 bp, synthetic construct
  misc_feature 1..765: note = Description of Artificial Sequence: Synthetic coding sequence
  source 1..765: mol_type = other DNA
atgagcgctgagttaaacgtgcctatcgacccctccgccccggcctgtcctgaaccaggccataagggtatggattatcgcgactgggtccgccgctcttacctagagttggtgacaagcaatcaccacagcgtgcaggcgctaagctggcgaaagctatacttgtcaagagcgaaactgaaggcctcttcaagaacttccgccctcctgtccggattcgctatggtggcgatggtggaagtgcagctagagacacagtatcaatatcccaggcctctgcttatagcattttcagcttgtacgaccgtgctcgtggctgtgcacctcttcgcgctgttgatctccacctgcatccttccaaacgtggaggccgtgtctaatatccacaaccttaactctattagcgaatctccccacgagcggatgcacccttatattgaacttgcctggggattctccactgtcctaggcatcctgttgttcctcgcggaggtggtgttattatgttggattaagttcttacctgtcgatgcccggcgtcaaccggggcctccacctggtcctggcagccacaccgggtggcaggccgctctggtcagcaccattatcatggtgcccgtggggttaatctttgtagtttttacaatccatttctatcgctctctggttaggcacaaaacggagcgccataatcgggagatcgaggaattgcataagcttaaagtgcagctggatggacatgaacggtcactccaggtgctctag

SEQ ID NO: 127384 - DNA, 639 bp, synthetic construct
  misc_feature 1..639: note = Description of Artificial Sequence: Synthetic coding sequence
  source 1..639: mol_type = other DNA
atgagtgccgaactgaacgttcctatcgacccttctgcacccgcctgtcctgagccaggtcacaaggggatggactaccgggactgggtgaggcgaagctatttagaactggtcacatcgaatcatcactctgtgcaggccttatcttggcgtaaattatatctttcaagggccaaactaaaagcttccagcagaacctctgcgttgctgtccggctttgcgatggtggcaatggtggaagtgcagctggagacacagtaccagtatcctcgacccctcctaattgccttttctgcttgcactacagtcctggtggcggttcacctcttcgcgctactgatctcaacgtgcattctgcctaatgttgaggccgtctccaatatccataacttgaattccatatctgaatccccccatgagcgtatgcatccctacatcgagctcgcctggggctttagtacagtgctgggaattttactcttcctcgccgaagtggttctgctctgctggatcaaattcttacccgtggatgccagacggcaacccgggccaccaccaggacccggctcccacacaggctggcaggctgctttggtatctactattattatggttcctgtgggcctgatcttcgtttag

SEQ ID NO: 127385 - DNA, 765 bp, synthetic construct
  misc_feature 1..765: note = Description of Artificial Sequence: Synthetic coding sequence
  source 1..765: mol_type = other DNA
atgagcgccgagctgaatgttcccatagatccatcagccccggcatgccctgagccaggtcacaagggaatggattaccgagattgggtgcgccgctcttacctagaactggttacgagtaatcatcacagcgtccaagcgctttcgtggcgaaaactctacttgagcagggccaagcttaaagcttcttcgcgaacgtctgcattgctgagtggtttcgcgatggtggcaatggtggaagtccagcttgaaacccagtaccaatacccacgacctctgctgatagcattttcagcatgtacgactgttttggtcgccgtgcacctgttcgcactgctgatttctacatgcattttacccaatgtggaggcggtgagcaatattcacaacttgaactccatcagcgagagtccccacgaaaggatgcacccatacatcgagttggcttgggggtttagtacagtgctcggaattcttctgttcttagccgaggttgtgcttctctgttggattaagttcctgcccgtcgacgcccgaaggcagccgggtcccccccctggaccaggatctcacactggctggcaggccgctctggtcagtaccattatcatggtccctgttggactcatcttcgtcgtattcaccattcacttttataggtcgctagtgcggcacaagacagagcgacacaacagagagatcgaggaactgcataaactgaaggtgcagctggatggccatgagcggtctttgcaggtgctctag

SEQ ID NO: 127386 - DNA, 765 bp, synthetic construct
  misc_feature 1..765: note = Description of Artificial Sequence: Synthetic coding sequence
  source 1..765: mol_type = other DNA
atgagcgccgagctcaacgtccccatcgatcccagtgccccagcatgtcctgagcctgggcataaaggtatggattaccgagactgggtgagaaggtcctatcttgagcttgttacatctaaccaccacagcgtccaggcactgtcctggcgaaaactgtacctttctagagccaagctgaaagcatcatctcgcaccagcgccttactttcaggctttgccatggttgcaatggtggaagtgcaattggagacccagtaccagtaccctcggccgctgctgatcgccttctccgcttgcacgaccgttctggtagcagttcatctctttgctttgctcattagcacatgcatccttccgaatgtcgaggctgtctccaacatccataacctgaactctatctctgagtcaccccacgaacgcatgcatccctacattgagctggcatggggtttctctaccgtcctgggtattctcctcttcctggcagaggtggtgttactgtgctggatcaagttccttcctgtggacgcacggcggcagccaggcccccccccagggcctgggtctcacactggatggcaggctgcactcgtgtccaccataatcatggttcctgtgggtctgatcttcgtggtattcactatccacttctatcggtcattggtgcgacataaaacagagcgtcataacagagagatcgaggaactgcacaagctgaaggtgcaacttgatggacacgagcgctcattacaagttctgtag

SEQ ID NO: 127387 - DNA, 93 bp, synthetic construct
  misc_feature 1..93: note = Description of Artificial Sequence: Synthetic coding sequence
  source 1..93: mol_type = other DNA
atgtctgctgaactgaatgtgcccatagacccctccgcccccgcttgcccagagcccgggcataaggggatggattatcgcgactgggtttag

SEQ ID NO: 127388 - DNA, 690 bp, synthetic construct
  misc_feature 1..690: note = Description of Artificial Sequence: Synthetic coding sequence
  source 1..690: mol_type = other DNA
atgagtgcagagctgaatgtgcccattgatccaagcgctccagcttgccccgagccgggccataagggcatggattatagggactgggtcaggcgtagctatctcgagcttgttaccagcaaccaccacagtgtgcaggctctaagctggcgcaagctctatttaagcagggccaagcttaaagcatctagtcggacaagcgcgctcctgagtgggttcgcaatggttgctatggtggaggtgcagctggaaacgcagtaccagtatccaaggccattactgatcgccttttccgcttgtactaccgtcctggtcgccgtgcatctgttcgctctactcatatcgacctgcatcttaccaaacgttgaagcggtgtcaaatattcataacctgaacagtatttccgagtccccccatgagaggatgcatccttacatagagttggcatggggattcagtacggtcctgggaattctacttttcctagccgaggtggttcttctgtgctggatcaagtttctgccagttgatgcgaggcgccagccgggtcccccacctgggccagggagccacacgggctggcaagccgcactggtctcaacaatcatcatggtgccagtgggccttatctttgtcgtttttactatccacttttaccgatcactggtgaggcacaagacagagcgctag

SEQ ID NO: 127389 - DNA, 294 bp, synthetic construct
  misc_feature 1..294: note = Description of Artificial Sequence: Synthetic coding sequence
  source 1..294: mol_type = other DNA
atgagcgctgaactcaacgttcccatagacccttcagcccctgcttgcccggagcccggccataagggcatggactaccgcgactgggtccgtaggagctacctggagctggtcacaagcaatcatcattcagtccaagccctgagctggcggaagctttatctgagtcgcgcgaagctgaaggcgtcatcaaggacatctgcactcctctcaggcttcgcaatggtagcgatggttgaggtacagttagagacccagtatcagtacccccgaccactgctcattgctttctag

SEQ ID NO: 127390 - DNA, 888 bp, synthetic construct
  misc_feature 1..888: note = Description of Artificial Sequence: Synthetic coding sequence
  source 1..888: mol_type = other DNA
atgaagggtggcgaaggcgatgcaggagagcaggcacccctgaatcctgagggcgagtcaccagcaggtagcgccacttatagggaattcgtccatagagggtacctggacctgatgggcgcaagtcagcatagtctgagggctctctcctggaggcgcctctacctgtcacgcgccaagttaaaggcatcgtcacgcacctcagctctgctctccggtttcgcgatggttgctatggtggaagtgcagttagaatcagatcacgaatatccgcccggactgctcgtagctttcagtgcctgcactaccgttctagtggctgtccatctcttcgctcttatggtgtccacttgcttgctaccacatatcgaagctgttagtaacatccacaatctgaattctgtgcatcagtctcctcaccaacggctacatagatatgtcgagcttgcatggggcttcagtacagcacttggcacctttttgtttctggccgaggtcgtcctagttggttgggtaaaattcgtgccaataggcgcacccttggacactcctacacccatggtgcctactagtagggtgccgggtactcttgcccctgtcgccacctccttgtcccctgcctcaaatcttccccgtagctccgcttccgctgcaccttcacaggccgagccggcttgtccacccaggcaggcctgcggggggggaggagctcacggaccaggatggcaggccgcgatggcttcgacagcaataatggttcccgtcggactggttttcgtggcgtttgcgttgcacttttatcggagccttgttgctcacaaaaccgacagatataaacaggagctggaagaactgaaccgccttcaaggagagctccaagccgtgtag

SEQ ID NO: 127391 - DNA, 822 bp, synthetic construct
  misc_feature 1..822: note = Description of Artificial Sequence: Synthetic coding sequence
  source 1..822: mol_type = other DNA
atgaaaggcggtgagggcgatgccggagaacaagctcctctgaacccggagggtgagtctcctgctggttcggccacttacagagagttcgttcacaggggctatctcgatctgatgggagctagccagcattccctgcgggctctctcatggcgaagactttacttgagccgggccaagctcaaggcatctagcagaacaagtgcacttttatcaggattcgcaatggtcgcgatggtcgaagtgcagctggaatctgaccacgagtacccaccagggctgctggtggctttttctgcctgtaccaccgtccttgttgccgtgcacctctttgccctcatggtgagcacatgcttactgccccacatcgaagcagtgtcgaatatccacaatttgaatagcgtgcatcagtcgcctcatcagagactccacaggtacgtggagcttgcctgggggttttcaaccgccttgggcactttcctatttctcgctgaggtagtcctcgtcggctgggtgaaatttgttccaatcggtgcacctctggatacacccacacctatggtgcccacgtccagggttcctgggaccctcgccccagtcgccactagccttagtccagcctctaatctccctcgtagctcagcatccgcagctccaagccaggcagagccagcctgcccccccaggcaggcttgtggaggtggcggggcccacgggcctggatggcaagccgcaatggcttctacattccccggcattttcccaatcagcctttcgttagggttctgtaaattgttatgcacttgggctggcctgtcctag

SEQ ID NO: 127392 - DNA, 414 bp, synthetic construct
  misc_feature 1..414: note = Description of Artificial Sequence: Synthetic coding sequence
  source 1..414: mol_type = other DNA
atggccggatcgcaggacatctttgacgcaattgtgatggcggacgagcgttttcacggggagggatacagagagggctacgaggagggctctagcctcggggtgatggaaggcaggcagcacgggacattgcacggggccaaaatcggtagtgaaataggctgttatcaaggattcgctttcgcttggaaatgcctccttcattcatgcacaaccgagaaggactcacggaagatgaaggtgctcgaatccctcataggaatgattcagaagtttccatatgacgacccaacctacgataagctccacgaagacctcgacaagatcaggggcaagtttaaacagttctgttcattgctcaacgtgcaaccagattttaagatcagtgcagagggatccggcttaagtttttag

SEQ ID NO: 127393 - DNA, 666 bp, synthetic construct
  misc_feature 1..666: note = Description of Artificial Sequence: Synthetic coding sequence
  source 1..666: mol_type = other DNA
atggccgggtctcaagatatcttcgatgccattgtcatggctgacgaaaggtttcatggggagggttatagggaaggctacgaggaaggcagctcactgggagtgatggagggaaggcaacacggcacactccacggagcaaagatcggtagcgagatcggctgctaccagggatttgcattcgcttggaaatgcctactccacagctgtacaaccgaaaaagatagccgaaaaatgaaggttctggaatcgcttatcgggatgattcagaaattcccctatgacgaccctacctacgataaactccacgaagacctcgataaaatacgagggaaatttaagcaaacaggcctcagcccgagtgcagtgatggtgcgtcctccctcatacgtggagcttccagtaacctgctggtgctgggaagcaccacgctgcaatcagaagtgcacagatcctgcagctagacgtccagatcctcagacatgcgcatcccaagatcgcttaagatgcgccccctgtacatgccatcagcccttagcaagccggtacacccaacaccccggcctcgttccactcccccatcatgatagacagtcagtcccgcagggtcccagggtggtccagaccgacgctgcggcccgaatggttgagcagcaaacaatgtag

SEQ ID NO: 127394 - DNA, 414 bp, synthetic construct
  misc_feature 1..414: note = Description of Artificial Sequence: Synthetic coding sequence
  source 1..414: mol_type = other DNA
atggctggtagccaggatatatttgacgccattgttatggcggatgaacggtttcatggcgaggggtatcgtgagggttacgaagagggtagttcgttgggggtgatggagggtagacagcatggcaccctgcacggagccaagatagggtcagaaattggttgctatcagggcttcgcttttgcctggaaatgtctgctacattcatgcacaacagaaaaggattctcgcaagatgaaggtcttagagagtctaatcggtatgattcaaaagtttccttacgatgatcctacgtacgacaagttgcacgaagacttagataagatacgcggcaagttcaaacaattctgctcccttctcaacgtgcagcccgattttaagatttcagctgagggcagcggactctccttttag

SEQ ID NO: 127395 - DNA, 237 bp, synthetic construct
  misc_feature 1..237: note = Description of Artificial Sequence: Synthetic coding sequence
  source 1..237: mol_type = other DNA
atggccgggagtcaggatattttcgatgccattgtaatggccgacgaatctagaaagatgaaagtattagagtcactgatcggcatgatacagaagtttccttatgatgacccgacttacgacaagttgcacgaagacttggacaaaatcagaggaaaatttaagcagttctgcagtttattgaatgtgcagccagactttaagatttccgcggagggttcagggctcagcttctag

SEQ ID NO: 127396 - DNA, 3039 bp, synthetic construct
  misc_feature 1..3039: note = Description of Artificial Sequence: Synthetic coding sequence
  source 1..3039: mol_type = other DNA
atgatggcccaatcgaatatgtttactgtggccgatgtactctcgcaagatgagctgaggaaaaaactgtatcaaaccttcaaagataggggcattctggatacccttaaaacgcaacttcggaaccagctcattcacgaactgatgcaccctgtactctccggggagctccaaccccgctccatttctgttgaggggtcttcccttttgattggcgccagcaactccttggtggctgatcatctccaaagatgcgggtatgagtattccttgtctgtttttttccccgaatccggtctggcgaaggaaaaagtgttcactatgcaggatctgcttcagcttatcaagatcaacccaacttcaagtctatacaaaagcctggtgtccggatccgacaaggagaaccagaaggggtttctgatgcatttcttgaaggaactggccgaataccatcaagcaaaagaatcttgcaatatggagacccagacctcttctacctttaatcgggattcactcgctgagaaacttcagctgatcgacgatcaattcgccgatgcatacccccaaagaattaaatttgagagcctcgaaatcaagttaaacgaatacaagcgcgagatagaagagcagttacgggccgagatgtgtcagaaactgaaatttttcaaagatacagaaattgccaaaatcaagatggaagctaagaagaagtacgagaaagagctcaccatgtttcagaacgattttgagaaagcatgccaagccaagtccgaggcactggtgctgcgcgagaaatccactctcgagcgcattcacaagcaccaagagatcgagacaaaggaaatatacgcacagcggcagttgctgttgaaggatatggacctcctgagagggagagaagcagagttgaaacagagggtcgaggcttttgagttgaaccagaagctgcaagaagaaaagcataagtctatcacagaggcactacgaaggcaggagcagaatatcaaatcgtttgaggagacctacgatcggaaattgaaaaatgagctgcttaaatatcaactcgagctaaaggacgactatatcattcgcaccaaccgccttatcgaggacgagcgcaagaacaaggaaaaggcagttcacctacaggaggagctaatcgccataaattcaaaaaaggaggagttaaatcagagtgtgaatagagtaaaggagcttgagctggagctggaatctgtaaaagcccaatcgctggcgatcacaaagcagaatcatatgctcaatgagaaagtcaaggaaatgtcagattacagcctgctgaaggaggaaaaactagaactcctcgcccagaataaactccttaagcagcaactggaggagagcaggaatgagaacctacgcctcctgaatcgactggcccagcccgcccccgagctggcagtgttccagaaggaattgcgcaaagctgagaaagcgatcgtagtggaacatgaagagtttgagtcttgccgtcaggcactccataagcagctgcaagatgagatcgagcatagtgcccagctgaaggcacagatcctgggctacaaggccagcgtcaaatctttgaccacacaggtggcggaccttaagcttcagctgaaacagacccaaaccgcgctggagaatgaggtgtactgtaatcctaagcagtccgtcatcgacaggtctgtaaatggcctgattaacgggaatgtggtgccttgtaatggggaaatcagtggggatttcctgaacaaccccttcaagcaggaaaatgttctggcccgaatggtggctagcaggataactaactatcccacagcctgggtggaggggtcaagccccgatagcgatctggagtttgtggccaataccaaagctcgggtaaaggagctccagcaggaggcagagcgccttgagaaggccttccgctcatatcaccgccgcgtcatcaaaaacagtgctaaaagccccttggctgctaaaagtccaccaagtttgcatctgctcgaggcctttaaaaacatcacttcctccagccctgagagacacattttcggtgaggacagggtggtgtccgaacagccacaggtgggaacgctggaagaaagaaatgacgtagtggaagcgctgaccggcagcgcagcctccaggttacggggcggaaccagctcaagacgactatcctcaactcccctgcccaaggccaaacgaagcctggaaagcgaaatgtatctggagggacttggccgctctcacatcgcttcgcctagcccttgccctgatcgaatgcccctgcctagcccaacagagtcgaggcacagcctgtctatcccgcccgtgtcttccccccccgagcagaaggtgggcctctaccgcaggcagacggaattacaggataagtccgaattttcagacgtcgataaacttgcttttaaggacaacgaagagtttgaaagctcttttgagagtgctgggaatatgccccgccagttagaaatgggtggacttagccccgccggagacatgtcacacgtggacgccgctgcagcagccgtacccctaagctatcagcatccgtccgtggaccagaagcaaatagaggagcagaaagaagaggaaaaaattcgtgagcaacaggtcaaagaacgtcgccaacgggaggaacgcaggcaaagcaatttacaggaggttttagagagggagaggagggaactggagaaattgtaccaggagaggaaaatgatcgaggagtcactgaaaattaaaataaaaaaggagcttgaaatggaaaacgagctggaaatgagtaaccaggaaattaaggataagtctgcacatagtgagaatccactcgagaaatacatgaaaatcatccagcaggaacaggaccaggagtccgcagataagagctcaaaaaaaatggtgcaagagggatccctggtcgatacacttcaatcctccgacaaggtagagagtcttacgggcttttcacatgaagagctagacgactcttggtag

SEQ ID NO: 127397 - DNA, 2919 bp, synthetic construct
  misc_feature 1..2919: note = Description of Artificial Sequence: Synthetic coding sequence
  source 1..2919: mol_type = other DNA
atgatggcccagagcaacatgtttaccgtagcagacgtgcttagccaggacgagttacgaaaaaaattgtatcagacattcaaagatcggggcattctcgacaccctgaagacccagctgcggaatcagcttatacacgagcttatgcaccctgtgttgagtggcgagctgcaacctaggtcaatctctgtcgaaggatccagtctgctgattggcgcctccaatagcctcgtcgcagaccacttgcaacgctgcggatatgaatatagtttgagtgttttttttccggaatcagggctcgcgaaagagaaagtcttcaccatgcaggacctccttcagcttattaaaatcaaccctacgagtagcttgtacaagtctctggtcagtggttcggacaaggagaaccaaaaggggttcctaatgcacttcctgaaggagctggctgaataccatcaggccaaagaaagctgtaacatggaaacgcagacttcctccactttcaaccgtgattcattggctgaaaagctgcaactcatcgacgatcagtttgctgatgcctatccacaaaggattaaatttgagtccctcgagatcaagctgaatgagtacaaaagggagatcgaggaacagctcagggccgagatgtgtcaaaagctgaagtttttcaaggataccgagatcgccaagataaagatggaggccaagaagaagtacgagaaagagctgaccatgtttcaaaatgacttcgagaaggcctgtcaggctaaatctgaagcacttgtactgcgcgagaagagcacccttgagcgaatccataagcaccaggaaatcgaaaccaaagagatctatgcccaaagacagctgttgttaaaggatatggatttgttaagagggcgggaagcagagctgaagcagcgcgtggaggcgtttgagctataccaattggagctaaaggatgactacatcatccgcaccaacaggctaattgaggacgagcgcaagaataaggaaaaggctgtgcacctacaggaagagttgatagcaattaattcaaaaaaggaggagctaaatcaaagtgtaaatcgtgtaaaagaattggagctggagttggaatcagtgaaagcacagtctctcgccataaccaagcagaaccacatgttaaatgagaaagtgaaggagatgtccgactattcccttctgaaggaagagaagctggagctcctggcgcagaacaagctgctgaagcagcagctggaggagagcagaaacgagaacctccgactgttgaataggctcgcccaacctgcccctgaactagcggtgtttcagaaagagctgaggaaggcagagaaggcgatcgtggtcgaacacgaggaatttgagagctgccggcaggccttacacaagcagcttcaagacgaaatcgaacattctgcacagctcaaagctcagatcctgggatacaaagcttcagttaagtccctcacaacccaagtggctgacctcaaactccagctgaaacagacccagaccgcactggagaacgaggtctattgtaatcccaagcagagcgtgatcgatagaagtgtgaatggtttaatcaatggtaatgttgtcccttgcaatggtgagatctcaggagattttcttaataaccccttcaagcaggaaaatgtcttggccaggatggtcgcctctcgaattaccaattaccccactgcctgggtggaggggtcctcacccgactcagacttagaattcgtggcaaatacgaaagctcgcgtcaaagagttgcagcaggaagccgaaaggctggaaaaagccttccggtcataccaccggcgcgttattaaaaattccgccaaatctccactggctgcaaaatctccgccgtcattgcacttattggaggcttttaagaacattacctctagctcccctgaacgtcacatcttcggcgaggaccgtgtcgttagcgagcagccacaagtgggcacgttggaagaacggaatgatgttgtggaagctttgaccgggtctgccgctagtcggctgcgcggcggtaccagtagccgccgcctaagctcgacccctctccccaaggcgaaacgcagtctcgagagcgagatgtatctggagggactgggacgttctcatatcgcttctccatctccgtgccccgataggatgcccctgcccagtccgactgagagccggcacagcctgtctatccctcctgtgtcttccccccccgagcagaaggtcggcctctacaggaggcagacggagcttcaggacaaatccgagttcagcgacgttgataaactcgccttcaaggacaatgaggaattcgagagtagctttgagtctgcggggaacatgccacgccagctagagatgggaggtctgtctcctgctggcgatatgtctcatgtggatgccgcagcggccgctgtgcccctgtcataccagcatcctagcgtcgatcagaaacagattgaggagcaaaaggaggaggagaaaattcgcgagcagcaggtcaaggagcggagacagcgagaggaacggcggcagagcaaccttcaggaagtcttggaaagagagagacgggaactggaaaaactctatcaggaaaggaaaatgatagaagaatctttgaaaatcaagataaagaaggagctggagatggaaaatgagttagagatgtccaatcaggaaattaaggataaatccgcccatagcgaaaatcccctggaaaagtatatgaaaatcatacagcaggagcaggaccaagagagcgccgataagtcttctaagaagatggtgcaggagggatccctggtcgatactctgcagagcagcgataaagtagaatccttgacaggtttctcacacgaagaacttgacgacagttggtag

SEQ ID NO: 127398 - DNA, 2619 bp, synthetic construct
  misc_feature 1..2619: note = Description of Artificial Sequence: Synthetic coding sequence
  source 1..2619: mol_type = other DNA
atgcacttcctcaaggagctcgctgagtaccatcaggccaaagaatcgtgtaatatggaaacacagacatcttctactttcaacagggattcgctcgcagagaagctgcagttgattgacgaccagtttgccgatgcatacccccaaagaatcaagttcgagagcctggagattaagttaaacgaatacaaaagagagatcgaggagcagcttagagctgaaatgtgtcagaaattaaagttctttaaagatactgaaatcgccaagataaagatggaggccaagaagaagtatgaaaaggagctaacaatgtttcagaacgattttgagaaagcctgccaggctaaatccgaagcgcttgtcctgagagaaaaaagtaccctggaacgaatccataaacatcaagaaatagagaccaaagaaatctatgctcagcgacagctgcttctgaaagatatggatctgttaagggggagagaagccgagttgaagcaacgagtcgaggcattcgagttaaatcaaaaactgcaggaagagaaacataagagcattaccgaggccctgagacggcaagaacagaatattaaatctttcgaggaaacatatgaccgtaagctgaagaacgagttactgaagtatcagctggagttgaaggacgactatatcattagaactaataggcttattgaagatgagagaaagaacaaagagaaggccgtgcaccttcaggaggagctgatcgctataaattccaaaaaggaggaactaaaccagtcagtgaatagggtgaaggagttagagctcgaattagagtctgtcaaggcccaatccctggccatcactaaacagaatcacatgctgaatgaaaaggtgaaagaaatgagcgactattctttgctgaaggaggagaaactggaattgctagcccagaataagctcctaaagcaacagcttgaggagagcaggaacgagaacctaagattgttaaatcgactagctcagcctgcgccggagctggcggtgtttcagaaggagctgaggaaggccgagaaagccatcgttgtggaacacgaggagttcgagagctgtcgccaagccctgcacaagcagttacaagatgagattgagcactctgcccagctgaaagcgcagatcctcgggtacaaagcctcagtcaagtctctgacaactcaagttgctgacctaaagctccaactgaagcagacccagaccgccctggaaaacgaggtgtactgtaatccaaagcagagtgtgatcgacagatctgtaaacggccttatcaatggcaatgtggtgccctgcaacggtgagattagcggtgattttctaaataatccctttaaacaggaaaacgtccttgccaggatggtggccagccggatcacaaattaccctaccgcctgggttgagggatctagcccggacagcgacttggagtttgtggcaaacactaaggcaagggtcaaggaactgcagcaggaggccgagcgccttgagaaggcattccggagttaccaccgtcgcgtgatcaagaactccgcaaagagccccctggcagccaagagccccccttcacttcacctgctggaagcctttaagaacattacctcctcttctcctgaaaggcacatatttggcgaagatcgcgtggtgtcagaacaaccccaggtcggcactctcgaggaaagaaacgatgttgtagaagcactgacgggaagcgctgctagccgactccgcgggggaacgagctcgcgacggctttcctccacacctcttccaaaagcaaagcgaagcctggagtcagagatgtaccttgagggcttgggtaggtcacatattgcttctccatcaccctgtcctgaccgcatgccccttccaagcccaaccgaaagccgccattctctatcaattccgcccgtaagctcaccaccggaacagaaggtcgggctatatagacgacagacggagctacaggataaaagtgagttcagcgatgtggacaagctagcctttaaggacaatgaggagtttgaatcctccttcgagagcgccggaaatatgccccgccagcttgagatgggtgggctatcacccgccggagacatgagccacgtggacgccgccgcagctgcggttccgttgtcctaccaacacccatccgtcgaccagaagcaaatagaagaacagaaagaggaagagaagatcagagagcagcaggtgaaggagcgcagacagagggaggaacgacgtcagagcaacttgcaggaggtgctcgagagggagcggagggaactggagaaactttaccaagagaggaaaatgattgaagaatccctgaagataaagatcaaaaaagagctcgagatggaaaacgagctggagatgtcaaatcaggagattaaagacaagtcagcccacagtgagaaccccctcgaaaaatacatgaagattatccagcaagaacaggatcaggaatctgctgacaaatctagtaagaaaatggtgcaggaaggatctctggtagacactttgcagtcgtctgataaggtcgagagcctcactggattttcacacgaggagttagacgactcttggtag

SEQ ID NO: 127399 - DNA, 1104 bp, synthetic construct
  misc_feature 1..1104: note = Description of Artificial Sequence: Synthetic coding sequence
  source 1..1104: mol_type = other DNA
atgatggcccaaagcaatatgtttaccgtggctgacgtgctttcccaagacgagctcaggaaaaagctgtatcagacattcaaagacaggggcatcctggacacactgaaaactcaattgcgcaaccagcttatacatgagctgatgcaccctgtgctgagcggcgagctgcaaccgcgaagcatctctgtggagggcagcagcttgttgattggcgcatctaactctctggtcgccgaccaccttcagcggtgcggttatgagtacagtttgagcgtgttttttcctgagagcggtcttgctaaggaaaaggtgtttacaatgcaggatctgcttcagctcattaagattaatcccaccagctctttatataagagtctggtcagcgggtctgacaaagagaatcagaaaggatttttaatgcatttcctgaaggagcttgcagagtaccaccaagcgaaggaaagctgcaatatggaaacacagacaagctctaccttcaatcgcgactctcttgctgaaaaactacagctcattgatgaccaattcgcagatgcttatccacagcggataaagttcgagtcacttgagattaagctgaatgagtataaacgagaaatcgaagaacaacttcgggcagagatgtgtcagaagctgaaattttttaaggacaccgagatcgcaaagatcaagatggaagccaaaaagaagtacgaaaaagagttgacaatgtttcagaatgatttcgagaaggcatgccaggctaaatcagaggcattagtcctgcgtgaaaagagtacactggagaggattcacaagcatcaggagatagaaacaaaggagatctatgcacagagacagctcctactcaaggacatggacctgttacgggggcgggaggccgagttaaagcaacgggtggaggccttcgaactgaatcagaagctgcaggaagaaaagcacaagtctatcacggaagctctccggagacaggaacagaatattaaatcattcgaggaaacctatgaccgtaagctcaaaaacgagctcctgaacttccaccgtttgcacggagtgtgtctggctctgggtattctgatctag

SEQ ID NO: 127400 - DNA, 1017 bp, synthetic construct
  misc_feature 1..1017: note = Description of Artificial Sequence: Synthetic coding sequence
  source 1..1017: mol_type = other DNA
atggtctttttgtgtatcttcaaggagctggccgaataccaccaagccaaggaatcgtgtaacatggaaacacagacaagctctaccttcaaccgggacagcctcgccgagaagctccagctcatcgatgaccagttcgctgacgcctaccctcagaggatcaagttcgagtctctggagatcaagttaaacgagtacaagagagaaatcgaggaacaactgcgtgctgaaatgtgccagaagctcaaattcttcaaggacacagaaatcgcaaaaatcaagatggaggctaaaaaaaagtatgagaaagaactgaccatgttccagaatgactttgaaaaagcttgccaggcaaaatccgaggctttggttcttcgcgagaagagcactttagagagaatccataaacatcaggagattgaaactaaagagatctacgcccagcggcaacttctgctcaaggacatggacctcctcagaggtcgcgaggcagaactgaagcaaagggtggaagccttcgagctgtatcagctggaactcaaggacgattacatcatccgcacaaaccgcctcattgaggacgagaggaagaacaaggagaaggcggtccacctgcaggaggagctcattgccattaactcaaagaaggaggaactcaatcagtcagtgaatcgtgttaaggagctggaactagagctcgaatccgtcaaagcccaatctctcgccatcaccaagcagaatcatatgctcaacgagaaggtcaaggagatgagcgactattcattgctgaaagaagaaaagctggagttactggcacagaataaactgctgaagcagcaactggaggaatccaggaacgagaacctgcggctgctaaatcggctggcacagcccgcccccgagcttgccgtttttcagaaagagctgcggaaggcagaaaaggcgattgtggtggagcacgaagaattcgaaagttgccgtcaggcattgcataaacaacttcaagacgagccctag

SEQ ID NO: 127401 - DNA, 2586 bp, synthetic construct
  misc_feature 1..2586: note = Description of Artificial Sequence: Synthetic coding sequence
  source 1..2586: mol_type = other DNA
atggctcattacccgacccgactcaaaactaggaagacttatagttgggtgggcagacccctgctcgaccgcaagctacactaccagacctatcgcgagatgtgcgtcaagactgaaggatgctctacagagatccacattcagatcggtcagttcgtccttatagaaggcgatgacgatgaaaacccctacgttgccaagcttctcgagttgttcgaagatgatagcgatccccctccgaaaaagcgtgcccgggtccagtggttcgtacggttctgcgaagtgccggcgtgcaagcgccatctgctgggcaggaaacctggggcccaagaaatattttggtacgactatccagcctgtgacagtaatattaacgctgaaaccatcattgggctcgtgagggtgatcccgctggctcctaaagacgtggttccgacaaacttaaaaaacgagaaaaccctgtttgttaaactgagctggaacgaaaagaagtttcggcctctctctagtgagctcttcgccgagctgaacaaaccccaggagagcgcagccaaatgccaaaaaccagtgcgggcgaaatccaaaagcgccgagagcccgtcctggactcccgccgaacacgtcgctaagagaattgaaagccgccatagtgcttccaaaagccgacagacacctacacacccattgacaccccgcgccagaaagcggcttgagttggggaatctgggcaatccccagatgagccagcagaccagctgcgcttccctcgatagcccaggccggatcaaaagaaaggtcgccttttccgagattacctccccaagtaaaagatcccagcctgacaaactccagaccctgagccccgcacttaaggccccagagaagacaagagaaaccgggctgagctacaccgaagatgataaaaaggcatcccctgaacaccgcatcattcttcgaacacgtattgctgccagcaaaactattgatatacgggaagagaggacactcacaccgatcagtggaggccagaggagctctgtggtgccctccgttatcttgaagcctgaaaacatcaagaagcgggacgcaaaggaagccaaggctcagaacgaggcaacctccactccccacagaattcgtcgtaagtcctctgtactgacgatgaaccgcatacgtcaacagctgaggttcctcggcaacagtaaaagcgatcaagaggagaaggagatccttccagctgctgagatctctgattcaagcagcgatgaagaagaggcttcaaccccccccctgccaagaagagctccgcgcactgtgtcacgaaatctgagatcctcgttaaagtcctctctgcacacattgactaaggtgccgaagaaatcactcaagccacgcacgccccgctgtgccgccccgcagattaggagcagatctctggcagcacaggagcctgctagtgtgctcgaggaggctcggctcagattacatgtaagtgccgtgcctgaaagcctgccctgtcgggaacaggaatttcaggatatttacaatttcgtagagtccaagctgttagatcacaccggggggtgtatgtatataagcggggtgcccggtactggtaaaaccgcaactgtccatgaagtcattaggtgtctgcaacaggcggcccaggccaatgatgtgcccccctttcagtacatcgaggtcaatggcatgaaactgacagaaccacaccaggtgtatgtgcaaatcctccagaaactcacgggccagaaagcaactgccaaccatgcagctgaactcttggccaagcaattttgcacccgcgggagtccacaggagacaaccgtcctgctcgtcgatgagctcgatctgttatggacacataaacaagatataatgtacaatctcttcgattggcccactcacaaagaggcccgactcgtggtcctggctatcgctaatactatggacctgcctgagaggattatgatgaatagagtctctagcaggttgggtctgacaaggatgtgctttcagccctatacttacagccagctacagcagattctgcgaagtagacttaagcatctgaaagccttcgaggatgatgcaatccagttagtggcccggaaggtcgccgcgctgagcggcgatgcgaggagatgcttggacatctgcagacgggcgacggagatttgcgagttttcgcagcaaaagcccgattcacccggcctcgtaacgattgcccactctatggaagcagtggacgagatgttcagttcttcatacatcaccgccattaagaattcgagcgtactagagcagtctttcctccgtgccatccttgctgagttccgtcggtctgggcttgaggaagccacgtttcagcagatatacagccaacatgtcgccctgtgtcgcatggaaggattgccatatcctacaatgtcagagaccatggccgtctgctctcacttaggttcttgtagattgctcctggtcgaacctagtcgaaacgatctgctgctgcgggtgaggttgaacgtgtcccaggatgatgttctgtacgcacttaaggacgagtag

SEQ ID NO: 127402 - DNA, 2586 bp, synthetic construct
  misc_feature 1..2586: note = Description of Artificial Sequence: Synthetic coding sequence
  source 1..2586: mol_type = other DNA
atggctcattaccctacccgcctgaagacccgaaagacttatagttgggtaggtcgccctttattagatagaaagcttcactaccagacctatagagagatgtgtgtcaagaccgaggggtgtagcacagagattcatatacagatcgggcagtttgtcttgatagaaggcgatgacgacgagaatccatatgtagcgaagctactggaattgtttgaggatgattccgaccctccacccaaaaagcgggctcgtgttcaatggtttgttcgcttctgcgaggtacctgcctgtaagagacacttgctaggtaggaagcctggcgcccaagagattttttggtatgattatcctgcctgcgacagcaatatcaacgcagaaacgattattggcctggtcagagtgattcccctcgctccaaaagacgtggtacccacaaatctgaagaacgaaaaaacactctttgtcaagctgagctggaacgaaaagaaatttagacccctgtccagtgaactgtttgccgagcttaataaaccgcaggaaagtgccgctaaatgccagaagcctgtacgcgcgaagagtaagagtgcagagtcaccatcttggacccccgctgagcacgtggctaaaagaattgagtcgcgacacagcgcttctaaatcgaggcagactcctacccacccactgactcctcgggcgcgcaaacgtctggaactgggcaaccttggtaatccacaaatgtcgcagcagacatcctgtgcttccctcgactctcctggaagaatcaaaaggaaggtggccttttctgagattacttcaccatccaaacgctcgcagcctgacaagttacagaccctctctccagctctaaaggcgcctgaaaagaccagggagacaggacttagctatacagaagatgacaaaaaggcttcaccggaacacaggatcatactcagaactcggatcgccgcttcgaagaccatcgacatccgcgaggagcgaaccttgactcctatcagtggggggcagcgctcaagcgtggtgccgtccgtgatattgaaaccagaaaatattaagaaaagagatgctaaggaggcaaaagcccagaatgaggcgacctctacaccccacagaatccgcaggaaaagctctgtcctgacaatgaatcggattcggcagcagcttcgctttcttggaaactcaaagtcagaccaggaagagaaggagattctgcctgctgcagaaatttccgacagcagctcagatgaggaagaggcatctactccccctctcccgaggcgggcaccacggacggtgagtagaaatttgcgaagctctttaaagagcagcctgcacaccctgactaaggtccctaagaagtccttaaagccaaggaccccaaggtgtgcggcccctcagattcgctcccggagcctggccgctcaggagccagcaagcgtgttggaggaggctaggcttcgcctgcatgtgtcggccgtgccggagtcactgccatgtcgagagcaggagttccaggatatctacaattttgtggaaagtaagttgttggaccacacaggcggctgtatgtatatcagtggagtgcctggtacggggaaaactgccaccgtgcacgaagtgatacggtgtctccagcaggccgcacaagcaaacgacgtgcccccctttcagtatattgaggttaacggcatgaaactgaccgagccacaccaggtctatgttcagatactacaaaaactgacgggacagaaagctaccgccaaccacgcagctgaactgctggcgaaacaattttgcactagaggtagtccacaggaaaccaccgtgctgctggtcgatgagctggacctgctctggactcataagcaggatattatgtacaatctgtttgactggccaacacacaaagaggcccgtctggtggtgctcgccatcgcaaacacgatggatctgccagaacgaattatgatgaatagagtgtcaagtcgccttggactgactagaatgtgtttccagccgtatacttactctcagttgcagcagattctgagatccaggctcaagcacttgaaggcatttgaagacgacgccattcagctagtggctcggaaggtggctgctctgtccggcgacgctcggcgctgcctggacatatgtagacgtgcaaccgaaatctgtgagttcagccaacaaaagccggattccccggggctggtaacgatagcccacagtatggaagctgtggatgagatgtttagctctagctacattactgccattaaaaacagctctgtattagaacagtcctttctaagggctatccttgcggaattcaggcgctcagggttggaggaagccactttccaacagatttactctcaacatgtggcactgtgtaggatggaaggcctcccttacccaaccatgtcagaaacgatggccgtctgttcacatctgggaagctgtcgactactgctcgttgagccctcccggaatgatctgctactgcgagtccgactgaacgtctctcaggatgatgtcctttacgcactgaaagatgaatag

SEQ ID NO: 127403 - DNA, 1599 bp, synthetic construct
  misc_feature 1..1599: note = Description of Artificial Sequence: Synthetic coding sequence
  source 1..1599: mol_type = other DNA
atggagaagtctaacgaaacgaacggctatttggatagcgcccaagctggccctgccgccggcccaggagcccccggcaccgctgccggaagggccagacgctgcgcaggattcctgcgaaggcaagccctggtgttacttactgtttctggcgtgttggcaggtgcaggcttgggggccgccctcagaggtctgtcgctctccaggacacaggtcacatacctcgcctttcccggggaaatgttactgcggatgctaagaatgatcattcttcctcttgttgtgtgttcactagtgtctggggcagccagtttggatgcgtcctgtcttgggagactcggtgggattgcagttgcgtacttcggcctcaccacactgagtgcatccgccctcgccgtggccctcgcttttatcatcaagcccggctctggcgctcagaccctgcagagtagcgacctgggattggaggactccggtccgccgccagtgcccaaagaaacagtggactctttccttgacttggcccggaatctttttccatccaatctggtcgttgccgccttccgaacctacgctactgattataaggtggtgacacagaactccagtagcggcaatgtgactcatgaaaagattcccataggcaccgagatcgaaggaatgaatattttaggattggtcctcttcgccctggtgttaggcgtcgccctgaagaagctggggagcgagggggaagacttaataaggttctttaacagcctgaacgaagcaactatggtgctcgtctcatggataatgtggtacgtccccgtaggtatcatgttcctcgtggggtcaaaaatagtagaaatgaaagacatcattgtgttagtgacttcattgggcaaatatatattcgctagtattctagggcatgtcatccatggaggcatcgttcttccattgatctacttcgtcttcacaaggaaaaaccctttccggtttctgctgggccttctcgccccctttgccacagcattcgcaacctgttctagttctgccaccctgccttcaatgatgaagtgtatcgaagaaaacaatggtgttgataagcggatttctcgcttcattctgccgataggggccactgtaaacatggacggcgcagcgatcttccagtgcgtcgcagctgtctttattgcgcaactgaacaatgttgaattgaatgctggacagattttcacgattctggtgaccgccacggcctcatcagtaggcgcagctggagtcccagcaggtggggtcctgacgattgcaatcattcttgaagcaataggcttgccgacccacgacttacccctcatccttgctgttgattggatcgtggaccgtacaaccaccgtggtaaatgtggagggggatgccctaggtgcaggaattctacaccaccttaaccagaaagccaccaagaagggggaacaggagctggcggaagtaaaggtggaggccatccctaactgtaagtctgaagaggagacgtcacctctggtgacccaccagaatccagcgggcccggttgcatccgcccccgagttggaatctaaggagtctgtgctctag

SEQ ID NO: 127404 - DNA, 330 bp, synthetic construct
  misc_feature 1..330: note = Description of Artificial Sequence: Synthetic coding sequence
  source 1..330: mol_type = other DNA
atgagcaagcccgaacttaaggaggacaaaatgctcgaagttcatttcgtcggcgatgatgacgttcttaaccatattctggatcgggaggggggcgcgaagctgaaaaaggaacgggctcagctgctggttaacccaaaaaaaatcataaaaaagcctgagtacgacctggaggaggacgaccaggaagtgctaaaggatcagaactatgtggaaataatggggagagacgtgcaagaatcactcaaaaacggatctgcgacgggcggaggcaataaggtgtactccttccaaaaccggaagcacagcgaaaagatggccaaactgtag

SEQ ID NO: 127405 - DNA, 219 bp, synthetic construct
  misc_feature 1..219: note = Description of Artificial Sequence: Synthetic coding sequence
  source 1..219: mol_type = other DNA
atgagtaaacctgagcttaaggaagacaagatgcttgaggtacacttcgttggcgatgacgatgtattaaaccatatcctcgatagggagggcggcgctaaattgaagaaggagcgagcacagcttctggtgaatcccaagaaaatcattaagaagccagagtatgatctggaggaagacgatcaggaggttctgaaagatcagaactatgttgagtag

SEQ ID NO: 127406 - DNA, 2139 bp, synthetic construct
  misc_feature 1..2139: note = Description of Artificial Sequence: Synthetic coding sequence
  source 1..2139: mol_type = other DNA
atggctacgagtagcatgagcaaaggctgcttcgtgtttaagcctaatagcaagaagagaaaaatcagcctccctatagaggactattttaacaagggaaagaacgaacccgaagattcaaagctgagatttgaaacatatcagctcatctggcagcagatgaaatcggaaaatgagcggctgcaggaagaactgaataagaatctgttcgacaacttgatcgagtttctccagaagtcccactcagggtttcagaagaactctcgagaccttggcgggcagattaaactgagagaaatcccaacagctgcgctggtgctcggcgtcaatgtgacagaccatgatctgacatttgggagtcttacagaggctctccaaaacaatgttactccatacgttgtgagcctgcaggccaaagattgccctgatatgaagcactttctgcagaaactgatctcacagctgatggactgttgtgtcgacattaagtcaaaagaggaagagtctgtgcacgtgacacagcgtaagacccactacagcatggattcactctcatcttggtacatgaccgtgacccagaaaactgaccccaagatgctgtccaaaaagaggacaacctcctcacagtggcagtccccccccgttgtggtcatattgaaggacatggaatcgtttgccacaaaggtgttgcaagactttataattatctcctctcagcacctgcacgaatttcctctcattcttatattcggcatcgcaaccagtccaatcatcatccatcgcctgctcccccatgctgtgagctctctgctgtgtatagagctcttccaaagtctttcttgtaaagagcacctgactactgtgctggacaaactgttgcttacgacccagtttccattcaagatcaacgaaaaagtgctccaggtcctgacgaatatctttctgtaccatgacttctcggtccagaatttcatcaaaggcttgcagctgagcctgctcgagcacttttacagtcagccactctctgtactgtgttgtaatctacccgaggcaaagcggcggatcaacttcctatctaacaaccagtgcgagaatatccggagattgccatctttccggcgttacgtggagaagcaagcttctgagaagcaggtggctcttcttaccaacgagcggtatctaaaggaggagacacaactattgctggagaatcttcatgtgtatcacatgaactattttctggtgcttcgctgtttgcataagtttacctcttccctgccaaaatatcctctgggaaggcagatacgcgagctgtattgtacttgcctcgaaaaaaacatatgggattccgaagagtacgcctccgtgctgcagttactgcgcatgctcgcgaaggacgaactgatgactattctcgagaagtgtttcaaagtgttcaaaagctactgcgagaaccacctcgggagcacggccaaaaggatcgaggagttcttagctcagtttcagtcactcgacgccgaaaccaaggaagaggaagacgcctccggctctcagcctaagggactgcagaagaccgacctgtaccatctgcagaagtcccttctggagatgaaggagctgagaagatccaagaaacagaccaaatttgaagtgctgcgggagaatgttgtcaattttattgattgtctcgtccgggagtatctcctgccaccagagactcagcctctccatgaggtggtttacttctcagcagcccacgccctgcgggaacacctgaatgcggcccccagaatagcgcttcacacggccctgaataacccctactactatctcaagaacgaagcccttaaatccgaagagggctgcatcccaaatatcgcacctgatatctgcattgcgtacaagttgcacctcgagtgttctagactgattaatctagtcgattggagtgaagcttttgcaacggtagttaccgcagcggaaaaaatggatgcaaatagtgccacttctgaagagatgaacgagattatccatgcaagatttattcgggctgtgagcgagctcgagctcctgggcttcattaaacctaccaagcaaaaaacagaccacgtggctagactgacttggggaggttgctag

SEQ ID NO: 127407 - DNA, 2136 bp, synthetic construct
  misc_feature 1..2136: note = Description of Artificial Sequence: Synthetic coding sequence
  source 1..2136: mol_type = other DNA
atggcgacatcttctatgagcaaaggttgcttcgtattcaagcctaacagtaagaagagaaaaatctcccttcctattgaggattattttaacaaaggaaaaaacgaacccgaggattctaaacttaggttcgagacgtaccagcttatttggcagcagatgaaatccgaaaatgaacggctgcaagaagagctgaacaaaaacttgttcgataacctcatcgagtttctgcagaaaagccattccgggtttcagaagaactcccgggaccttggaggtcagattaaattacgagagattcctactgcggctttagtactcggagtgaacgttacagaccatgatcttacgtttggttctcttaccgaagccctccagaataatgttacaccctacgtcgtgtccctgcaggctaaggactgtccagacatgaagcattttctgcagaagctcatatcccagctgatggattgctgcgtcgacattaaaagcaaagaggaagagagtgtgcacgttacgcagaggaagacacattattccatggacagtctttcaagttggtatatgacggtaacccagaaaaccgaccccaagatgttgtccaagaagcgtacaacatcaagccaatggcagtcaccccctgttgtagtcattttgaaagacatggagagcttcgccaccaaggttttacaggactttataatcatctcgtcccagcaccttcacgaattcccactgatattaatcttcgggatcgccaccagccccatcatcatccatcgcttgctgccccatgcagtttcctctctgctgtgcattgaactgttccaaagcctttcttgcaaggagcatctgacaactgtcctggataaactcttactgactacacagtttccctttaagatcaatgagaaggtcttacaggtgttgacaaatatttttctgtatcatgactttagcgtgcagaactttatcaaagggctccagttgtctctcctcgaacatttttacagccagcccctgtctgttttgtgctgtaatctcccagaagctaaacggcgtatcaacttcttatccaataaccagtgcgaaaacattcgaaggcttcccagcttccgcagatatgtagagaaacaggcctccgagaagcaggtggcattactgacgaatgagcggtacctgaaggaggagacacagttgctgttggaaaacctgcatgtttaccacatgaactactttctggtgctccgctgtctgcacaagtttacgtcaagccttcctaaatatcctcttggcaggcagatcagggaactgtattgtacctgtctagagaagaacatctgggatagcgaggagtatgcttcagtccttcagctgttacgaatgctcgccaaagatgaactgatgactattctcgaaaagtgtttcaaagtgttcaagtcatactgtgagaatcatctcggcagcacggctaaacgcatcgaagaatttctggctcagtttcagtctttggacgagaccaaggaggaggaggacgcttctgggtcacagccaaaaggcctgcaaaagactgatttatatcaccttcagaagtccttgttagagatgaaggagcttaggaggtcaaaaaagcagacaaagttcgaggtgctgcgtgagaacgtggtgaactttattgattgtcttgtccgagagtatttgttgccacctgagacccaacctctgcatgaggtcgtgtacttttccgccgcacatgccctccgggagcacctgaacgcggctcctcgcattgctttacataccgccttaaataacccttactactacctgaagaatgaagctctgaaatcagaagaggggtgtattcctaacattgcacccgacatttgtatcgcctacaagctgcacctggagtgtagccgcctgatcaatctggtggattggtctgaggcatttgcaacggtggtcactgcagccgagaagatggacgcaaactcagcgacctctgaggagatgaatgaaattattcatgcccgctttatcagagcggtatcagagcttgagcttttgggctttattaagcccaccaagcagaagaccgaccacgtggcacggctcacatggggcggttgctag

SEQ ID NO: 127408 - DNA, 1335 bp, synthetic construct
  misc_feature 1..1335: note = Description of Artificial Sequence: Synthetic coding sequence
  source 1..1335: mol_type = other DNA
atgaagtctgagaacgagaggcttcaagaggagcttaacaaaaacttgtttgataacctgatagagtttctgcaaaaatcacacagtggcttccagaagaactcccgcgaccttggaggccagatcaagctgagggagattcctactgcagcacttgtgctgggcgtgaacgtaactgatcatgacctgacctttggatcactgacagaagcgttacagaataatgttaccccctacgttgtctcacttcaggccaaggactgtccggatatgaaacatttcttacagaaactgatcagccagcttatggactgctgtgtcgatattaaatccaaagaggaagaatccgtgcatgtgacacagagaaaaactcactacagcatggattccctgagctcttggtacatgactgtgacacagaagaccgacccaaagatgctctcaaaaaagaggactacatcttcccagtggcagtccccacccgtggttgtgatcctcaaggacatggagtcatttgccaccaaggttctgcaggactttataattatctcaagccagcatctgcatgagtttccgctcatcctaatctttggaattgctacatcgcctatcattatccaccgtctactgccccacgctgtttccagcctcctgtgcattgagctgtttcagtccctaagctgcaaggagcatttgacaactgtgctagacaagttactccttactacccaattccccttcaaaattaacgagaaagtcctacaggtcctaacgaacatctttctttatcacgatttctctgttcagaacttcattaagggcctgcaactctctctactagagcatttttattcacagccactgagcgtgttgtgctgtaacctgccagaggccaagcgcaggatcaactttctcagcaacaatcagtgcgagaatatacgaagactccctagcttcaggagatacgtggagaaacaggccagcgagaaacaggttgcactgctgacaaacgaacgctatctaaaggaggaaactcaactgctcctcgagaaccttcacgtctaccatatgaattacttcctggtgttgcggtgcctgcataaattcacctcttccctgcccaaataccccctcggtaggcaaattcgagagttgtattgcacatgtctggaaaaaaatatatgggacagcgaggaatatgcatctgtgctccagctactgaggctcgggcttgcctttttggacatccagctgttcggtgctcagtctgggcaagaactactgctgcccctatcctgggaggccaacccttctcacgccgctaatctgggatag

SEQ ID NO: 127409 - DNA, 1707 bp, synthetic construct
  misc_feature 1..1707: note = Description of Artificial Sequence: Synthetic coding sequence
  source 1..1707: mol_type = other DNA
atgaagcacttcctacaaaagctgatctcccagctgatggactgttgcgtggatatcaagagcaaggaggaggaaagtgtccacgtcacgcagcggaagactcattatagcatggactctctgtcaagctggtatatgactgtcacccaaaagaccgatccaaaaatgttgtctaagaaacggacaaccagcagccaatggcaatcacctccagtggtagtgatcctcaaagatatggagtctttcgccacaaaagttctgcaagacttcattattatttcttctcagcaccttcacgaattccctttgattctgatcttcgggatagccacatccccaattatcatacataggctattaccccatgcagtgagttcattattatgcattgagctgttccagtccctgtcttgtaaggaacatctaactacagtgctggacaagctcctgcttacaacccagttcccctttaagattaatgagaaagtgctccaagtgttaactaacattttcctgtatcatgacttttccgtgcagaactttattaaaggccttcagttgtctctgctggaacatttctattcccagcccctcagcgtcctgtgttgcaatttgcctgaggcaaagcgcaggatcaatttcctgagcaataaccagtgtgagaacattagacggctgccttcattccgcaggtatgtggaaaagcaggcatccgaaaaacaagtggccctgctcaccaacgaacggtacctaaaagaagagacacagctgctgctcgaaaacctgcatgtctatcacatgaactattttctggttcttaggtgcctgcataaattcacctcctcgctcccaaagtatccgctgggccgccaaatccgtgagctatattgcacttgccttgagaagaacatatgggacagtgaggaatatgcaagcgtgctgcaactgctccggatgctcgcaaaggacgagcttatgacaatcctggagaaatgcttcaaggtctttaaatcttactgcgagaaccatctaggctccacagcaaagaggatcgaggagttcttagctcagtttcagtcacttgatgaaactaaggaagaggaggatgcctccggcagccagcctaagggcctgcagaaaacagatctataccacctgcagaagtctttactggagatgaaagagttgcgacgatcgaaaaaacagaccaaatttgaggtactccgcgaaaacgtggtgaatttcatcgactgtttggttagggagtacctgcttccacctgagactcagcccctccatgaggtggtttacttcagcgcagcgcacgcactgcgcgagcacctaaacgcggcccctcggattgcactgcatacagccctcaataacccttactattatctcaaaaatgaggccctcaaatccgaggagggttgtatacctaacatcgcccctgatatctgtatcgcatacaagctacacctggagtgttcacggctgataaacctggtcgactggagcgaagctttcgccactgtcgtgactgctgccgagaaaatggacgccaacagcgccacctcagaggaaatgaatgaaatcattcacgctcgttttatcagggctgtgagtgaacttgagctgctggggtttatcaaacccaccaagcaaaaaactgaccacgttgcgaggctcacctggggcggctgttag

SEQ ID NO: 127410 - DNA, 1311 bp, synthetic construct
  misc_feature 1..1311: note = Description of Artificial Sequence: Synthetic coding sequence
  source 1..1311: mol_type = other DNA
atgtcctccagaaagagcaagtccaatagcctaattcacactgagtgtttatcacaggtccaacggatcctgagggaaaggttctgcagacagtctcctcattcaaacctttttggcgttcaggtccagtataaacatttgtccgagctgttgaaacgtaccgcactacatggagaaagcaacagcgtgttgatcatcggaccccggggaagcggcaagaccatgctgatcaaccatgccctgaaggaattgatggaaatagaggaggtttctgaaaatgtgctgcaagtgcatcttaacggcctcttacaaatcaatgacaaaattgctctgaaagaaataacccggcagttgaatctggagaacgtcgtgggtgacaaagttttcgggtcgttcgccgagaatctgtccttcctcctagaggccttaaagaagggagatcgcacgtctagctgccccgtgatctttattctggacgagtttgacttgtttgcccaccacaagaatcagacactcctgtacaacctatttgatatttcccagagtgcccagacaccaatcgcagtcatcggcttgacttgccgactggatatcttggagctcctggagaaaagagtgaaatcaaggttctcccaccgccagatacatcttatgaactcctttgggtttccacagtatgtgaaaattttcaaagaacaactgagtctccctgcagagttccctgataaagtgttcgccgaaaagtggaatgaaaatgtccaatatctttctgaggaccggagtgtgcaagaagtgcttcaaaagcacttcaacatttccaagaatctgcggagtctgcacatgctcctcatgctcgcattaaacagggtgaccgccagtcacccattcatgacagcagtggaccttatggaggccagccagctctgctctatggacagtaaggccaacattgtgcacggactgtcggtactggagatctgtttgataattgccatgaaacatttaaacgatatatacgaggaggagcctttcaattttcagatggtttacaacgagttccaaaaatttgtgcagagaaaagcacattccgtctacaattttgagaaacccgtggttatgaaggccttcgagcacctgcagcagctggaactcattaagcccatggagcgtacatcgggcaatagccagagagaatatcaactgatgaagcttttgctcgacaatacccagattatgaacgccctgcaaaaataccctaattgtcctacggatgtccgccagtgggctacatcttccttatcttggttgtag

SEQ ID NO: 127411 - DNA, 1311 bp, synthetic construct
  misc_feature 1..1311: note = Description of Artificial Sequence: Synthetic coding sequence
  source 1..1311: mol_type = other DNA
atgtcatctaggaaatctaaatctaattccctgattcacacagagtgtctctcgcaggtgcaacggattctccgtgaaagattttgtagacaatctcctcatagcaacctgtttggagtccaagttcagtacaaacatctgtctgagctgttgaaacggaccgctctgcatggagagtcaaactccgttctcattattgggccccgcggttctggcaaaaccatgctgattaaccatgctctcaaggaactcatggagatcgaggaggtctctgagaacgtgctgcaggtgcacctgaatggcctcctgcagattaatgataagatcgccctgaaggagatcacccgtcaactcaacctggagaacgttgtaggagacaaggttttcggctcctttgctgaaaacctaagctttctcctggaggcactgaagaagggcgatcgcactagctcatgcccagtcatctttattctagacgagtttgaccttttcgcccatcataaaaatcagactctactgtacaatttatttgatatcagccagtccgcccagacacctatcgccgtcattgggctgacctgtaggctcgacattcttgagctgctcgaaaagagggtgaagtcccggtttagccaccggcagatccatttgatgaactctttcgggtttccgcagtatgtgaagatattcaaagaacaactttctcttccagcagagttccccgacaaggtctttgcggagaaatggaatgaaaacgtacagtacttgtcagaggacaggagtgtccaagaagtactgcagaagcatttcaacatatccaagaacctgcgctccctccacatgctgctgatgctagcactgaacagggtaaccgcatcccatcctttcatgacggcagtggaccttatggaagcaagccagctctgctctatggatagtaaggctaatatcgtgcacggcctgtcggtgttggaaatctgcctgatcattgccatgaagcatctcaatgatatatacgaggaggaacccttcaactttcagatggtctataatgaattccaaaaattcgtccagagaaaggctcactcagtttacaactttgagaagcctgtggtgatgaaggccttcgagcatcttcagcaactagaattaataaagcctatggagaggacctctggtaattctcaacgggaatatcagcttatgaagctgttattggataacacacaaattatgaatgccttgcagaagtacccgaattgccccactgacgtgcggcaatgggctacctcatccctgtcttggctttag

SEQ ID NO: 127412 - DNA, 1311 bp, synthetic construct
  misc_feature 1..1311: note = Description of Artificial Sequence: Synthetic coding sequence
  source 1..1311: mol_type = other DNA
atgagttctagaaagtccaaaagcaactcactcatccacaccgagtgtctttctcaggtgcaaaggatcctccgcgaacgcttctgcaggcagtcccctcactccaatttgttcggcgtccaggtccagtataaacacctatccgagcttctgaaacgtacggctcttcatggcgagtccaattcggtcctcatcatcgggcctaggggttcaggaaagactatgttaatcaaccacgccttgaaagaactgatggaaatcgaagaggttagcgagaatgtgctgcaggtgcatctgaatggactgcttcagattaatgacaagatcgcccttaaggaaataacgagacagttgaacctggaaaacgtcgtgggagacaaagtcttcggatcttttgctgaaaacctctcattccttctcgaggctctgaagaagggcgacaggacctcatcctgtccagtcatctttatcttagatgaatttgaccttttcgcccaccataaaaaccagaccctgctgtacaacctttttgacatttctcagtccgcacagactcccatcgcggtaatcgggctgacttgccgactcgatatcctggaacttctggagaagcgcgtcaaatcaaggttctcccacaggcagatccatctgatgaactcattcggttttccccagtacgtgaagatctttaaggaacagctgtctctgcctgctgaatttcctgacaaggtattcgctgagaaatggaatgagaatgtgcaatacctgtcagaggaccgctcagtccaggaggtgctccaaaaacattttaatataagtaaaaaccttcggtccctccatatgctgcttatgctggccttgaacagggttactgcttcacaccccttcatgacagccgtggacctcatggaggcaagccagctttgttctatggatagtaaagccaatattgttcatggtttaagcgtgctagagatctgcctcatcattgccatgaaacatctgaacgatatctacgaggaagaaccatttaactttcaaatggtctacaatgaattccagaagtttgttcagcgcaaggcacactctgtatataatttcgaaaaaccagtggtaatgaaggcctttgaacacctacaacagctggaactaataaagcccatggaaaggacttcgggtaactcacagagagaatatcagctcatgaaactgctgttggataatacacaaattatgaacgctctccagaaatacccaaattgtcccaccgacgtcagacaatgggcaacaagcagcctgtcgtggctctag

SEQ ID NO: 127413 - DNA, 438 bp, synthetic construct
  misc_feature 1..438: note = Description of Artificial Sequence: Synthetic coding sequence
  source 1..438: mol_type = other DNA
atgagttcacgcaaatcaaaatctaactcacttattcacacggaatgtctctcccaggtgcaacggatcctccgggagagattctgtcggcagagccctcactccaatctgtttggggtgcaagttcaatacaagcatctgagtgagttgcttaaacggacggccctccacggggagtcgaactctgtgttgatcatcggcccacggggttctggaaaaacaatgttgatcaatcacgccctgaaagagctgatggaaattgaagaggtctcagaaaacgtccttcaggtgcatctaaatgggctcctccagatcaacgacaaaattgcactcaaggagatcactcggcagctcaatttggaaaatgtcgtgggtgacaaagttttcggctcttttgccgaaaacctgagctttttactagaggccttgaagaagtag

SEQ ID NO: 127414 - DNA, 384 bp, synthetic construct
  misc_feature 1..384: note = Description of Artificial Sequence: Synthetic coding sequence
  source 1..384: mol_type = other DNA
atgtcttcccggaagtcaaagtccaattccctgatacatacggagtgcctgtcacaggtgcagcggatcctacgagagagattttgtcgtcagtctccacacagcaacctgttcggcgtgcaagtacagtataaacacctcagcgaacttctgaaacggactgcactgcacggcgaatccaattcggtgttaatcataggacctaggggatctgggaaaaccatgcttatcaatcacgctctgaaagaactgatggagatagaggaggtcagtgagaatgttctccaggtgcatctaaacggcctgttgcagataaacgataaaatagcactcaaggaaatcaccagacaactcaaccttgaaaacgtcgtcggggacaaatag

SEQ ID NO: 127415 - DNA, 387 bp, synthetic construct
  misc_feature 1..387: note = Description of Artificial Sequence: Synthetic coding sequence
  source 1..387: mol_type = other DNA
atgagttcccgcaagtctaagtctaatagcctgatacacacggaatgcctgtcccaggtgcagaggattctgcgagaacgattctgcagacaatccccacattctaacctcttcggtgtccaagtccagtataaacacttgtcagaacttctcaagagaaccgccttgcatggtgagtccaactccgtgcttatcatcggcccaagggggtcagggaagacaatgctcattaaccacgccctgaaggagctgatggagatagaggaggtgtcagagaacgtgcttcaagtgcatcttaacggcttgctacaaatcaacgacaagattgcattgaaagagatcacccggcagctgaatctggagaatgtggtaggcgataaagtgtag

SEQ ID NO: 127416 - DNA, 1311 bp, synthetic construct
  misc_feature 1..1311: note = Description of Artificial Sequence: Synthetic coding sequence
  source 1..1311: mol_type = other DNA
atgtcatcccgaaagagtaagagcaatagtcttatccataccgagtgtttgagtcaggtccaaagaatccttcgagagagattttgtcgacagagcccacatagcaatctgttcggagtgcaagtgcagtacaaacatctgagtgagttactcaaacgtacagccctccacggcgaatcaaattccgtcctgattataggtcctagaggcagcggtaagaccatgctcataaatcatgccctgaaagagctcatggaaattgaggaagtgtcagagaacgtgctgcaagttcacctgaacggtctgctgcagattaacgacaagatcgctctcaaggagattactagacagctcaacctcgagaacgtcgttggcgataaagttttcggatcctttgccgagaatctgtcgttcctgcttgaagcactgaagaaaggggatcggacctcctcgtgcccagtgatctttatcttagatgagttcgacctctttgcccaccacaaaaaccagacgctcctgtacaacctgttcgacattagccagtccgcacagacacccatcgctgtgatcgggctcacttgccgcttggacattctggagctgttagaaaaaagagtgaagtcacgcttttcgcaccgccagatccacctcatgaacagcttcgggttcccacagtacgtgaagatttttaaggagcaactgtcgcttcccgctgagttccctgacaaggtattcgccgagaaatggaacgaaaacgtccagtatttgtcggaggacaggtcagttcaggaagtgctccaaaaacattttaatatctcaaaaaacttacgctctttgcatatgttgctaatgctcgccctgaaccgtgttaccgcctcacacccatttatgacggctgtcgatctgatggaggctagtcagctgtgtagcatggacagtaaggcgaacatcgtacacgggctgtccgttttggagatttgtcttatcatcgccatgaaacacctgaatgacatctatgaggaggagcctttcaacttccagatggtttacaacgaatttcaaaaatttgtccagcgcaaagcccattctgtatacaattttgaaaaacccgtagtgatgaaagccttcgagcacctgcaacagttagaattgatcaaacccatggagcgtacttccggtaactcacagagggaataccagttaatgaaactgttattggataacacgcaaattatgaacgcgcttcagaagtacccaaactgtcccactgacgtccgtcagtgggctacttccagcctgagctggttatag

SEQ ID NO: 127417 - DNA, 1059 bp, synthetic construct
  misc_feature 1..1059: note = Description of Artificial Sequence: Synthetic coding sequence
  source 1..1059: mol_type = other DNA
atggaaatcgaggaggtctcagaaaacgttctccaggtgcacctgaatggtttacttcagatcaacgacaaaattgcgctcaaggaaatcacacggcagctgaatctcgagaacgtagttggggataaggttttcggaagtttcgctgagaacctgtcttttttactcgaagccctcaaaaagggcgataggacctctagctgccccgtgattttcatccttgatgagtttgatctgttcgcccatcacaagaaccaaacgctgctctacaatttgtttgatatttcccagagtgcgcagactcccattgcagtcatcggtcttacatgccgcctggacatcctggaattactggaaaaaagggtcaagtcacggtttagtcaccgacagatccacttgatgaacagcttcgggttcccccagtacgttaagatctttaaggaacagcttagcctgcccgcagagttccccgacaaggtttttgcagagaagtggaacgagaacgtgcagtatctttcagaagatagatcagtgcaggaggtgctgcagaagcactttaacatttccaagaatctgcgatccctacacatgctgctcatgctagccctcaaccgcgtgaccgcatcacatccctttatgacagctgtggacctgatggaggcatcgcagctgtgctctatggactcaaaggccaatatcgtgcatggcctgagcgtccttgagatctgtcttatcatcgccatgaagcatctcaacgacatttacgaggaagagccattcaattttcaaatggtgtacaacgagttccagaagttcgtgcagcgtaaggcccattccgtctacaatttcgaaaaaccggtggtgatgaaggccttcgagcacctgcagcaattagagctgatcaaaccgatggagaggacctccgggaattcccagagagaatatcagctgatgaaactgctgttggacaatacccaaattatgaacgcgctccagaaatatcccaattgccccacggatgtgaggcagtgggctacgagttcactgagctggctgtag

SEQ ID NO: 127418 - DNA, 1089 bp, synthetic construct
  misc_feature 1..1089: note = Description of Artificial Sequence: Synthetic coding sequence
  source 1..1089: mol_type = other DNA
atgctgattaatcatgccctaaaggagctgatggaaatagaagaagtctccgagaatgtgctacaggtgcacttaaatggcttgctccagattaacgacaaaatcgctctgaaagaaatcactagacagctgaacctggaaaacgtggtgggggataaagtctttggtagttttgctgagaatctgagcttccttctcgaggccctcaaaaagggcgataggaccagcagctgcccagtgatattcatcctggacgaattcgacctttttgcccaccataagaatcagacactgctgtacaacttgttcgatatttctcaatccgcacagacccccatcgccgtgattggtctgacatgtcggttggatatcttggaactgttggagaagcgggttaaatcccgcttctcacacagacagatccacctgatgaattctttcggtttcccacaatacgtgaagattttcaaagagcagctgagtctgccagctgaattccctgataaagtcttcgcagaaaaatggaatgagaatgtccaatatctttctgaggatcgatctgtgcaggaggtgcttcagaagcattttaacatctctaaaaatttgagatctctgcatatgctacttatgctagcactcaacagagtgaccgcctcccatcctttcatgacagccgtggatctgatggaagctagtcaactgtgtagtatggattctaaagccaacattgtgcacgggctgagcgtgctggaaatctgcctgatcattgctatgaagcatctgaacgatatctatgaggaagaaccattcaactttcagatggtgtacaatgaatttcagaagttcgtgcagagaaaagctcattcagtttacaactttgagaaacccgttgtcatgaaggctttcgagcacctgcagcagttggagcttatcaagcccatggagcgaacctccggcaacagccagcgggagtaccagctcatgaaactgctcctggataatactcagatcatgaacgcacttcagaaatacccaaactgtccgaccgacgtgagacaatgggcgacatcaagcctgtcctggttgtag

SEQ ID NO: 127419 - DNA, 660 bp, synthetic construct
  misc_feature 1..660: note = Description of Artificial Sequence: Synthetic coding sequence
  source 1..660: mol_type = other DNA
atgaacagcttcgggttcccccaatatgtcaaaatcttcaaagaacaactgagccttccagccgaattccctgataaggtgtttgccgagaaatggaacgagaatgtgcaatatctcagtgaagaccgctctgttcaggaagttctgcagaaacactttaacatctccaaaaatcttaggtccttgcacatgctgctgatgctggccttgaatcgcgtgaccgctagtcatccattcatgactgctgtcgatctgatggaagcatctcagctctgctccatggacagtaaagctaacatagtgcacggcctttcagtcctggagatctgcctgataattgctatgaaacaccttaacgatatctatgaagaagagcctttcaattttcagatggtgtacaacgagttccaaaagttcgtgcagagaaaggcccattcagtatacaactttgagaagcctgtggtgatgaaggccttcgagcacctgcagcagcttgagttgataaaacctatggaacggaccagtgggaactcccaacgagaatatcagctgatgaagctcctcctggataacacccagataatgaacgcactgcagaagtatcctaattgcccaactgatgtgcgtcagtgggcaactagttcattatcatggttgtag

SEQ ID NO: 127420 - DNA, 1308 bp, synthetic construct
  misc_feature 1..1308: note = Description of Artificial Sequence: Synthetic coding sequence
  source 1..1308: mol_type = other DNA
atgccccatctcgaaaacgtggtgctctgcagggaaagccaggtgagcatcctccagagcttatttggcgaaagacatcacttctcctttccaagcatcttcatttacggccacacagccagcggcaaaacctatgtcacccagaccctcctgaaaaccctcgagcttccgcatgtgttcgtgaactgtgtcgagtgttttactcttcgtctactgctcgagcagatcctgaataagttaaatcatttgtctagcagtgaggacggctgctctactgagattacatgtgaaacctttaatgattttgtgcggctctttaagcaggtcacaaccgcggagaatttaaaggaccagaccgtgtacatcgtgctggacaaggctgagtatctgagagatatggaagcaaacctgctgccagggtttctgcggctgcaggagctggcagaccgaaacgtgactgtcctgtttctcagcgaaatcgtatgggagaaatttaggcctaacacaggatgctttgagccgtttgtcctctacttcccagactactcaatcggaaatctgcagaagatcctgagtcacgaccacccaccagagtacagcgcagacttctacgccgcttacatcaacattctgcttggcgtcttttacaccgtgtgccgcgatctgaaggagcttaggcatcttgcggtgctcaactttccgaaatattgtgaacctgtggttaaaggagaggcgtcagaaagagatacaaggaaactctggcgaaatattgaaccacacctgaaaaaggctatgcagactgtgtatttgcgggaaatctcttcctctcagtgggagaaactccagaaggacgataccgacccaggccagctgaaaggactctccgcgcacacacacgttgagctgccttactatagcaaatttatattgattgccgcctatctggcctcttataaccctgccagaacagacaagcgtttctttctgaagcaccacggcaaaatcaagaagaccaacttcttaaagaagcacgagaagacttctaatcacctcctagggcccaagccctttccattagatagacttctggccattttgtattctatcgtggactcccgcgtggcaccaaccgcgaacatctttagtcaaatcacctctctggtaactctgcagctgctgacactggtcgggcacgacgaccagttggatgggcccaagtataagtgtaccgtgtccctcgattttatccgcgccatagctcggactgtgaactttgacatcattaaatatctgtatgactttctgtag

SEQ ID NO: 127421 - DNA, 975 bp, synthetic construct
  misc_feature 1..975: note = Description of Artificial Sequence: Synthetic coding sequence
  source 1..975: mol_type = other DNA
atgccacatctggagaacgtggtgctctgcagagaaagccaggtaagcatcctccagtccctctttggcgagcgacatcattttagctttcctagcatttttatctacgggcacacagcctccggaaaaacctatgtcacgcagacattgctgaagacactcgaactgccccatgttttcgttaactgtgtggaatgcttcactctcagacttctgctcgagcagatcctgaacaagctgaatcacttgtcatcttcagaagacggttgcagtaccgagatcacctgcgagacattcaatgatttcgttcgacttttcaagcaagttaccacagcagaaaacttgaaggaccagactgtgtacatcgtgctagacaaagctgagtacctccgagacatggaggcgaatctgttacccggattcctccgcctgcaggaactggccgacagaaacgtgaccgttttgttcttgtctgaaattgtgtgggagaagtttaggcccaacacgggctgttttgagccctttgtgctgtacttcccggattactctatcggcaacctgcaaaaaattttatcacacgatcacccccctgagtactctgccgatttctacgccgcctacattaatatcctgctgggggtgttctatacagtatgccgggatttgaaagagttgcgacatctggctgttttgaactttcccaaatattgcgaaccggtggttaaaggcgaggccagtgagcgggacacaagaaagctgtggaggaacatagaaccccacctgaaaaaggcaatgcaaaccgtgtaccttagggaaatctccagtagccaatgggagaagctgcagaaagatgatacagatcccggccagctaaaaggaattcgtggcagtatcgaaaccgtcaccggcgacactagctccgctaattatcaggatacaaaggtgaataccaaggaacactcagtcagaaagtag

SEQ ID NO: 127422 - DNA, 912 bp, synthetic construct
  misc_feature 1..912: note = Description of Artificial Sequence: Synthetic coding sequence
  source 1..912: mol_type = other DNA
atggaagctaatctcctccccggtttcctcaggctacaagaactggctgaccgaaacgtgaccgttttattcctctcagagatcgtctgggaaaaattcaggccaaataccggatgtttcgagccgttcgtactgtacttccccgactactctatcggcaatctgcagaaaatcttgtcccatgaccatccccctgaatattcagccgacttttacgctgcatacatcaacattctattgggtgtattctatacggtgtgtcgggatctgaaggaactccgccatctggcagtactgaatttccctaagtactgtgaacccgtggtgaagggcgaggcatctgaacgcgacacacggaagttatggcgcaacattgagccgcatctaaaaaaggctatgcagactgtgtacctccgagaaatctcgtcgtcccagtgggagaagctgcagaaggacgacactgaccctgggcaactgaaagggttaagcgctcacactcacgtggaactgccctattactcaaaatttatcttaattgcagcctacctggcctcctacaaccctgctcggacagacaagcgcttcttcctgaagcatcacggcaaaataaaaaaaacaaacttcctgaagaagcatgagaaaactagcaaccatttgctcggccctaagccctttcctttagatagactgttggccatcttgtatagtatcgtggattctagggtggcacccacagcaaatatcttctcacaaatcacctccctcgttactctgcagttactcactctcgtgggacacgacgatcagctggatggacccaaatataagtgcacagtgtccctcgatttcatccgggccatcgcgcgaactgtgaacttcgacataataaaatatctctacgacttcctgtag

SEQ ID NO: 127423 - DNA, 1665 bp, synthetic construct
  misc_feature 1..1665: note = Description of Artificial Sequence: Synthetic coding sequence
  source 1..1665: mol_type = other DNA
atgtctgctgacggcggtgggatccaagacacacaggacaaggagaccccacctgaagttcctgaccgagggcatccccatcaggagatgccctctaaactgggcgaagcggtcccatccggtgacacacaagagagcctccacattaagatggaacccgaagaaccccatagcgagggagcatcacaagaggatggtgcacaaggagcttggggatgggccccactttcccacggttccaaggaaaaggcactgttccttcctgggggagctctgccgagcccccgaatccccgttctgtcccgggagggaaggacccgcgatcggcagatggccgcggcattattgacagcttggagtcagatgcccgtgacgtttgaggatgtggccctctatctatccagggaagagtggggcagactggatcacactcagcagaacttctatcgcgatgtattgcaaaagaagaacggactttccctgggctttcccttctctaggcctttctgggccccgcaggctcacggcaaaggagaggcgagcggaagcagtagacaggctggggacgagaaggagtggcgcggagcgtgcacaggcgccgtcgaggtcggccagagagttcagacctcatcggtggcagctctcggcaacgtgaagccctttcggacacgggccggccgggttcaatggggggtgcctcagtgcgcccaggaagctgcgtgcggacgctcaagcggccccgccaaggactccggccaacccgccgagcccgacaggaccccggacgcggctccgccagatccctcccccacagaaccccaagaatatcgagtgcctgaaaagcccaatgaagaggaaaagggggcgcccgagagtggcgaagaggggcttgccccagactctgaggtaggcaggaaatcttatcgctgtgaacagtgtggcaagggattttcttggcactcccacctggtaactcataggagaacccacacaggggagaaaccttatgcttgcactgactgcggcaagcgattcggaagatcatcccacctcatccagcatcaaatcatccacacgggtgagaagccatacacttgcccagcatgccgcaagagcttcagtcaccacagtacactgatccagcaccagcgcatccacaccggagagaagccatacgtgtgcgaccgctgcgcaaaacgcttcacaaggagaagtgacctggtgacacatcagggcactcataccggggccaagccccacaagtgtccaatatgcgcaaagtgttttacacagtctagcgcactagtgacacatcagcgcacgcacacaggggtgaagccttatccatgccccgagtgcggaaagtgtttttcccaaagatcgaatctgatcgcacacaatcggacccatactggcgagaagccctatcattgcctggattgtggtaagtctttcagtcatagtagtcaccttacagcccaccagaggacgcacagaggcgtgagaccatatgcctgtcctctctgcgggaagagcttcagccgaagatccaacctacaccgccatgagaaaatccacacgacaggcccgaaagccctggcgatgctgatgctcggggctgcagccgccggcgcccttgcgaccccacccccagccccaacctag

SEQ ID NO: 127424 - DNA, 462 bp, synthetic construct
  misc_feature 1..462: note = Description of Artificial Sequence: Synthetic coding sequence
  source 1..462: mol_type = other DNA
atgaatgtgggcgtggctcacagtgaagtcaatccaaatacgagggtgatgaacagccggggcatgtggttgacctatgcactgggcgtgggtctgctccacatagtgctgcttagcataccattcttctctgtaccagtcgcgtggaccctgactaacattattcacaacctggggatgtacgtgttcctgcacgccgtgaaagggacgcccttcgaaaccccggaccaggggaaagcaagacttctgacacactgggaacagctcgactatggcgtacagttcacaagttccaggaagtttttcaccatctctccaatcatactttatttcttggcctcgttttataccaagtatgatccgacgcattttatactgaacactgcatccttgctctcagtgttaattcctaaaatgcctcagctgcatggcgtgcgaatttttggtatcaataagtactag

SEQ ID NO: 127425 - DNA, 462 bp, synthetic construct
  misc_feature 1..462: note = Description of Artificial Sequence: Synthetic coding sequence
  source 1..462: mol_type = other DNA
atgaatgtcggagtggcccattctgaggtgaaccccaacacccgcgtgatgaatagtcgcgggatgtggctcacatacgccctgggagtcggcctcctgcatatcgtcctcttaagtattcctttttttagtgtgccagtcgcttggactcttactaacatcattcataacttgggaatgtatgttttcttgcatgctgtgaaggggactccatttgagactcccgatcaaggaaaagcccgactgctgacccactgggaacagttggattatggcgttcagttcacgtccagcaggaaattttttactataagccccatcatcctgtatttcctggccagcttttataccaaatacgatcccactcactttatccttaacactgcctccctcctgtctgttcttattccaaagatgccacagcttcacggcgttagaattttcggcatcaataaatactag

SEQ ID NO: 127426 - DNA, 462 bp, synthetic construct
  misc_feature 1..462: note = Description of Artificial Sequence: Synthetic coding sequence
  source 1..462: mol_type = other DNA
atgaacgtaggcgtggctcattcagaggtcaaccccaacactcgtgtgatgaatagtcgcggcatgtggttgacatacgctctaggagtgggtctactgcacatagtcctgcttagcattccgttcttctcagttcccgtcgcatggacgcttaccaacatcatccacaacctgggcatgtatgtgttcttacatgctgtgaaagggacccctttcgagaccccagaccagggcaaagctagactgctgacacattgggagcagctggactacggggtccagtttacatcttctagaaaattcttcactatatcccctataattctttacttcctcgcaagcttttacacgaaatatgaccctacccactttatcttgaataccgcatctctcctgagcgtgctcatcccaaagatgccccagcttcacggagtccgaatcttcggtattaacaagtattag

SEQ ID NO: 127427 - DNA, 330 bp, synthetic construct
  misc_feature 1..330: note = Description of Artificial Sequence: Synthetic coding sequence
  source 1..330: mol_type = other DNA
atgaatgtgggagtagcgcatagcgaagtcaatcccaacacgagagttatgaattcccggggcatgtggttaacatatgcactcggtgtggggctgctccacatcgtgctgcttagcattccttttttctcagttcccgtagcttggacgctgaccaatatcatccataatctggggatgtacgtgtttttacatgccgtgaagggtacaccgtttgagacacccgatcagggaaaagcacgtctcctcacacactgggaacagttagattatggtgtgcaatttacttcatcccgaaaattctttacaatttcgcctattatcctttag

SEQ ID NO: 127428 - DNA, 330 bp, synthetic construct
  misc_feature 1..330: note = Description of Artificial Sequence: Synthetic coding sequence
  source 1..330: mol_type = other DNA
atgaacgtgggcgtggcccattccgaggtaaacccgaacaccagagtgatgaacagtagaggcatgtggttgacatatgccctgggagtcggattgttacacatagtgctactttcaatcccctttttttctgtacctgtggcctggacgctgacgaacatcatacataatctggggatgtacgtcttcctgcatgctgtgaagggcacaccttttgagacacccgaccaggggaaagcccgtcttctcactcattgggaacagctggattatggggtgcaattcactagctcccgtaagttcttcacaatcagtccaataattctgtag

SEQ ID NO: 127429 - DNA, 462 bp, synthetic construct
  misc_feature 1..462: note = Description of Artificial Sequence: Synthetic coding sequence
  source 1..462: mol_type = other DNA
atgaatgtgggggtggcacattccgaggtgaatcctaacacgagagtgatgaacagccgtggtatatggctagcatatattatcctggtcggactcctgcacatggttctactctctatcccctttttctcaatcccagtcgtgtggaccctcaccaacgtcatacacaatcttgccacatacgtgtttttgcacaccgtcaaaggaacaccatttgagacccccgatcaaggcaaagcccggcttctgactcactgggagcaaatggattacggactacagttcacgtcctcacgcaaattccttagcatatcgccaatcgtcttatacctcctggccagtttctataccaaatacgacgcagcacattttttgatcaacacagccagcctgctgagcgtgctgctgccaaagctgccacagtttcacggtgtgagagtgttcgggattaataaatattag

SEQ ID NO: 127430 - DNA, 462 bp, synthetic construct
  misc_feature 1..462: note = Description of Artificial Sequence: Synthetic coding sequence
  source 1..462: mol_type = other DNA
atgaatgtcggcgtggcgcattcagaggtcaaccccaacacaagagtcatgaactcgcgcgggatctggctcgcatacatcatattggttggcctcctgcatatggtgctgctatcaatccccttttttagtattcccgtggtctggacattaactaatgttatccacaatctggccacttacgtgttcttgcataccgtgaaaggaactccgttcgagactcccgaccagggtaaagcccgccttctgacgcactgggaacagatggactacggtttgcaatttactagctcccggaaatttctaagcattagtcccatcgtgctctatctgctagccagcttttacactaaatatgatgcggcccactttctcattaatacagcatccttacttagtgttttgcttccaaagttgccccagtttcatggagtaagggtcttcggcattaacaaatactag

SEQ ID NO: 127431 - DNA, 462 bp, synthetic construct
  misc_feature 1..462: note = Description of Artificial Sequence: Synthetic coding sequence
  source 1..462: mol_type = other DNA
atgaatgtgggtacagcccacagcgaggtgaatcccaacaccagggtcatgaacagccggggcatctggctatcctacgtcctggctataggactgctgcacatcgtgctgctgagcattccgtttgtttctgttcccgtcgtgtggaccctgactaatctgatccataatatgggcatgtatatctttctccacacagtcaaagggacaccctttgagacccctgaccaaggcaaagccagattgctgacacattgggaacagatggattatggtgttcagttcacagcttcccgcaagttcctcaccatcactcccatcgtcctgtactttctgacatcattttataccaagtacgatcagattcacttcgtgctgaacaccgttagtctcatgtctgtgttgatacccaaactcccccagctgcatggtgtccgaatctttggcatcaacaaatactag

SEQ ID NO: 127432 - DNA, 462 bp, synthetic construct
  misc_feature 1..462: note = Description of Artificial Sequence: Synthetic coding sequence
  source 1..462: mol_type = other DNA
atgaatgttggcactgcgcatagcgaagtcaaccccaacactcgggttatgaacagcagagggatctggctgtcttatgtcctggctatcggactgctccacatagtcctgcttagcattccctttgtctcggtcccagtggtctggactctcactaaccttatccataatatggggatgtacatttttctccataccgtgaagggaacacccttcgagaccccagatcagggtaaggctcgcctgctgactcactgggaacaaatggattatggcgtccagtttaccgcctctcgtaaatttctgacaatcacacctattgtactgtacttcctgactagcttctacactaagtatgaccagattcattttgtcttgaacaccgtgtccctgatgtccgtgctcatacccaaacttccacagttgcatggcgtccgtatcttcggcattaataagtactag

SEQ ID NO: 127433 - DNA, 1320 bp, synthetic construct
  misc_feature 1..1320: note = Description of Artificial Sequence: Synthetic coding sequence
  source 1..1320: mol_type = other DNA
atgttctcaaaactcgctcacctgcagagattcgccgtgttaagccggggagtccattcgtcagttgcctccgccacgtccgtagcgacgaaaaagacagtgcagggaccccctacctctgatgatatctttgagcgcgagtacaaatacggcgctcataattaccatcctttgccagtggcactcgaaaggggtaaaggaatctacctttgggacgtcgagggccggaaatattttgatttcctgtcaagttactctgccgtcaatcagggacactgtcatccaaagatcgtgaatgcactcaaatctcaagttgacaagcttacactcacttcacgagccttctataataatgtcttaggagagtacgaagaatacataacaaagctgttcaactaccacaaagttctgccgatgaacacgggcgtggaggcaggtgaaacggcctgcaaacttgcccgcaagtgggggtatacggtaaaggggatccagaagtacaaagccaagattgtcttcgccgctggcaatttctggggacggaccctgtccgccatctcttccagtacagatcccacatcctatgatggcttcggcccatttatgccaggcttcgatatcatcccctataacgacctgcccgcgctcgagagagctcttcaggacccgaatgtggccgcctttatggtcgagccaatacagggcgaagccggggtggtggtgccagatcccggatacttaatgggcgtgagggaattgtgcactcggcaccaagtcctttttattgcggacgagatccagactgggttggctcgcactggccgctggctggctgtagactatgaaaacgttcggccggatattgtgctgctgggaaaagccctcagcggtggtctctaccccgtgtctgctgtgctttgtgacgatgatatcatgcttactatcaaacctggagaacacggatcgacatacgggggtaacccactggggtgtagggtggccatagccgcactggaggttttggaggaagaaaacctcgctgagaatgctgacaaattgggcatcattctgcgcaacgagcttatgaagctgccatcagatgtggtgacagccgtgcgcggaaagggcctcctgaatgccatagtgattaaggagactaaagactgggatgcttggaaggtttgtctgagattacgagataatggcctgcttgcaaagcccactcacggcgacatcatccggttcgcccccccactggtgattaaagaagacgagcttagagagagcatcgagataattaataagacgatactgtctttctag

SEQ ID NO: 127434 - DNA, 906 bp, synthetic construct
  misc_feature 1..906: note = Description of Artificial Sequence: Synthetic coding sequence
  source 1..906: mol_type = other DNA
atgaacacgggagtagaggcaggcgagacagcatgcaagcttgccagaaaatggggctacactgttaagggcattcagaaatacaaggccaagatcgtgttcgccgcaggaaacttttggggccgcactcttagcgctatctcctcgtctacagaccccactagctatgacggttttggaccctttatgccagggttcgatatcatcccttacaacgacttaccagctctggagcgagctctgcaggaccctaatgtggctgcatttatggtggagcccatccaaggggaggctggtgtggtggtgccggaccccggctacctaatgggagtccgcgagctgtgcacgagacaccaagtgctcttcatcgccgatgaaattcaaaccggcttagcccgaaccgggcgatggctagctgttgattacgaaaatgttcgacccgatatcgtgttattaggcaaggctctctccggggggctttatccagtatctgccgtgctgtgcgatgatgacatcatgctaactattaagccaggcgagcacggatccacctatggaggcaatccattgggttgtcgtgtggcgattgctgccttggaggtactggaggaggagaatctcgctgagaatgcagacaagctcggaattatactacgcaacgaactcatgaagctgccttccgatgtggttaccgctgtgcgggggaaaggcctactgaacgcgatcgtcatcaaggaaacaaaagactgggatgcctggaaagtatgtcttcgcctgcgtgacaacggcctcctggccaagcctacccacggcgacataatacgattcgcacctccgctggttattaaagaagatgagctgcgcgaaagcatagaaatcattaataaaaccatactgtcattctag

SEQ ID NO: 127435 - DNA, 405 bp, synthetic construct
  misc_feature 1..405: note = Description of Artificial Sequence: Synthetic coding sequence
  source 1..405: mol_type = other DNA
atgaaagccttctcacccgttagatcagtccgcaagaacagcctgtccgaccactcactcgggataagccgtagcaaaacaccagtggacgacccgatgagcctgctatataatatgaacgattgttattcaaagctcaaggagctcgtcccaagcattccccagaataagaaggtgtctaagatggagattctgcagcacgtcattgattatatcctggatttgcagatcgcattagacagtcaccccactatcgtctccctccaccaccagcgccccggccaaaaccaagcgtcacggacacccttgaccaccttgaacaccgacatctccattcttagtctgcaggcctctgagttcccgagcgagcttatgtccaacgatagcaaagccctgtgcggctag

SEQ ID NO: 127436 - DNA, 1386 bp, synthetic construct
  misc_feature 1..1386: note = Description of Artificial Sequence: Synthetic coding sequence
  source 1..1386: mol_type = other DNA
atgaataattttgggaatgaagagtttgattgtcacttcctggatgaagggtttacggccaaagacattcttgatcagaagatcaacgaagtttccagcagcgacgataaggatgctttctacgtggctgacttaggagacatccttaaaaaacatcttaggtggctgaaagcactcccccgagtgacacccttctacgccgtcaagtgcaatgactccaaagcaatcgtcaagacgctcgccgctactggaactggcttcgactgcgctagcaagaccgagatccagttggtgcagagcctcggagtccctccggaaagaattatctatgcgaacccctgcaagcaggtgagccagatcaagtacgcagccaacaacggagtgcaaatgatgactttcgacagcgaagtcgagctcatgaaggtcgcccgggcccatccaaaagctaagctggttctgagaatcgctacagacgattccaaggctgtctgtcgcctaagcgtaaaattcggcgccactttacggacatcccggctgctgctcgagagggcaaaagagctcaatatcgacgtggtgggcgtttcatttcacgtaggctcaggctgcactgatcccgagaccttcgtgcaggccattagcgatgcacggtgcgtttttgacatgggtgccgaagtgggctttagcatgtacctgctggacataggcggcgggtttcccggaagcgaggacgtcaaactcaaatttgaagaaataactggtgtaatcaatcctgcactcgacaaatattttccttctgattccggtgtgcggattatcgccgagccaggcagatactacgtggcttccgccttcaccctggcagtcaatataatcgcgaaaaagatagtgctcaaggagcagactgggagcgacgatgaagacgagtctagcgaacagacatttatgtattacgtcaacgacggggtttacggtagcttcaattgcatactgtacgaccacgcccacgtcaagcccctattacagaagaggcccaagcccgacgaaaagtattattcttccagcatatggggacctacgtgcgatggcctggacaggatcgtagagcgatgcgacctgcctgagatgcacgttggagactggatgctgtttgagaacatgggagcctacacagtggccgccgcatcgaccttcaacggcttccagagaccaacgatctattacgttatgtcagggcccgcctggcagctcatgcagcaatttcagaaccctgatttcccccctgaggttgaggagcaggatgcatctactttgcccgtgtcctgcgcatgggaaagtggaatgaagagacacagagccgcatgcgcatctgccagcatcaatgtttag

SEQ ID NO: 127437 - DNA, 207 bp, synthetic construct
  misc_feature 1..207: note = Description of Artificial Sequence: Synthetic coding sequence
  source 1..207: mol_type = other DNA
atgaataattttggcaacgaggagtttgattgtcactttttggacgaaggctttactgcaaaggacatactggaccagaagatcaacgaagtgagctcatctgatgataaggatgccttctatgtcgccgacctgggcgatatcctcaaaaaacatctgagatggttgaaggccctgcccagggttacccctttttacgctgtctag

SEQ ID NO: 127438 - DNA, 927 bp, synthetic construct
  misc_feature 1..927: note = Description of Artificial Sequence: Synthetic coding sequence
  source 1..927: mol_type = other DNA
atgatgactttcgactcagaagtggagctgatgaaagtggctagggcccatccgaaggccaagttagtcctgcgcattgccaccgatgactcgaaggcagtgtgccggctctccgtgaaatttggggcaactctgaggacttcaagattactgctggaaagagcaaaggagttaaacatcgatgtggtgggagtgtcttttcatgtagggtccggttgcactgatcctgagacttttgtgcaggctatttccgacgcaaggtgcgttttcgacatgggcgcagaggtcgggttctccatgtacttgttagacattgggggcgggtttcctggctccgaggacgtgaagctaaagttcgaggagattacaggagtgattaaccccgcactggacaagtatttcccctccgattcgggtgtacggatcatagccgagcccgggaggtattacgtcgcctccgcctttactctggctgtgaatatcatcgcaaagaagatcgttctcaaggagcagacaggctcggatgacgaggacgagagtagcgagcagactttcatgtattatgtcaatgatggcgtgtacggatccttcaattgcatactgtacgaccacgcccatgtaaagccactgctccagaagcgaccaaaacccgatgagaagtattacagcagtagtatatggggccctacctgtgacggtctggacaggatagttgaaaggtgtgacctgccggagatgcatgtcggggattggatgttgtttgagaatatgggcgcatacacagtggctgccgcgtctactttcaatggctttcaacggcccacgatatattacgtaatgagtggccctgcatggcagcttatgcagcagtttcagaatcccgatttccctccctgtctgtgtttagtgcctggccgggtcggctag

SEQ ID NO: 127439 - DNA, 684 bp, synthetic construct
  misc_feature 1..684: note = Description of Artificial Sequence: Synthetic coding sequence
  source 1..684: mol_type = other DNA
atggttaagtcttctctgcagaggattctcaactctcactgtttcgcccgcgaaaaggagggggataaaccttctgctaccatccacgctagccgtacaatgcctctgctcagtctgcacagccggggaggatcatctagcgaatcctcaagagtgagcctgcactgctgtagcaaccccggtcccgggccacggtggtgcgatgccccccaccctccattgaagatccctggtggtagaggcaatagccagcgagaccacaatctgagtgctaatctgttttattctgatgatcgtctgaacgtgaccgaagagctgacgtcaaatgacaagacaaggattcttaatgtgcagagtcgcctcacagacgcaaagagaatcaactggaggactgtgctgagtggcgggtcattgtatatcgaaattccaggcggggccctcccggagggctctaaggactcctttgctgtgctcctggagtttgcagaggagcaactgcgggccgaccacgtgtttatttgcttccacaagaaccgggaagaccgggctgcacttctgcgcaccttttccttcctggggttcgagatcgtgcgcccggggcatcctctggtgccaaagcggccagatgcgtgcttcatggcatacaccttcgagcgagaatcatctggggaagaggaagaatag

SEQ ID NO: 127440 - DNA, 831 bp, synthetic construct
  misc_feature 1..831: note = Description of Artificial Sequence: Synthetic coding sequence
  source 1..831: mol_type = other DNA
atgtggattacgagcctgattacaatgaaagacgaagacatcttcgaccttgcaggcgacccccaagattcgctcatccccggcccgtcccccacccccaaacagaatccagtctgcaacgaagcctttttcggccaccagacattttccctgagagaaaccggcctcaagtcagtgcactgtcagggccaagaggcggagaacatggaaagggaaaagttccagcagaaagccctgaaacagactaagcagaagaaatcgaaatctgccgagtttctcatggtgaaggaagaccgagaggcaacggaggggacaggcaatccagcgttcaacatgtcatcccctgatctgtctgcgtgtcaaactgctgagaagaaggtcatcagacacgatatgcctgacagaactctcgcagcacaccagcagaaattcaggctgcccgctagcgcagagcctaagggtaatgagtacgggcgtaactacttcgatccacttatggatgaagaaatcaatcctaggcagtgcgctacagaagtaagcagggaagacgaaagcggccgcgaagaaacgctgaatagcgaggccccgggctcctctaataagtcccacgaaatacacaaagaagcctccgaggcaactaccgctcacctcgaggagttccagcgcagtcagaagaccattatcctactcggaagcagcccactagaacaggaaatcagatcgacctcactccactgtatggaagacgaaatgtctcacccctggatactgctgttaaaagtaaccgccgtgatcagaagccgacggtactacagggaacagagattctag

SEQ ID NO: 127441 - DNA, 1443 bp, synthetic construct
  misc_feature 1..1443: note = Description of Artificial Sequence: Synthetic coding sequence
  source 1..1443: mol_type = other DNA
atggaacgagaaaaatttcagcagaaagctttgaaacaaactaaacagaaaaagtccaagtccgctgaatttttgatggtgaaggaggacagggaggccacagagggcactggaaaccccgccttcaatatgagctctcccgatctgtctgcctgccaaactgctgagaaaaaagtgatcaggcatgacatgccagacagaacgctcgctgcccaccagcagaaattccggctccccgctagcgctgaaccaaaaggaaatgaatatgggaggaactactttgatccattgatggatgaggagataaatccccgccagtgtgctacggaggtatcacgggaagtctgtctcatggcaaagggagaaaaggccgaaagcggagttgataacactgccggcctgtcagagaaggagacccaaaagaatccacgcgctcccatggatgaggctgatgtcaagagcgccgctcacagctcgcaaggatccatcccaaaaaagatcggaccttgctctatggattatgaccctaacctcctggaggaagatgacgaactacactcacaaggcgattctttgaccgatcacagcgtcaagggtaaatctaccgtgtggcgtatcggagaagctgaagattattcccaagacatctcttacttggaggagctggaagagcatagattttcagtgtgttgctcctcagtcgccgattccagatatggagacttctttaaacatcttcactttgtgctggtctcagcctcttctgagctgcagctgagtcagtggcagagccaggggttctggtacataattttgctgatgttcttcctgtggttcctcagattatacctgcactatctggggcaatggctatttctccaggctatatctacgcctgtgacaaaattccacttctctcttcacatcgtcgaactctgctacccaacatcatccctgcatatcggagaggagctgcccgttgtggtgatgggaccccttatgctgaatgcaatacttctcctgctcgtgttgataaggtggggctgccagcttctttttgcttcgtgccccgatgtgctttccaagctgatcatcactatggggctatggacgatccttgatcccctggcggttttcatcctagacacccttctggggcgcctgacagacaacgaggagacccccgtggccgacgctgcaaagctatactggatgttcgttagaaccgtccagcctggaatcctgggggtggttatcacggtcctgctttacattttgctgttcgtgattagtagcctgatcctgtacctatattgcctgcgtctgcataatgactcttggatactggacgccttccaacgaattcactccgaagagacaaaattcttcatcccttacgacctggagatatcgaaccaagaattatcatatatcgtgaaatag

SEQ ID NO: 127442 - DNA, 606 bp, synthetic construct
  misc_feature 1..606: note = Description of Artificial Sequence: Synthetic coding sequence
  source 1..606: mol_type = other DNA
atggccctatcctgggtgctgaccgtcctgagcctgctcccgctgttagaagcgcaaatcccactgtgcgccaatttggtgcccgtaccaattacaaatgccactctggatcgcattacgggaaaatggttttacattgcctccgcattcaggaacgaggagtacaacaagagtgtccaggagatccaagctacttttttctatttcacaccaaacaagactgaggatacaatcttcctccgcgagtaccaaacgcgccaagatcagtgcatttataataccacatacttgaacgtccagagagagaatggtactattagtagatacgtgggaggtcaagagcacttcgctcacctgcttatcctaagggacaccaagacatacatgttggcattcgacgtgaatgatgagaagaattggggtttgagcgtctacgccgacaagccagagacgactaaggaacagctgggcgagttttacgaggccctggactgtttaagaatccctaaatctgacgttgtctacacagattggaagaaagacaagtgtgagcccctggagaagcaacatgagaaagagagaaagcaggaagagggcgaaagttag

SEQ ID NO: 127443 - DNA, 585 bp, synthetic construct
  misc_feature 1..585: note = Description of Artificial Sequence: Synthetic coding sequence
  source 1..585: mol_type = other DNA
atggccctgagttgggtcctgacagtcttgagcctgcttccgttactggaggctcagatacccctctgcgcaaatctggtgcccgtgccaataaccaatgccaccctggatcgcgtaagtgcttgggccagccctgttttgtccacttgggctgccgcaagcctgttgtgggccagcctctccctcttggccgttgtgggacccccgcttcccgctctgccttttagcctactgggcccccagggcgaaattcttacatcccctggggactccggcggtaccccgtgcctccaaactcaaaagcctcactgccgtgtgttacatggcggaagattctgcgccgggccaggcggcgccgcttggggcgctatgaccgaccctcagggcgaactcctccacgcccattgccccccaggcgcatcttctccccacttacagaaccagggtgagatatgcctgtctctgttgccagccgactcccaaaggttcagcataaaacctccctcaccagctcccacgttttcccctgaccattggcaggtcgtattgtaccggattggtcttagcaagcgaggcgtccaatag

SEQ ID NO: 127444 - DNA, 585 bp, synthetic construct
  misc_feature 1..585: note = Description of Artificial Sequence: Synthetic coding sequence
  source 1..585: mol_type = other DNA
atggccctgtcatgggtcctgacagtgctgagcctccttcccttgctcgaagcgcagatccctctttgtgccaacctggtgcctgtgccaatcaccaacgctaccctagaccgggtgagcgcgtgggcatctcctgtgttgtccacttgggcggcagcctccctgctctgggcctccctgtatctgttggcggtggtagcgcctccattacccgctttgcctttttcacttctggggccccaaggagaaattctgactagtccaggcgactctgggggcactccatgtctgcaaactcaaaagccacactgcagagtgttgcacggcggccgcttttgcgccggccccggaggggcggcctggggcgcaatgaccgacccccagggcgaactcctccacgcccactgccccccaggtgcaagcagtccacacctgcagaatcaaggtgagatatgcctgtctctcctgcccgctgactcccagaggtttagtatcaagcccccatctcccgcccctcctttcagccctgaccactggcaggttgttctgtaccggatcggattatcaaagagaggcgtccagtag

SEQ ID NO: 127445 - DNA, 606 bp, synthetic construct
  misc_feature 1..606: note = Description of Artificial Sequence: Synthetic coding sequence
  source 1..606: mol_type = other DNA
atggctctgagttgggttctgacagtgctgtccctgctgccactacttgaggcgcagatacctctgtgtgctaacttggtgccggtgccaatcactaatgccaccctcgatcggatcacagggaaatggttctatattgctagtgcttttcggaatgaagagtacaataagtctgtgcaggaaatacaggccacatttttttattttacacccaacaaaacagaagacacgattttcttacgcgagtaccaaacaaggcaaaatcagtgcttttacaacagttcctatctgaacgtgcagagggagaatggcactgtgagcagatacgagggcggtagagagcacgtcgcccatctgctgtttctgagggataccaagaccctgatgttcggcagttacctggatgacgagaaaaattggggtctgagcttctacgccgacaagcccgagactaccaaggaacagctgggagagttttacgaggcactagattgcctgtgtattcctagatctgacgtcatgtataccgattggaaaaaggacaaatgtgagcccctggaaaagcagcacgagaaagaacggaagcaggaggagggagaatcttag

SEQ ID NO: 127446 - DNA, 1065 bp, synthetic construct
  misc_feature 1..1065: note = Description of Artificial Sequence: Synthetic coding sequence
  source 1..1065: mol_type = other DNA
atgatgagttatttgaagcagccaccttacggcatgaatgggctgggtcttgccgggcctgcaatggatctgcttcaccccagcgtggggtatcccgctactccaagaaagcagcgccgcgagcggaccactttcacccggagtcagttggatgttctggaggccctatttgcaaaaacccgttatcctgatatttttatgcgtgaggaggttgcactgaaaataaatctaccggaaagtcgggtacaggtgtggtttaaaaatcgcagagctaagtgcagacagcaacaacagagcggttccgggacgaaatcccgcccagccaagaaaaaatccagcccagtgcgggagtcctctgggagcgagagttctgggcagtttaccccacctgccgtgagcagttctgcctcttcaagcagtagcgcctcaagctcctctgccaaccccgcagctgccgcagccgccggtctcggcgggaatcccgttgccgcagccagctccctctcaacacccgctgcctctagcatatggtctccggcttccatctccccaggctcggcgcctgcgagtgtctctgtcccggagcccctggctgctcccagtaacacatcctgtatgcaaaggagcgtggcggccggagccgctaccgcagccgccagctatcccatgtcctatgggcaaggcggatcttatgggcaggggtatccaactccctcatcgtcctatttcggtggcgttgactgctcttcttaccttgctcctatgcactcccatcatcacccacaccagctgagccctatggccccttcctctatggccggccaccaccaccaccatcctcacgcacaccatccgctgtcacagagttccggtcaccatcaccaccaccatcaccatcaccatcagggctacggtgggtctggactcgccttcaacagcgccgactgtctggactacaaagaacccggggccgcagcagcgagctcagcctggaagctgaacttcaattcccccgattgcttagactacaaggaccaagcttcatggagattccaggtgttgtag

SEQ ID NO: 127447 - DNA, 1065 bp, synthetic construct
  misc_feature 1..1065: note = Description of Artificial Sequence: Synthetic coding sequence
  source 1..1065: mol_type = other DNA
atgatgtcctacttaaagcagccaccttacgggatgaacggtttgggtctggcagggccagccatggatctcctgcacccgagcgtcggctatcccgcaaccccccgcaaacagagaagagagcgcacgacctttacaagaagtcagttggatgtgttggaggccctgttcgccaagaccagatatcccgacatttttatgagagaagaggttgctttaaaaattaatctgccggaaagcagggtccaggtttggtttaaaaataggagagccaaatgtcgccagcaacagcaaagtggatcaggaactaagtctcggccagccaaaaagaagagcagtccagtacgtgagagcagtgggtcagagagttccggacagttcacaccacctgcagtctcaagtagcgcttcaagctccagcagcgcaagcagcagcagcgctaaccctgccgctgccgcagccgccggcttaggaggcaaccctgttgccgccgcaagctctctgtcaacccccgccgcctcttctatctggagtccagcttccattagccccgggtccgcccctgcatcggtgtcagtgcccgagccacttgctgcacctagcaacacctcatgtatgcaaaggtcagttgctgccggcgccgccaccgccgccgcttcctaccccatgtcctacggccaaggtggctcctatgggcagggctacccaactcccagttctagctactttggcggggttgactgcagctcgtatttagcccctatgcactcccaccaccacccccatcagctctcccctatggcgcctagttccatggcagggcatcatcatcaccacccacacgcacatcacccattgagtcagtccagtgggcatcatcatcatcatcaccatcaccaccaccaagggtacggcggtagcgggctggcatttaatagcgccgactgcctggactacaaggaacccggggccgccgccgcttctagcgcctggaaattgaacttcaatagccctgattgccttgactataaagatcaagcttcgtggcgctttcaggtgctgtag

SEQ ID NO: 127448 - DNA, 894 bp, synthetic construct
  misc_feature 1..894: note = Description of Artificial Sequence: Synthetic coding sequence
  source 1..894: mol_type = other DNA
atgatgtcatacctcaagcaacctccttatgccgtgaatggccttagcctgactactagcgggatggatcttctccatccgtccgtgggctaccccggaccctgggctagctgccctgcggccactcctagaaagcaacgccgggagagaacaaccttcactagagcccaactcgatgttcttgaagccctgttcgcaaaaacacgctacccagatattttcatgagagaagaggtcgctttgaagattaacctgcctgaaagccgggtccaggtgtggttcaagaatagacgggctaagtgccgccaacagcaacaacaacagcaaaatggcggacagaataaggttcgccctgcaaagaagaaaaccagccccgcaagggaagtgtcttcagagtcaggcacatccggccagtttaccccccccagtagcacatcagtcccaactatcgcgtcctccagcgcacccgtgtcgatctggagccctgcttctatcagccctctctccgaccccctatctaccagcagctcctgcatgcagaggtcctaccccatgacttacacacaggcgtccgggtacagccaggggtacgcaggcagcacaagttacttcggagggatggattgcgggtcttatctcacacccatgcatcatcagctacctggaccaggggcaaccctgagccctatgggcaccaacgcggttaccagtcatctgaatcaatcacctgctagtttatccacccagggctatggagctagttccttaggctttaacagtaccacagactgccttgactataaagaccagaccgcctcatggaagcttaactttaatgccgactgtttggactacaaagatcagactagctcctggaaattccaggtgctctag

SEQ ID NO: 127449 - DNA, 870 bp, synthetic construct
  misc_feature 1..870: note = Description of Artificial Sequence: Synthetic coding sequence
  source 1..870: mol_type = other DNA
atgatgtcctatctcaaacaaccaccctatgcggtgaatggattatcccttaccacatccggcatggatctcctgcacccatccgtcgggtaccccgctacacctcgtaaacagagaagagagcgaaccaccttcaccagagcccagcttgatgtcctcgaggctttatttgctaaaacccgttatcccgacatcttcatgcgtgaagaggtcgctttgaagatcaatctgcctgagtctagagtgcaggtttggtttaagaatcgacgggctaaatgtaggcagcagcagcagcaacaacagaacggtggacaaaacaaggttagaccagctaaaaagaaaacctcaccggcccgtgaagttagcagtgagtcgggaacctctggtcaattcacaccaccatccagcaccagcgtgcctacgatcgcatcctcctctgctccagtttccatctggtctcctgcaagcatttctcccctgagcgacccacttagcacctcaagtagttgtatgcagagatcctacccaatgacatacacacaggcctctgggtatagccagggatatgcaggctctacatcgtactttggtgggatggactgtgggtcttatttaaccccaatgcaccaccaactcccgggtcccggggcaactctttccccgatgggtactaatgctgtgacctcccatctgaatcagagccccgcatcgctgtcaactcaggggtacggggcatcatccctcggcttcaatagcactaccgattgtttagactacaaggaccaaaccgcttcctggaagctgaacttcaacgccgattgtctggattacaaagaccaaaccagcagctggaaatttcaggttctctag

SEQ ID NO: 127450 - DNA, 720 bp, synthetic construct
  misc_feature 1..720: note = Description of Artificial Sequence: Synthetic coding sequence
  source 1..720: mol_type = other DNA
atgatgagctatctcaagcaacctccctatgctgtgaatggactgtcactaacaacctcaggcatggacttgctacaccctagcgttggctaccccggtccttgggcgtcttgccccgccgccacacctcggaaacaacggagagagcgcaccacattcacccgggctcagctggacgttctagaggctctcttcgccaaaacgaggtaccccgacatttttatgagggaggaagtcgccctgaagatcaatctgcccgagtccagagtccaagtgtggtttaagaacagacgggctaaatgcagacagcaacagcagcagcagcagaatggtgggcagaataaagtgagacccgcgaagaagaaaacatcccctgccagagaagtgagcagcgaaagcggcacttctggccagttcaccccgccgtcatctacaagtgtgcccacaattgcctcatccagcgccccagtgagtatatggagtccagcctcaatttcacctctcagcgaccccctctccacaagctctagttgcatgcagagatcctacccaatgacctacactcaggcctctggctatagccagggctacgccgggagcacctcttactttgggggcatggactgcggatcatatttaacgcctatgcatcatcaactccctggccccggcgcaactctgtctcctatgggaactaacgcggtgaccagccatttatag

SEQ ID NO: 127451 - DNA, 870 bp, synthetic construct
  misc_feature 1..870: note = Description of Artificial Sequence: Synthetic coding sequence
  source 1..870: mol_type = other DNA
atgatgtcttacctcaagcaaccgccatacgcagtcaatggtctgtcccttacgaccagcggtatggatttacttcacccatccgttggctacccggctacccctcgcaaacaaaggcgtgaacgcaccaccttcacgagagctcagctcgacgtccttgaagcgctgttcgcgaaaacccggtacccagatatctttatgcgagaagaagtcgcacttaagattaatttgcccgagagcagggtccaggtatggttcaagaaccgaagagcaaagtgccgccaacagcagcagcagcagcagaatggtggacagaataaggttcgcccagctaagaaaaagaccagtcctgcaagagaggtctcttctgagtcagggaccagcggtcaatttacacccccaagcagcactagcgtgcctacaatcgcttcctcatctgcacccgtgtcaatctggtccccggcctcaatctcccccctcagtgacccacttagtacatcatcatcatgcatgcagcgaagctaccccatgacgtatactcaggcgtccggatatagtcaagggtacgcaggtagcaccagctatttcggtgggatggactgtggatcttaccttacccctatgcaccatcagcttccaggccctggtgctactctgtctcctatgggcactaacgctgtgaccagtcacctgaatcaatccccggcttcattgtcgacacagggctacggagctagtagcttaggttttaactccaccacagactgtttagattacaaagatcagaccgcaagctggaaactgaacttcaatgcagattgcttggattacaaagatcagacatcctcctggaagttccaggtgctatag

SEQ ID NO: 127452 - DNA, 492 bp, synthetic construct
  misc_feature 1..492: note = Description of Artificial Sequence: Synthetic coding sequence
  source 1..492: mol_type = other DNA
atgatgagctatctgaaacaacctccgtatgcggtgaatggtctctccctgacgacttccggcatggacttgctacaccccagcgtcgggtacccggcaacacccagaaagcagcgcagggaaaggaccacctttactcgtgcacaactggacgtgctagaagccttgttcgccaagacacggtatcctgatatctttatgcgcgaggaagtcgctctgaaaatcaatttgcccgagtcccgcgtccaagtctggttcaagaaccgccgtgcaaagtgccgccaacagcagcagcagcaacagaatggagggcagaataaagtcaggccagccaagaagaagacttcgcctgcccgggaggtctcatctgagagtggcacaagcggacagttcactccgccaagctcaacatctgtgcccactatcgcctcctcctcggcccctgtaagtatctggtccccagccagcataagtcccctctccgatccatag

SEQ ID NO: 127453 - DNA, 978 bp, synthetic construct
  misc_feature 1..978: note = Description of Artificial Sequence: Synthetic coding sequence
  source 1..978: mol_type = other DNA
atgctatcccacgctgatctcctggacgccagacttggaatgaaggacgctgccgagttactcggacatagagaggccgttaaatgcagactcggcgtaggcggctcagatccaggagggcaccccggggatctcgcccccaactctgacccagtggaaggtgcgacactcttgcctggggaggacattactacggtgggctccacacctgcttctctggcagtgtccgctaaggaccctgacaaacagccagggccacagggtggtcccaacccttcccaggctggacagcagcaagggcagcaaaagcaaaagagacaccgtacgcggtttacaccagctcaactcaatgagctcgaaagatcctttgccaagacacactaccctgacattttcatgagagaagagctcgcactccggatcggcctcactgagagtcgagtgcaggtctggttccaaaatcgtagagcaaagtggaagaaaaggaagaaaaccaccaacgtttttcgcgctcccgggacccttctgcctaccccaggtctgcctcaattcccatccgccgcagctgctgctgccgctgctatgggcgattccctatgttcttttcatgctaacgatactcgctgggctgctgcagcaatgcctggggtttcgcagttgcccctcccaccggccctcggtagacagcaagccatggctcagagcctctctcagtgttccctggctgccgggccacccccgaactctatggggctgtccaacagtctggcggggtccaacggggccggcttgcagagccacctttatcagcccgcttttccaggcatggttccagcgagcctgccaggtccttccaatgtgtccgggagcccacaactgtgcagcagccccgactcttccgacgtgtggaggggaactagtattgcctcgctgcgaagaaaggcgctggaacatactgtctctatgtcttttacttag

SEQ ID NO: 127454 - DNA, 912 bp, synthetic construct
  misc_feature 1..912: note = Description of Artificial Sequence: Synthetic coding sequence
  source 1..912: mol_type = other DNA
atgggaatcgtccagatctgtaaaggggagtacttttggctggaacccaaaaatgcatttgaaaatttccaagagccggatatcggactcgtggcactggccttcctgcaggggtcctttgcctacggagggtggaacttcctcaattacgttacggaagaactcgtggatccttataaaaacctgcctcgggcgatttttatcagcatcccgctcgtcacgttcgtctacgtgttcgccaacgttgcctatgtgacggccatgagtccccaggagctgcttgcttctaatgcggttgctgtgacgtttggcgagaaactgctcggtgtgatggcttggataatgcccataagcgtcgcgctgtccaccttcggcggcgtgaacggatcgctgtttacctcctctcggctgtttttcgccggagcccgtgaggggcacctcccatctgtgctggccatgatacatgtcaagcgctgtacaccgatcccagccctgctctttacatgtattagcacattacttatgctcgttacctcagacatgtacaccctgatcaactacgtcggcttcatcaattatctcttttacggggttacagtggctggccagatagttctgcgatggaagaaaccagatatccctcgccctatcaaaatcaatctcctcttcccaatcatttatctattgttttgggcattcctcctggtgttttcactttggtccgaacctgtcgtgtgtggtatcggcctcgcaattatgctcacgggcgtgccagtttactttctgggtgtgtattggcaacacaagcctaaatgtttttctgatttcatcgagttgcttacactcgtgagtcagaaaatgtgtgttgtggtctatcccgaggtagagggcttaagggacaggggagggtag

SEQ ID NO: 127455 - DNA, 861 bp, synthetic construct
  misc_feature 1..861: note = Description of Artificial Sequence: Synthetic coding sequence
  source 1..861: mol_type = other DNA
atggcgcttgtactcatcctgcagctcctaactctgtggccgttgtgccataccgatatcaccccgtcagtcgctattatcgtgcccccagcctcttaccaccctaagccttggttaggggcccagcccgccaccgtggtcactccaggtgtaaatgtgactctgcggtgccgagcccctcagcctgcatggagatttggcctgttcaagcctggagagattgcacccctgctcttccgcgatgtgagcagcgaactcgccgagttttttctggaagaagtgacaccggcccagggagggatttaccgatgctgttatcgtaggccggattggggacctggagtctggagtcagccatctgacgtcctggagctgctggtcacagaggagctcccgaggccaagcctggtggcactgccagggccagtggtgggcccgggagccaatgtctcgctgcgatgcgccggcaggctccgcaacatgtccttcgtgttgtacagggaaggagtagcggcccctttgcagtacaggcatagtgcccagccatgggcagattttacactgttgggcgcacgcgcgccaggcacatacagctgttactaccatactccatccgccccatatgtgctgtctcagagatctgaggtgttagtcatttcatgggagggggaaggacccgaagccagacctgcaagttctgcccccggaatgcaggccccagggccccctccatccgatcctggagctcaagctcccagcctgtcgtcattcaggccgcggggtctcgtgcttcagcctctgctgccacagactcaggactcctgggatcccgctcccccgccttccgaccccggcgtctag

SEQ ID NO: 127456 - DNA, 849 bp, synthetic construct
  misc_feature 1..849: note = Description of Artificial Sequence: Synthetic coding sequence
  source 1..849: mol_type = other DNA
atggccctggtgctgatccttcagctgcttacattatggcctctgtgccacaccgacatcaccccgagtgtgccccctgcgtcctatcaccctaagccatggctcggcgctcagcctgctaccgtggtgactcctggagtgaacgtgaccctgcgctgtcgggcgccacagcccgcctggaggttcgggctgttcaaacctggggagatcgcccctctgcttttccgggacgtttcctcggaactggcagaattttttctcgaggaggttactcctgctcaaggcgggatatatcgttgttgttacaggaggccagattggggccctggggtatggagccagccttccgatgtcctcgaattacttgtcaccgaggaactgcctcggccatcactggtggcccttcctggccccgtcgtgggccccggggcgaacgtctccctgaggtgtgctggaagattacgaaacatgtctttcgtgctctatcgcgaaggagtcgcagcgccactgcagtatcgacattctgcccagccatgggctgacttcacccttctcggagcacgcgctccaggtacgtattcatgttattaccacacgccgagtgccccttacgtgttgtcacaacgatcagaggtgctggtgatcagttgggagggagagggccctgaagctcgtcctgcctcctcggcccctggtatgcaggctcctggccctcctccttctgacccaggtgctcaggctccgagtcttagctccttccgtcctcgggggctggtccttcagcctctcttgccacagacccaggattcatgggacccagctcctcctccatccgaccctggagtgtag

SEQ ID NO: 127457 - DNA, 759 bp, synthetic construct
  misc_feature 1..759: note = Description of Artificial Sequence: Synthetic coding sequence
  source 1..759: mol_type = other DNA
atggcattagtcttgatcctgcagctgctgacccttttccctccagcctcctaccaccctaagccttggctcggcgcccagcctgctacagtcgtgacccctggcgtgaatgtgactttacggtgtcgggccccccaacccgcttggcggttcggactgtttaaaccaggcgagatcgcccccctgctctttcgggacgtcagcagcgaattggctgagttcttcctggaagaggtgactcccgcccagggtggaatatatcgctgttgctaccgacgccccgactgggggccaggggtgtggtctcagccctcagatgtgcttgagctgctggtgacggaggaactcccaagaccaagcctggttgccttgcctggccccgtggtgggacccggggcaaacgttagcctgcggtgcgccggacggctccgcaatatgtccttcgtcctgtacagggagggcgttgctgcacctctgcaatatcgacactctgcccaaccgtgggccgacttcacactactgggtgccagagctccgggtacctacagctgttattatcacacccccagcgcaccctatgtgctatcccagaggagtgaggtcctggttatctcctgggaagactcgggcagctccgactacacccgggggaacttggtccggctgggcctggcaggtctcgtcctgattagcctgggggcactggtcacgttcgattggaggagtcagaaccgggcaccagccggaattcgcccctag

SEQ ID NO: 127458 - DNA, 804 bp, synthetic construct
  misc_feature 1..804: note = Description of Artificial Sequence: Synthetic coding sequence
  source 1..804: mol_type = other DNA
atggccttggtgctcatcttacagctcttgacattgtggcctctttgccacactgacattaccccaagtgtggcaataatcgtgcctccagcatcttaccaccccaagccctggctgggtgcccagcctgccacggtagtgactccgggcgtcaatgttaccctgaggtgtcgcgcccctcagcccgcttggcgcttcgggctgttcaaacctggggagattgctcctctcctcttcagagatgtttccagtgaattggcagagttctttctggaggaggtgacccccgcccagggtgggatttacaggtgctgttacaggcggccggactggggtccaggcgtgtggtcgcagccaagtgacgttctggaactattggtgacagaggagctgccccggccttcgctggtggcccttcctgggccagtggttggccccggagcgaatgtttctctgcggtgtgccggcaggctgcgcaacatgagctttgtcctttatcgggaaggagttgctgcccctctgcagtacagacattctgcccagccatgggcggacttcacattattgggcgctcgcgctcctggaacttattcctgctattatcacaccccatcggccccctacgtgctgtctcagcggtccgaagtgttggtgatttcctgggaggactctgggtcctcagattacactaggggcaatctcgtcagactcgggctggccggattggtgctgataagcctcggagccctcgtgactttcgactggcgcagtcagaacagggctcctgccgggattcgtccatag

SEQ ID NO: 127459 - DNA, 792 bp, synthetic construct
  misc_feature 1..792: note = Description of Artificial Sequence: Synthetic coding sequence
  source 1..792: mol_type = other DNA
atggcactggtactgatactgcagttgctcactctttggcccctgtgccacacagatataacgccgagtgtgccccccgccagctatcaccctaagccctggttgggcgcccagcctgctacagtagtaacacccggagtaaatgtcacactgcgatgcagagcaccgcagcctgcatggcgttttggactgtttaagccaggcgagatagcccccctgctgttccgcgatgtctccagcgagttggccgagttttttctggaggaggtgacgcccgcccaggggggtatttacagatgttgctaccggcgacccgattggggacccggggtgtggagccagccctccgatgtcctggaactgctggtgaccgaggaactcccccggccttctcttgtggccctgccaggacctgtagttggaccaggagccaatgtttcacttcgatgcgccggaaggctgcggaacatgtccttcgtcctgtacagagagggggtagccgctccattgcagtacaggcattcggcgcaaccatgggccgacttcacactgctgggcgcaagagcccctggcacctatagctgctattaccatacacccagcgccccgtatgtcctgtctcagaggagcgaagtgttggtaatcagttgggaggatagtggcagctccgactacacacgcgggaacctggttaggctcgggctcgccggccttgtgctgataagcttgggcgctctggtgactttcgactggagaagccagaaccgagcccccgctggcatcagaccgtag

SEQ ID NO: 127460 - DNA, 645 bp, synthetic construct
  misc_feature 1..645: note = Description of Artificial Sequence: Synthetic coding sequence
  source 1..645: mol_type = other DNA
atgtcaaaacctccaccgaaaccagtcaaaccaggccaagtcaaggtgtttagagccctgtacaccttcgagccacgaaccccagatgagctgtatttcgaagaaggcgatatcatttacattactgatatgagcgacaccaactggtggaagggcactagcaaggggagaacaggcctgattccaagtaattacgtggccgaacaggccgagagtatagataatccactgcatgaggctgctaaacgagggaatctgtcctggctgagagagtgtttggataatcgagtcggtgtcaatggcctagacaaggctggaagtacagctctgtattgggcttgtcatggcggccacaaagatattgtcgaaatgctgtttactcagccaaacattgagttgaaccaacagaataagctgggggataccgccttgcatgcggcggcatggaagggatatgctgacatagtacagctcctgctggccaagggggcgagaacagatctccggaatattgaaaagaagctcgccttcgacatggctacaaacgccgcttgtgcgtccttactgaagaagaaacagggaactgacgccgtcaggacactgtcaaacgccgaagactatctggacgatgaggacagtgattag

SEQ ID NO: 127461 - DNA, 897 bp, synthetic construct
  misc_feature 1..897: note = Description of Artificial Sequence: Synthetic coding sequence
  source 1..897: mol_type = other DNA
atgaagacattgcagtctaccctgctgctgctgctcctggtgccactcattaaacctgctccaccgacacaacaggattctaggattatctatgattacggtaccgacaacttcgaagaaagcatcttctcacaagactatgaggacaaatatctggatgggaaaaacattaaggaaaaggagacggtcattatccctaatgaaaaatctcttcagttgcagaaggatgaagctataacaccactccctccgaagaaggaaaacgatgaaatgccaacctgcctgttgtgtgtgtgtttatcaggtagcgtgtactgtgaagaagtcgacatcgacgcggtgccgccactgcccaaggagagcgcctatctctacgctcgtttcaacaaaatcaaaaaactgaccgccaaagacttcgccgacataccaaatctccggagattagattttactggcaatctgatagaggatattgaggacggcaccttcagtaaactgagtctgcttgaggaacttagcctggccgaaaatcaactcctgaaattgcctgtgctgccaccaaagctgacccttttcaacgccaagtataacaagataaagtccagaggcattaaggccaacgcctttaagaaactgaataacctgacttttttgtacttggaccataatgctttagagtctgttccattgaatctgcctgaaagccttcgtgtgattcacctgcagttcaacaatattgcctccatcacggacgatactttttgcaaggccaacgacacgtcctatatccgggatcggatcgaagagataaggttggagggaaatcccatcgtactgggcaaacacccaaacagtttcatctgtttaaagagactccccatcgggagttacttttag

SEQ ID NO: 127462 - DNA, 897 bp, synthetic construct
  misc_feature 1..897: note = Description of Artificial Sequence: Synthetic coding sequence
  source 1..897: mol_type = other DNA
atgaaaacgttgcagtccactctgttgttacttttactcgtgcccctgataaagcccgccccaccaactcagcaggactccagaatcatctacgactacgggacagataacttcgaagagtccatcttcagccaagactacgaagataaatatctggacggcaaaaacattaaggaaaaagagaccgtgataattccaaacgagaagtcactgcagttgcagaaggatgaagcgataacacccttacctccaaaaaaagaaaacgacgagatgccaacctgtttgctgtgcgtgtgcttgagtggcagcgtgtactgcgaggaggtcgacatcgacgccgtgcctccattaccaaaagagagcgcatatctgtatgccagattcaacaagatcaaaaaattgactgccaaagactttgccgatataccaaacctcagacggctggatttcactggaaatctgatagaggatatcgaggatggtaccttcagtaagctatcattactggaggagttgtccctggctgagaatcaattgcttaagctcccagttttacctcccaaattgaccctgttcaatgcgaaatacaacaaaattaagtcaagaggaatcaaagcaaacgcctttaagaaactgaataatctgacttttttgtacctagaccataatgcactcgaaagtgttccactgaatttgccagagagtctgagagtaattcatctgcagttcaacaacattgcttccattaccgacgacaccttttgtaaagcaaacgacaccagttatattagggaccggatcgaagaaattcggctggaagggaaccctatcgttctcgggaagcatccaaattcatttatctgcttgaagagactgcctatcggttcttatttttag

SEQ ID NO: 127463 - DNA, 807 bp, synthetic construct
  misc_feature 1..807: note = Description of Artificial Sequence: Synthetic coding sequence
  source 1..807: mol_type = other DNA
atgctggcaaaaattagtactacttggaagctcttcttgaaactccttggcccagagatacttttgagtagccttaagagccgacactctttctcacactccccgtctcacctcgggttaatgcatcggcacgaacacctcttgcgaaagactactaagaacttcaagaccgctactacaactttacagtcaactctactcttgttactccttgtccctctaattaagcctgctcctcccacacaacaggattctaggatcatttacgactatggcaccgacaactttgaggagtcgatcttcagccaggactacgaggataagtatctagatggcaaaaacattaaggagaaggagaccgttattatccctaatgagaagagcctgcaactgcaaaaggatgaggctattacgcccctgccaccaaagaaggaaaacgacgagatgcctacttgcttgttatgcgtttgtctttcaggctcggtatactgtgaagaggttgatatcgatgccgtcccccccttgcccaaagagtctgcatacctgtacgcccgattcaacaagattaagaagttgaccgctaaggactttgctgatatccctaacttgcgccgcctggacttcacaggaaatctcatcgaggatatcgaggatggaaccttttccaaattaagtctcttggaggagttgtctctcgccgagaatcagctcttgaaactgcccgtccttccccccaagctgactctgttcaacgcgaagtataacaagatcaaaagccgtggcatcaaggccaatgcttttaaatag

SEQ ID NO: 127464 - DNA, 1842 bp, synthetic construct
  misc_feature 1..1842: note = Description of Artificial Sequence: Synthetic coding sequence
  source 1..1842: mol_type = other DNA
atggctgccgaaacgctgctgtcctctctgctgggacttctgctgctcggcttgctcttacctgccagcctgaccggcggggtcggaagccttaatctcgaagaactttctgaaatgcgctatgggattgaaattctgcctctgccagtgatgggtggccagagtcagtcaagcgatgtggtcatcgtaagttcaaagtataagcagcgttacgagtgcagactgcccgccggggctattcattttcagcgtgagagagaggaggaaactccagcctaccagggtccggggattcccgaactcctctccccaatgagagatgcaccctgccttctgaagactaaagattggtggacgtacgaattttgttacgggaggcacattcagcagtaccacatggaagactccgagatcaaaggggaggtcctttatctggggtattaccagagtgccttcgactgggatgatgagacagccaaagcctctaaacagcaccgtttgaaaagataccattcacagacctacggaaacggcagtaagtgtgacctgaacggccgcccccgtgaggctgaagtacgcttcttgtgtgacgaaggcgcaggcatatctggagactatatcgaccgtgtggacgaaccactctcttgcagctatgttttgactatccggactcccaggctgtgcccgcatcccttacttagaccaccgccttccgctgccccccaagccatactctgccacccttcactgcagccagaggagtacatggcttatgttcagcggcaagcagtggactctaagcagtatggcgataagataatcgaggagctacaggatttaggtccacaggtctggagtgagaccaagtcaggagtggcccctcagaaaatggccggagctagccccaccaaggacgattcaaaggattcagacttctggaaaatgttaaacgaaccagaagatcaggccccgggaggagaagaggtgccggccgaagagcaggacccttcccccgaggccgccgacagtgcctccggggcgcctaacgacttccagaacaacgtgcaagtgaaagtcattagatcacctgccgaccttattcgtttcatcgaagagcttaaaggggggaccaagaaaggtaagccaaacattggtcaagaacagcccgtcgatgacgccgcggaggttccccaacgggaaccagaaaaggaacgcggagaccctgagcggcagcgtgagatggaggaggaagaagatgaagacgaagacgaagacgaggatgaagatgagaggcaattactcggagagttcgaaaaagagctggaggggatcttactgccttccgacagagatcgccttcgcagcgaggtgaaggccgggatggaacgggagcttgagaatataatccaagaaacggaaaaggagcttgatccagacggcctcaagaaagaaagcgagagggatagagctatgctggctctgactagcactctaaataagctgatcaagcgcctggaggagaaacagtctccagaactggtgaagaaacacaagaaaaagcgcgtcgtgcccaagaagccaccaccatcacctcaaccaactgggaaaatagagataaagattgtcaggccctgggctgaaggtactgaggagggcgctcggtggttgactgatgaagatacccggaacctaaaggagattttcttcaacattttagttcctggagcagaggaggctcaaaaggagcgacagcgccagaaggaactggaaagtaattatcgtcgcgtgtggggcagccccggaggagagggcaccggagacctcgacgaatttgacttctag

SEQ ID NO: 127465 - DNA, 1959 bp, synthetic construct
  misc_feature 1..1959: note = Description of Artificial Sequence: Synthetic coding sequence
  source 1..1959: mol_type = other DNA
atggccgccgagacactgctctcctcactgttaggcctgctgctgctcgggctgctgctgccagcctcactgactggtggggtgggatctcttaatctggaggagctgagcgaaatgcgctacggaatagaaatcctacctctcccagtgatggggggtcagagtcagtctagcgacgtggttattgtgagttcaaaatacaaacagcgatacgaatgtaggttgcctgcaggtgccatccacttccaacgggaaagagaggaagagaccccagcctatcagggccccggaatccccgaacttctgagtcctatgcgggacgctccctgcctgttgaaaacaaaagattggtggacatatgagttctgctatggtcgacacattcagcaatatcacatggaggatagcgagatcaaaggagaagtgctttatcttggttactaccagagtgcctttgactgggacgatgagactgctaaagcctccaaacagcatcgactaaagcgttatcattcccagacttatggtaacggaagtaaatgtgacctgaatggcaggccacgagaggccgaagtccggttcttgtgtgacgaaggggccggaatttcaggagattatattgacagggtggatgagcccctgagttgctcatatgtgctcactattcgcaccccccgcctgtgcccgcaccctctgctcagacctccgcctagtgcagccccacaagcaattctgtgccacccttcactacaacctgaagagtatatggcatatgtgcagagacaggcagattctaaacagtacggtgataagatcattgaggagctgcaggacctgggcccgcaggtgtggtctgagaccaaatctggtgtggcaccgcagaagatggcgggagcttcgcccaccaaggacgactccaaggattctgatttctggaaaatgctgaatgagccagaagaccaggctcccgggggagaggaggtgccagctgaggagcaggatcctagtcctgaggcggcagatagcgcgtccggtgccccaaacgacttccagaataacgtccaggtgaaggttattagaagtccggcagatctgatcaggttcattgaagagctcaagggtggcaccaaaaaaggcaaaccgaatatcggacaagagcagccagtcgatgacgccgctgaagttccacagcgggagcccgagaaggaaagaggagaccccgaacggcagcgagagatggaagaagaagaagacgaagacgaggacgaagacgaagacgaggatgaacgccagctgttaggtgaatttgagaaggaattggaaggaattctactccctagcgaccgggaccgactaagaagcgagactgagaaagagctcgatcctgatgggcttaagaaggagtctgaacgagaccgtgccatgctcgccctgacaagtacattgaataagctgatcaaaagattggaggaaaaacaatcccctgaactggttaagaaacacaagaaaaagcgagtggtgcctaagaaaccccctcccagcccccagcccaccgaggaggacccagagcaccgggtgagagtccgtgtgacaaaacttcgtctcggcggtcccaatcaggacctgaccgttttggaaatgaagcgcgagaatccacagctgaaacagatagagggcctggtgaaagagttgctggagcgcgaggggctgaccgctgccggcaaaattgagatcaagatcgtccgaccttgggcggaaggcactgaagagggagcaaggtggcttactgacgaagacacgcggaatctgaaggaaatattttttaatattttggttcccggagctgaggaggcgcagaaagaaaggcagcgtcagaaggagctggagagtaactataggcgggtgtggggttctcctggtggcgaaggtaccggcgacttggatgagttcgatttttag

SEQ ID NO: 127466 - DNA, 1683 bp, synthetic construct
  misc_feature 1..1683: note = Description of Artificial Sequence: Synthetic coding sequence
  source 1..1683: mol_type = other DNA
atggctgcagaaacactgttatccagcctactcggcctgcttttgctggggctgctgctgccagcttctctgaccggaggagtaggctccttgaacctggaagaactctccgaaatgcgctacggtatcgagatcctgcctttacctgtcatgggcggccagtctcagtcgagcgatgtggttatagtcagcagtaagtataagcaaagatacgaatgccgtctcccagctggcgctattcacttccagagggagagggaggaagagacgcccgcttatcaggggcctgggatccccgaattgttatcgccaatgcgcgacgcaccttgcctcctgaagacaaaggactggtggacttacgagttctgttacggccgtcatatacagcaatatcacatggaagacagcgagattaagggagagtttctttgcgacgaaggcgcggggatctccggggactatattgatcgagtcgacgagccactgagttgcagctatgtgctgacgattcgcactcccagactgtgtccccaccccctgttgcggcccccaccttcggctgcaccacaagcaattctctgccatccctctcttcaacctgaggagtatatggcatacgtccagagacaggccgacagtaaacagtatggcgacaaaataatcgaagagctacaggacctcgggcctcaggtctggtctgagactaaaagcggcgtggctcctcagaaaatggctggcgcttcacccaccaaagacgattccaaagatagtgacttttggaagatgctaaacgagcccgaagaccaggctcctggaggcgaagaagtcccagcagaggaacaggacccatcgccagaggccgccgacagcgcatcaggggctccaaacgatttccagaacaatgtccaagttaaagtaatccgatctcccgccgacctcatcagatttatcgaagagctgaagggaggcactaagaagggaaaacctaacatcggtcaggaacaacctgtggacgatgccgcagaagtgcctcagcgtgaaccagagaaagaacggggcgatcctgagagacagagggaaatggaggaagaggaagatgaggatgaggatgaagacgaggacgaagacgagaggcagttgctgggcgagttcgagaaggagctcgagggcatcctgcttccatcagatcgtgatagactgcggtccgaggtgaaagcagggatggaacgcgagctcgagaacataattcaggagaccgaaaaagagctcgatcctgacggcctgaagaaggaaagcgaaagggacagagctatgttggcattaacctccaccctgaataagttgattaagaggctggaggaaaagcagagcccagagttagtgaagaagcataagaaaaagagggtcgtgcctaaaaagccccctccttcgcctcagccaactggcaaaatcgagattaaaattgtgaggccgtgggcagagggcaccgaggaaggcgcacggtggttgaccgacgaggacaccagaaatctgaaagaaattttcttcaacatcttggttccgggagcagaagaagcccagaaagaacggcaacggcagaaagaattggaaagcaattaccgccgcgtgtggggatcccccggcggcgagggcacaggagatcttgacgaatttgacttttag

SEQ ID NO: 127467 - DNA, 1743 bp, synthetic construct
  misc_feature 1..1743: note = Description of Artificial Sequence: Synthetic coding sequence
  source 1..1743: mol_type = other DNA
atggctgcagagactctcttgtctagcctcttaggtctgttactgctagggctcttactgccagctagcctgacaggcggtgtgggctctcttaacctagaggagctgagcgagatgcgatacggtattgagattctaccgctgcctgttatgggcggccaaagccagtcgagcgacgtggtaatagtaagtagcaagtacaagcaacgctacgagtgccggttgcccgcaggggccatccactttcagcgtgagcgagaggaggagacgcctgcctatcagggccctgggattccggaattattgagcccaatgagggacgccccttgcctcctgaagaccaaggactggtggacttatgagttctgctatggcaggcacatccagcaataccatatggaggattctgaaatcaagggggaggttctatatttgggttattaccagtctgctttcgactgggacgatgagactgccaaattcctttgtgatgaaggagccgggattagcggcgattacatagacagagtcgatgagcctctgtcgtgttcttacgtgctaacaatcagaactcccaggctctgcccgcaccctctccttaggcctcccccttctgctgccccacaagctattctgtgccacccctctttacagcctgaggagtacatggcctacgtgcaacggcaggccgtcgactcaaagcagtacggagataagattatcgaagaactgcaggatctcggtccccaggtgtggtcagagacaaagtccggcgtagcgccgcagaaaatggccggggctagcccgaccaaggatgattctaaggacagtgatttctggaaaatgttaaatgagccagaggaccaagcccccggaggagaagaagtgccagccgaggagcaggatccctcccctgaagccgcggactcagcctctggcgcgccaaacgattttcagaataatgtgcaagtaaaggtgattcgctcacctgctgacctcatccgttttatcgaggaattgaagggagggaccaagaaaggaaaacctaatattggccaggagcagcctgtggacgacgcggcagaagttccccagcgcgagcccgagaaggagcggggtgaccccgagaggcagcgcgaaatggaagaagaagaggacgaggatgaagacgaagacgaggatgaggacgagcgacagctcctgggggaatttgagaaggagctagaaggaatactgttgccttctgacagggatagattaagatccgaggtcaaggctgggatggagcgcgagttggaaaacatcatacaggagaccgagaaagagctcgaccccgacggactcaagaaggagagtgaaagggatcgggctatgttagctctgactagcacgttgaacaagctgatcaagagactggaggaaaagcaatcccctgagttagttaagaagcataagaagaaaagagtggtgcccaagaagcccccaccttccccccagcctactggcaaaatcgaaatcaaaatagtcaggccctgggctgaagggacagaggagggagcgcggtggctgacggacgaggacacccgcaatctgaaagaaattttctttaatatcctggttcccggcgccgaagaagcacaaaaagagcgccagaggcagaaagaactcgagagcaactaccgacgcgtttggggcagtcctggcggtgagggaacgggcgacctggacgaatttgacttttag

SEQ ID NO: 127468 - DNA, 2004 bp, synthetic construct
  misc_feature 1..2004: note = Description of Artificial Sequence: Synthetic coding sequence
  source 1..2004: mol_type = other DNA
atggccgcagagaccctgctgagtagcttgttgggattgttactcctgggcctgttactgcccgcatctctgacgggcggagtcggatcccttaacctggaagagttgtctgaaatgaggtatggcattgagattttaccactgcccgtcatgggaggacagtcacagtcctccgacgtggtaatcgtaagtagcaagtataaacagcgatacgaatgccgccttccagcgggtgcaatccattttcagcgagaaagggaagaagaaacgccagcgtaccagggcccaggtatcccagagctcctttcccccatgagagacgccccttgtctactgaaaacaaaggattggtggacctatgaattttgttatgggagacacatacagcaataccatatggaggactcagaaattaagggcgaggtgctctatctgggctactaccagtctgcgttcgactgggatgacgaaaccgctaaggccagcaagcaacaccgactgaagcggtaccactcccagacctatggaaatgggtctaaatgtgacttgaacggtcggcctcgggaggctgaagtgcgctttctgtgcgacgaaggcgccgggatcagcggcgactatattgaccgggtggacgagccactgtcctgtagttacgtattaacaatcagaaccccacgactgtgcccccatcctctcttacgtccccctccgagtgctgccccacaagccatcctttgtcacccaagcctgcagcccgaggaatacatggcctatgtacaaaggcaagccgattctaaacagtacggtgataaaataatcgaagaattgcaggacctggggcctcaagtctggagtgagactaaatccggagtggcccctcagaaaatggcaggcgcctcgcccacaaaagacgactccaaggactccgacttctggaaaatgcttaatgaacctgaggaccaggccccaggcggcgaggaagtaccagccgaagaacaggatccgtcgcccgaggccgctgacagcgcatcaggggcacctaacgacttccagaataatgtgcaagtgaaagtcatccggtcccctgccgatctcatccggtttattgaggagctgaaaggtggcacaaagaagggcaagccaaatatcggccaagagcagccagtggatgacgctgcagaggtgccccagagagagcctgaaaaggagcgtggagatccagagcgtcagagagagatggaggaggaagaggacgaggacgaggatgaagatgaagatgaagacgaacgacaactgctgggtgagttcgagaaagaactggagggcattctcctgccatcagatcgcgaccgtttaaggtccgaggtgaaggccggtatggagagagaattggaaaatatcatccaggagaccgagaaggagcttgatcctgatggcctcaaaaaagaaagtgaaagggatcgcgctatgttggccttaacttccacactgaacaagctgataaagcggctggaggaaaaacaaagtcccgaactcgttaaaaagcacaaaaagaaaagagtggtcccaaagaagccacccccctctccgcagcccacagaggaggacccagagcatcgggtacgcgtgcgagttacaaaattaaggttgggtggaccaaatcaggacttgacagtgttggaaatgaagcgggagaacccacaactgaagcagattgaaggactggtgaaggagctcctggaacgggaggggttaacggctgctggcaaaatcgaaattaagattgtgagaccctgggccgaaggcactgaagagggcgcaaggtggctgaccgacgaggatacccgaaatttaaaagagattttcttcaatattttggtgcctggcgctgaagaagcccagaaagaaaggcagcgccaaaaagaactcgaatctaactatcgccgggtgtggggctcccccgggggggaggggacgggcgacctggacgagttcgatttttag

SEQ ID NO: 127469 - DNA, 1794 bp, synthetic construct
  misc_feature 1..1794: note = Description of Artificial Sequence: Synthetic coding sequence
  source 1..1794: mol_type = other DNA
atggccgccgagaccctcctcagcagccttcttggccttctcctgctaggcctgctcctgcccgcctcactcactggaggggtcgggagtcttaacctggaagaattgagtgaaatgcggtacggcattgaaatactacctcttcctgttatgggtggccagagtcagtcttctgacgtagtgatcgtcagctccaagtacaaacagaggtacgagtgtcgtttaccagcgggtgccattcacttccaaagggagcgtgaagaggagacccccgcgtaccagggccccggaatccccgagttgctctctcctatgagagatgcaccttgtctacttaagacaaaagactggtggacatacgagttctgttatggacggcacattcagcaatatcatatggaagattccgagattaagggtgaggtcttatacctcgggtactaccagtcggccttcgattgggacgatgagaccgctaaagcaagcaagcagcacagattaaaaagatatcatagccagacatacggaaatggttctaagtgtgacctaaatggcagacctagagaggcagaagtccgcttcctttgcgatgagggcgcaggcatatctggggattacatcgatcgcgtggacgaacccctgtcttgctcctatgtcctgaccatcagaacaccgcgcctgtgtcctcatcctctgttgaggccgcccccctccgctgctcctcaggctattctgtgtcaccctagcctgcagcctgaggagtatatggcctatgtccagcgccaggctgatagcaagcaatacggtgataagataatagaggagttacaggacctgggtccacaagtctggtccgagacaaagtcaggcgtggccccacagaagatggcgggggcctcaccgaccaaagacgattcaaaggattccgatttctggaagatgctgaacgagcccgaagatcaggcccctgggggagaggaagtcccggccgaagagcaggatccctccccagaggccgccgactctgcgtctggggccccaaatgactttcagaacaatgtccaggtgaaggtgatcaggtcacccgccgatttaatcaggtttatcgaagagttaaaaggagggactaagaagggcaaacccaacattggacaagagcaacccgttgatgatgctgctgaggtccctcagagggaaccagaaaaagaacgcggagatcctgagagacaaagggaaatggaggaggaggaggacgaggatgaggatgaggatgaagacgaggatgagaggcagctactcggtgagttcgagaaggaactggagggcatcctgctgccctccgatagagatcgcctgcggagcgagactgaaaaggaactggatcccgacggcctgaagaaagaaagcgagcgcgaccgggccatgctggctttaacttccaccctgaataaactcatcaagaggcttgaagagaagcaatcgcccgagttggttaagaaacataagaagaagagggtggttccaaagaaacccccaccttccccacagcccacaggcaagattgagattaaaattgtgaggccatgggcagagggaactgaggagggcgctaggtggctcacagatgaggacactcgcaatctgaaggaaatcttctttaatatcctggtgcccggggcagaagaagctcaaaaagagcggcagaggcaaaaggagctcgagagtaactaccgacgggtctgggggtctcccggaggggagggcacaggcgatctggatgagttcgacttttag

SEQ ID NO: 127470 - DNA, 1839 bp, synthetic construct
  misc_feature 1..1839: note = Description of Artificial Sequence: Synthetic coding sequence
  source 1..1839: mol_type = other DNA
atggcagccgagactttattgtcttccctgttgggactacttctgctgggactcctgctcccagccagtctgacaggtggtgtgggaagcctgaatctagaagagttgtctgagatgagatatgggatcgaaatacttcctctacctgttatgggaggtcaatcacagagcagcgatgtggtgatcgtgtcatctaagtataagcagaggtacgagtgcaggcttcctgcaggcgccatccatttccaacgcgagagggaagaggagacccctgcctatcagggtcccggaattccagaacttctctccccaatgagagatgctccttgcctgctgaaaacgaaagactggtggacatacgagttctgctacggccgccacattcagcagtaccatatggaagattctgaaatcaagggagaagtcttgtacctcggatactaccagtccgcattcgactgggatgatgagaccgccaaagcttctaaacagcataggctcaaacgataccacagtcagacctatggcaacggcagtaagtgcgatttgaatggccggccaagggaagccgaggtgaggtttctctgtgacgagggcgctggcatttctggggactatatcgaccgtgtggacgagccactgtcttgctcgtacgtgctcaccattaggacccctagattgtgcccacacccacttcttcggccccctccatcggcagcccctcaagctattctctgccacccatctctgcagcccgaggaatacatggcctacgttcaacgccaggccgactcaaaacagtacggagacaagatcatcgaagagctgcaagacttgggaccccaggtgtggtctgagacgaagtcaggagttgcccctcagaagatggcgggggccagtcctacaaaggacgactccaaggactctgacttttggaaaatgcttaatgagccagaggatcaagccccaggcggcgaggaggtgcctgcagaagaacaggatcccagccctgaggccgccgattccgcgtcgggagctcctaatgacttccagaataatgttcaggtaaaagtgatccgctctcccgcggatcttattagattcatcgaggagctcaaaggaggaactaagaagggcaagccaaacattggtcaggagcagccggttgatgacgctgctgaagtgccccagagggagccagagaaggaaaggggcgacccagaaaggcagcgcgagatggaagaggaggaggacgaagacgaggatgaggatgaagacgaggatgagaggcaactcctaggagaatttgagaaggaactcgaagggattctgctcccatcagatagggacaggctacggagtgaggttaaggccggcatggaaagagaattggagaacatcatccaagaaactgaaaaagagcttgatcctgacggcttgaagaaagaatcagagcgcgatagggcaatgctcgctctgaccagtacactcaataagctgattaagcggctggaagaaaaacaaagtccagaactggtcaagaagcacaaaaaaaaacgggtggtccccaagaagccgcctccatctcctcagcctacggggaaaatagagattaaaatcgtacggccttgggccgaaggaactgaggaaggtgctagatggctcactgacgaagatacccgcaatctgaaggaaatattcttcaatatactggtgcctggtgcagaggaggcccagaaggagcgtcaaaggcagaaggaactggagtccaattatcgacgcgtgtggggctcaccaggtggggaaggtacgggggacttggacgagttcgatttttag

SEQ ID NO: 127471 - DNA, 3462 bp, synthetic construct
  misc_feature 1..3462: note = Description of Artificial Sequence: Synthetic coding sequence
  source 1..3462: mol_type = other DNA
atgtcacaggagccaaccacctattcactgtttctgtttttatttttgagccatggtgtcagctcctacaccgtaccaaattctaggcaggatctacatcccttgctgcagaatatggccgaggagattatcgacggaagttaccttaatgcccttctggatctgattcaattccagtccagccatgtttggacggacgacttgagccatcgcgtcttggcttacctgaattcaaggaacgtggccttcaccatcccttccctgcaggctgccgtggagaatcacctggaacagcgtctgcatcagccccagaaactcctcgaagaccttcgcaagacagacgcccagcagttccggactgccatgaagtgcctgcttgaggacaaaaaagatggcctggacctgaaagacatcattatcgatctgggagaaattagagagagagcgctccagagccctggtgtgaacagatccctcttcctgattaccctcgaacgatgttttcagatgctcaacagcctggaatgcgtggaaatcctggggaaggtgctgagaggaagctctggctcctttttgcagcccgatattaccgaacgtctgcctcgggatctccgggaggatgcttttaaaaatctcagtgcagtgtttaaagatctatatgataaaacctcggctcactcacagcgcgccctttacagctggatgaccggaatcctccagaccagcagcaacgccaccgatgactcagccagctgggtgagcgcagagcatttatgggtgctgggccggtacatggttcatctcagtttcgaagagatcacgaaaatatctcccatcgaaattgggctatttatctcatacgataacgcaaccaagcagctggatatggtttatgatatcacacctgaacttgcccaggcttttcttgagagaatctcctcaagcaatttcaatatgagaaataccagtaccatacacaggcaggcccatgagctgtgggcactagaaccttttcccaagatgttgggtctgcttgtgtgcttttacaacgatctggagttactcgacgccaccgtggcgcaggtgctactttatcagatgatcaagtgctctcatctgcgcggcttccaggccggagttcagaagctcaaggcggaactgttggacattgctatggaaaatcagacgctaaacgaaaccctaggcagtctcagcgacgccgtggtgggtctgacttacagtcaactagaaagcctctcaccagaagctgttcacggagcaatcagcaccttaaaccaggtcagtggttgggcaaagagccaggtgataattttgtcagccaaatatctggcccacgagaaggtcctgtccttctacaatgtctcacagatgggggccctgctcgcaggagtgagtactcaagccttttgtagcatgaagcggaaagatataagccaagtgctgaggagcgccgtctctcagtacgtgtccgatttaagccctgctcagcaacagggaatactgtccaaaatggtacaagccgaggacactgccccaggcattgtggaaattcagggagcgttcttcaaagaagtcagcttgttcgatctccgaaggcaacctggatttaactccactgtactgaaggacaaagagcttggacggtcccaggcactcttcctctatgaactgctcctcaagactacccggaggcccgaggaacttctgtctgcggggcaacttgttaagggtgtcacctgcagccatattgatgctatgtctaccgacttcttccttgcacacttccaagactttcagaacaattttgcactccttagtccataccaggttaactgtttagcttggaaatattgggaggtgtccaggctgtccatgcccccttttctgctagccgctctgccggctcggtatctggcttcagtccccgcttcccagtgtgtccccttcctcatttccctgggcaagtcatggttggactccctggtcctggattcacacaagaagacctcagtgctgcgcaaagtacagcaatgcctcgatgactctatagcagacgaatacactgtcgatattatgggcaatttgctgtgccatctgccagctgccattatagatagaggcatctcaccacgagcttgggctacagcccttcatggcctacgagactgtccagatctaaatccagagcagaaggcagccgtgagactgaagcttcttggtcagtatggtctgcctcagcactggacagccgagactactaaggatctgggaccttttctcgtgctgttctccggggacgaactatctagcatcgcaaccaaatttcccgaaatcctgctccaggccgcttcaaaaatggcccgtacactccccacaaaggaatttctgtgggctgtctttcagagtgttcggaacagcagtgacaaaataccttcgtatgatccaatgcccggatgccatggagttgtagccccatccagcgacgatatttttaaactggcagaggccaacgcctgctgggcccttgaggacctgaggtgcatggaggaggacacattcatccgaactgtggagctgttgggcgctgtgcaaggattctcccgaccccaattaatgacactgaaagaaaaagccatccaggtctgggacatgccttcctattggcgcgaacaccacatcgtttcgttaggaagaatcgcactggcccttaacgagagtgaactcgagcaactcgatttaagttcaatcgacacagtcgcttccctgtcatggcagactgagtggactcctgggcaggcggagtcaattttacaggggtacttagatgactctggctactcgatacaggacctgaagtccttccacctcgtgggcctcggggccaccctatgtgctatcaatattacagagatccctctgattaagatctcagaatttagagtggtggtagctcgaattggaactctgctatgctctacccacgtgctggccgaatttaaaagaaaagctgaagtggtcttcggcgacccaacagagtggacctcatctgtgctgcaggaactcggaacaattgccgccggcctgacaaaggcagagctgaggatgctggacaaggatcttatgccatattttcagccttcggccatcaagtgtttgcctgacgaaatcttcaaagagctctccgccgagcagatcgccagcctgggccctgagaacgccgcagccgtgacacacgctcagagaagacgcctgtccccactgcagcttcagtcacttcagcaagcactggacggtgccaaaacacatagctggcaggatgcacccgcttccgctggtcccacacgtacatccagtagtcgctcccccgccggtgcgcttcagagctgggggctgtggctgggctgccctctcctcgtgctgatggccaaattactgtggtag

SEQ ID NO: 127472 - DNA, 1647 bp, synthetic construct
  misc_feature 1..1647: note = Description of Artificial Sequence: Synthetic coding sequence
  source 1..1647: mol_type = other DNA
ccccgagcggtgtgggtggaggcacgagggggcgcccagcaccccacaatgagaagaaccgctcctctacataggggtacttggtctaagatgtctatcattctcagagcccggtatctggcgagtgtgcccgcttctcaatgtgtcccctttttaatcagccttggcaaatcttggttggacagtttagtgttggatagtcataaaaaaacctctgtgctccgaaaggtgcagcagtgtctggatgattctattgccgacgagtacaccgtcgatatcatggggaacctgctttgtcatctacctgcagctattatcgatcgaggtatatccccaagggcttgggcaacagccctgcatggactgagggactgtccagatcttaatcctgaacaaaaagccgctgtgagattgaaactgctgggtcagtacggtctcccccagcactggaccgccgaaacgacaaaagaccttggtcccttcctggtcttatttagcggcgatgaactttcatctatagctacaaagttcccggaaatcctgctgcaggctgcttctaagatggcaaggacattaccaacgaaggaatttctctgggctgtgttccagtccgtgcgtaactcctcagacaaaatcccgagctacgaccccatgcccggttgtcacggcgtggtggcgcccagtagcgatgatatcttcaagttagcagaagctaatgcatgttgggctctggaggacctcagatgtatggaggaggacacctttatcagaacagtggagttgctgggcgcggtgcagggctttagtcgacctcagctcatgacacttaaagagaaggccatccaggtttgggacatgccatcctattggcgggaacatcatatcgtatcattgggtcgaatcgctttggcgctgaacgaatctgagttagaacagctagacctgagtagcattgacacagtagcctctttgagttggcagactgagtggacccccggacaagctgagtctattctgcagggctatctagatgatagcggctatagcatccaggacctcaaatcattccaccttgtaggactgggcgcgactctgtgtgcaataaatattaccgagattcctcttattaagattagcgaattccgtgttgtggtggcaagaatcggcaccctcctgtgttccacccatgtgctggcggaattcaagaggaaggccgaagtggtctttggtgaccccacggagtggacctcaagcgtgctccaggagctgggaacaatagctgcagggttgacgaaagcagagctgcggatgctggacaaggatttgatgccttacttccaaccgtcggccattaaatgcctaccagatgaaatctttaaggaactgagcgcagaacagatagcatccctgggccccgaaaacgcggccgcagtcacacacgcccaaaggagacgattaagtcctctccagttgcagtccctacagcaagctcttgatggcgcaaagacccacagttggcaggatgcccccgcttcagccggtccaacccgtacatcatcttctcgcagccctgccggcgcgctgcaaagttggggcctgtggctgggatgtcccctgttggtccttatggcaaaactgctttggtag

SEQ ID NO: 127473 - DNA, 3183 bp, synthetic construct
  misc_feature 1..3183: note = Description of Artificial Sequence: Synthetic coding sequence
  source 1..3183: mol_type = other DNA
atgggtaactcgatcacctatagggaccaggcggcagtggaaaaccatctagagcagcggctccaccaaccgcagaagctcctagaggatctgcgcaagacagacgctcagcagtttagaacagcgatgaaatgtctcttggaggacaaaaaagatggcctcgatctaaaagacatcatcatcgatctgggcgagattagagaacgcgctctgcagtcccctggagtcaaccggtctctatttctgataacccttgagcggtgcttccaaatgctgaattccttggagtgtgtagagattctcggcaaagtgctgagggggtcgtctggcagctttttacagcccgacattacagaacgactgccacgagacctcagagaagacgcctttaagaacctgagcgcagtgttcaaagacctgtacgataagacatccgctcattctcaaagagctctgtactcttggatgacggggatcctgcaaacatcatcaaacgccactgacgattcagccagctgggtatccgccgagcatctatgggtgttaggaagatatatggtgcacctgagcttcgaggagataaccaaaatatcacccatcgaaattgggctgttcatatcctatgataatgctactaagcagctggacatggtatatgatattacaccagagttagctcaggcatttctggaacgcatttcttctagtaattttaacatgcggaacacgtctaccatacacagactaggtcttctcgtttgtttctacaacgacctggaattgctcgatgccacagtggctcaggtccttctgtaccaaatgattaaatgcagccacttgaggggttttcaggcgggagtgcagaagctcaaggccgagctactggacattgccatggaaaaccaaactttgaatgagactttagggtccctgtcagacgctgttgtcggtctgacatactcacagcttgagtctctttctcctgaggctgtgcatggggccattagtaccctcaatcaggttagcggatgggccaagtcccaggtgattattttatccgccaagtacttggcccatgaaaaggtgttgagtttctacaatgtgtcgcagatgggagcactcctggcaggggtgagcacacaggcattctgctctatgaaaaggaaggacattagccaggttctccgcagcgccgtctctcagtatgtgtccgacctctcacctgcccagcagcaggggatcctgagcaaaatggtgcaggctgaagataccgctcccggaatagtcgaaatccagggggcctttttcaaggaggtcagcctgttcgacttacggagacagcctggctttaattccacagtgctgaaagataaggagctgggacgcagtcaggcactgtttttatatgagctgctgttgaagaccacccgcaggcctgaggagctcctgtctgctggccagctagtaaaaggggtgacatgctctcatattgacgccatgagtactgatttcttcctagctcactttcaagattttcagaacaactttgccttgctgagcccctatcaagtgaattgcctggcttggaagtattgggaagtgagccgactttccatgccaccattcctgcttgctgccctgccagctaggtatttggcttctgtgcctgccagccagtgtgtccctttcctgataagcctgggaaagagttggctcgatagcctggtgctggactcacacaaaaagacgtccgtgcttaggaaggtacagcaatgtttagacgatagtattgcagatgaatatacagtcgacataatgggcaaccttctgtgccatctgccggctgccatcattgatagggggatctccccacgcgcctgggctacggccctgcatggcttgcgcgactgccctgatctgaatccggagcaaaaagccgctgtaagacttaagctcctcgggcaatatggcctaccccagcactggaccgcagagactaccaaagacctggggccatttctcgtattattttcaggcgatgaactgtcaagtatcgccacaaaattccccgagatcctgcttcaggccgctagcaagatggcccggacccttcccaccaaagagtttctgtgggcggtgtttcagagcgtcaggaacagctccgacaagattcccagttatgaccccatgccgggatgtcacggagtggtggcgccctcctcagacgacatctttaaactggctgaggccaacgcttgttgggctttagaggacctgcgttgtatggaggaggatactttcatcagaaccgtggaacttttaggagcagttcaaggattctctcgcccacagctcatgacccttaaagaaaaagccatccaggtttgggacatgccgtcttattggcgcgagcatcacatcgtgtccctgggcaggatcgcactggcactgaatgagtccgagctggagcagctcgatctgtcgtctatcgatacagtagcatctctgtcttggcagacagagtggacccctggccaggccgaatcaatcctccagggctacttggatgatagcggctattcaatccaggatctcaaatcctttcacctagtaggcttgggtgctacgctgtgcgcaatcaacatcacagagatacctctaattaaaatttcagagtttcgagtggttgtggctaggatcggcacattgctgtgttccacacacgtgctggccgagtttaaaagaaaggcagaagtggtgtttggagatccgaccgagtggacatcatccgtcctccaggaattagggactatcgccgccgggctgacaaaggctgaactcagaatgttagacaaagacctgatgccctattttcagccctccgctatcaagtgcctgccggacgaaatattcaaagaactgtcggccgaacagattgccagcctcggcccagagaatgccgctgccgtgacccatgcccagcgcagaagactcagccccttgcagctgcaaagtctccagcaggccttggatggtgcgaaaacacacagttggcaggatgctccagcctccgccggaccgacgcggacatcgagtagcagaagtcccgctggagccctccagagctggggactatggctggggtgcccactgcttgtcttgatggctaagctgctgtggtag

SEQ ID NO: 127474 - DNA, 2448 bp, synthetic construct
  misc_feature 1..2448: note = Description of Artificial Sequence: Synthetic coding sequence
  source 1..2448: mol_type = other DNA
atgtttagattgggtctcttggtgtgcttctataatgatctggaactgcttgacgctactgtcgcgcaagtgctgctctaccagatgatcaagtgttcccaccttcgaggtttccaggctggtgtgcagaaacttaaggccgagttgctggatattgccatggaaaaccagaccttaaatgaaactctcgggtctttgtctgacgccgtggtggggttgacatactctcagctggagtccctgagtcccgaggctgtccacggggccatctcaacacttaatcaggtttcaggatgggccaaatcgcaggtgattatcctcagcgcaaaatacctagcgcacgagaaggtgttaagcttctacaacgtttcccaaatgggggctttgctggcaggggtgagcacgcaggctttctgcagtatgaagcgaaaggacatcagccaggtgttacgctcagccgtgagccagtatgtgtcagatctgtctcctgctcagcaacaggggatcttgagtaaaatggtgcaagccgaagatacagcccccggaatagttgaaattcagggcgccttctttaaggaggtgtccctgttcgatctccggagacagcccgggttcaacagcacagttcttaaggacaaagagctgggacgctctcaggccttattcctctatgagctactgcttaagacaaccagaagaccagaggagctgctttcagctggccaactggtgaagggagtgacctgcagccatattgacgccatgagcactgactttttccttgcgcatttccaggattttcagaacaatttcgctctgctcagcccatatcaagtcaactgtcttgcctggaagtactgggaggtaagtaggctgtcaatgcctccctttctgctcgcggctttacccgctcggtacctggctagcgtgccggcttcccagtgcgtgcccttcttgatttcattgggcaaaagctggctcgactccctcgtcttggactctcataagaagaccagcgtgttgagaaaagtgcaacagtgcctcgatgacagtattgccgatgagtacaccgttgatattatgggcaacctgttgtgtcacctgccagcggccattatcgaccgtgggattagtcccagagcctgggctactgccttgcacggtctgcgtgactgtccggacttgaatcctgagcaaaaggcagctgtccggctgaaactgttgggccaatacggcttgccgcagcactggactgcagaaactaccaaggatctgggccctttcctagtcctgttcagtggtgatgaattgagtagcatcgccacaaaattcccagagatcttactgcaagccgccagcaagatggctcggacacttcctactaaagaatttctgtgggccgtttttcagtctgtgcggaatagctccgacaagatccctagctatgacccaatgccgggatgtcacggagtcgtggcccctagctcggacgatattttcaagctggctgaagccaatgcatgttgggcgttagaggatttgagatgtatggaagaggatactttcattaggaccgtggagcttctaggggccgtacagggatttagcaggccccaactgatgactctgaaggaaaaggccattcaggtatgggacatgccttcctattggagggaacaccacatcgttagtctgggaagaattgccctggccctgaatgagagcgagctggagcagctagacttgagctccatagacaccgtggcttcactgtcgtggcagactgaatggacaccaggacaggccgaatccatcctccagggatatttggatgatagcgggtactccattcaagatctgaaatccttccatctagtcggcctgggagctacgctgtgtgcgatcaacattacggagatcccacttatcaagatttccgaattcagggtggtcgtagctcggatcggcacattgctgtgcagtacacacgtcctggccgagtttaagcggaaggctgaagtagtgttcggcgaccccaccgagtggacttccagcgtgttgcaagagctggggaccatcgcagcgggactcaccaaggccgagttgagaatgctggacaaggacctaatgccctactttcagccttcagccatcaagtgcctgcccgatgaaatcttcaaggagctgtcagccgagcagatcgcctccctcggacccgaaaatgccgccgctgtgacccatgcccagcggcgcagattaagtcccctccaactgcagtcccttcagcaggccctcgacggtgctaagacacattcgtggcaggacgcccccgctagtgccggacccaccaggaccagtagctcccggagtcccgccggcgctctgcagtcctggggcctttggcttggatgtccactcctggtcctgatggccaaactcctgtggtag

SEQ ID NO: 127475 - DNA, 3420 bp, synthetic construct
  misc_feature 1..3420: note = Description of Artificial Sequence: Synthetic coding sequence
  source 1..3420: mol_type = other DNA
atgagccaggaacctacaacctacagcctgtttctcttcctgtttctgtcccacggcgtgagcagttacaccgtacccaactctagacaagacctccaccccttgctccagaatatggctgaagagataattgacggatcatatctgaacgcccttctggatttgattcagtttcaaagttcccacgtgtggactgatgacctgagccatcgcgtactcgcttatttaaattcacgcaatgtggccttcacaataccatctctccaagctgccgtggaaaatcacctagagcagcggttgcaccagcctcagaagttgctggaggatctgagaaagaccgacgcccagcagttcagaaccgccatgaagtgtctgctggaggataagaaagatggcctcgatctgaaggacatcataatagatctgggcgaaattagagaacgcgccttacagagccccggggtgaacagaagcttgttcctgattactctcgaaaggtgcttccagatgttaaactctctggagtgcgtggaaatattaggaaaggtgttgagaggcagtagtggatcgttcctgcagcctgacataaccgagcgccttccacgggatctccgggaggacgctttcaagaatctgtcagcggtgttcaaggatctctacgacaaaacaagtgctcattcccagcgcgctctgtatagttggatgacaggcatcctgcagaccagttctaacgccactgacgactccgcctcttgggtctctgccgaacacttgtgggtgctgggccggtatatggtacatttaagctttgaggagattaccaagatctccccaattgaaatcggactcttcattagctacgataatgccaccaaacagctggacatggtgtacgatatcacgcccgaactcgcccaggccttcctcgaacgcatctccagtagtaacttcaacatgcgcaacacatccactatccaccgtcttggtctgttagtctgtttttacaacgacctggaattgttggacgcgaccgttgcacaggtcctgctgtatcagatgataaaatgctcgcatttgagaggatttcaagcgggagtgcaaaaactcaaggccgagttactagacatagcaatggagaaccagactctaaatgaaaccctggggagtttatccgacgccgtggtgggtctgacatattctcagctagagtctctcagcccagaagctgtacacggcgctataagcactctaaatcaggtttccggatgggccaaatcacaggtgatcatactgtccgccaagtacctcgctcacgagaaagtgctgtccttttataacgtgtctcaaatgggcgcactgctggcgggggtctccactcaggccttctgcagcatgaagaggaaagatatctcccaagtcctgcgcagtgctgtcagccagtacgtttctgacctgagcccagcccagcagcaagggattctcagcaagatggtccaagcagaggatacagcccctgggatcgtagagattcagggcgcgttcttcaaggaagtgagccttttcgatctccgcagacaacccggattcaatagcaccgtacttaaagacaaggaacttggccgctcacaggccctcttcctatacgaacttcttctcaagacaacacggcgtcccgaggaactactctccgcgggccaactggtcaagggcgtgacttgtagccacattgacgccatgtccaccgacttttttctcgcccattttcaggattttcagaataacttcgctctgctatctccttaccaggtaaactgccttgcctggaaatactgggaggtctcacgcctgtctatgccgcccttcttgctcgccgccctgccagccaggtacctggcttcggtgcctgcatcccagtgcgtgccattcctaatcagtctgggtaaaagttggctggacagcttggtgttggactcccataaaaaaacctctgttctcaggaaggtccagcagtgcttggacgacagcatagcggacgagtatacagtggacatcatgggcaacctactctgtcaccttccagctgcaataatcgataggggtatctccccccgagcatgggccacggctcttcacggattacgcgattgtccagacctaaaccccgagcagaaggcggccgtgcggctgaagcttcttgggcagtacggactgcctcagcattggactgccgaaactacgaaggacctcggtcccttcttagttctgttcagcggagatgagctctcatctatcgccacgaagtttcccgagattttacttcaggcagcatcaaaaatggctcggacactgccaacaaaagagtttctgtgggccgtgttccagtccgtacggaattcttctgacaaaatcccatcgtacgatcccatgccgggatgtcatggggtcgttgcgccctcaagtgatgatatctttaagctggcggaagccaacgcctgctgggccctggaggacttacgctgtatggaggaggacaccttcatccgtaccgttgagctgctgggcgctgtacaaggcttttccagacctcagctcatgaccttgaaggagaaagctattcaagtttgggacatgccaagctattggagggaacaccatattgtttcactgggaagaattgctctcgctttaaacgagtcagaactggagcagctggatctctcttctattgacacagtggcttctctctcgtggcaaactgagtggaccccaggccaggcagaatctatcctgcaggggtacctggacgatagcgggtattctatccaggatctgaagagcttccacctcgtcggacttggtgcaacactgtgtgcaatcaatatcacagagatcccgctaattaaaatttcggaattcagagtcgtagtggcccgtatcggcaccttgctgtgctctacccacgtactcgccgagttcaaacgcaaagcggaggtagtgttcggcgacccgacagagtggacgtctagcgtgctgcaagaactgggaactatagctgccggcctgactaaggccgagttgagaatgctggacaaggatttgatgccttacttccagccctctgccattaagtgcctaccagatgagatcttcaaagaactgtcggcagagcagatcgccagtctgggtcctgagaacgccgccgcggtaactcatgcccaacgcagaagactgtcaccgctgcagcttcagagcttgcagcaggcgctggatggagcaaagacacactcgtggcaggatgcccctgcctcagctggcccgacccggacgtcaagcagcaggtctccggccggtgccttgcagagctggggactgtggctggggtgtccactgctagttctgatggcaaagttgctgtggtag

SEQ ID NO: 127476 - DNA, 1434 bp, synthetic construct
  misc_feature 1..1434: note = Description of Artificial Sequence: Synthetic coding sequence
  source 1..1434: mol_type = other DNA
atgatcgcattcctcctgacatccgtgcttatgatcccccacgccggcggccaccctttagacaccccacacctccctcaggagctgcccccgggcctgccaaataacattaatataacatttttttcagggatgtttaaaaacgttgaatccgtcgcggaaatttttgattgtcttgggcctcatttcacatggctccaggctgtatttaccaatttccccgtgctcatccaatttgtgaacggtatgaaatgtgtcgcgggcctgtgtccccgggattttgaagactatgggtgcacttgccgcttcgaaatggaaggactgcctgttgatgaaagcgacagttgctgcttccagcaccggcggtgttatgaagaagccgccgagatggattgtttgcaggaccccgctaagttgagcaccgaggttaactgcgtgtccaaaaagatcatttgtgagtctaaagacaactgcgaacacctgctttgcacctgcgacaaggctgcaattgaatgcctggccaggtctagtctgaactctagtctgaaccttctggacacttccttttgcctggcccaaacgcccgagacgacaataaaagaagatttgactaccctgctgccgcgagtcgtacctgtggagccaactgacacctcccttacggcgttgagcggcgaggaagctggccatgaccaagagggtgtgggagcagccagagccacttcacctcccggtagcgccgaaatcgtcgccacgagggtcactgccaaaatcgttacgctggtccctgcaggaattaagagtcttggcctagcagtttcctcagtcgaaaacgaccctgaagaaaccacggaaaaagcctgtgacaggtttacgtttctccatctcgggtccggggacaacatgcaagtgatgccccagttgggtgagatgttgttctgcctgactagccgttgtcctgaggagttcgagtcttatggatgttattgtggacaggagggtcgtggtgaacctcgggacgatctcgacaggtgctgtctgagccatcactgctgcctggagcaggtccggcggctaggctgccttctggaacgcttaccttggtctccagtggtgtgtgtggaccatacgcctaaatgcggcggacagtccctgtgcgaaaagctgctgtgcgcctgcgaccagacagctgcagagtgcatgacctctgcctcattcaatcaatctctcaagtcaccaagtcgactggggtgcccgggacaaccagccgcctgcgaggattccctccaccccgtacccgctgcccccacactcggtagtagctctgaggaggattctgaagaagaccctcctcaggaagatctgggcagggcaaagcgatttctgagaaagagcctggggcccctgggcataggaccacttcatggccgatag

SEQ ID NO: 127477 - DNA, 1482 bp, synthetic construct
  misc_feature 1..1482: note = Description of Artificial Sequence: Synthetic coding sequence
  source 1..1482: mol_type = other DNA
atgattgcatttctgctgacatctgtgctaatgattccgcatgctggaggccaccccctggacaccccacatctgccccaagagctgcctcccgggctacctaataatatcaacattacgttctttagcgggatgttcaaaaacgtggaatcagtggcagagattttcgattgtttggggcctcactttacgtggttgcaggccgttttcaccaattttccagttctgattcagttcgtaaatgggatgaaatgtgttgcgggattgtgcccccgcgatttcgaggattacggttgtacctgtcgctttgaaatggagggtttgcccgtggacgagagtgattcctgttgcttccagcaccggagatgctatgaggaggctgctgaaatggattgcctgcaggacccggcgaagctcagcacagaagtgaattgtgtcagcaagaagatcatttgcgagtccaaggataattgcgagcatctcctgtgtacctgtgacaaggcagccatagagtgcttagcacggtcatcactaaattccagtctgaacctgctggatacttccttttgcttggcacagacacctgagactacgattaaggaagacttaactactctcctacctcgggtggtgcccgtcgagcctacagacacttcgcttacggccttgagtggagaagtggccgccgaaacggaagcagacaggttgatcactttaagcaaaaagaaagctgggcacgaccaagagggggttggcgccgctagagctacctctccccctggctccgcggaaatagtcgccaccagggtgactgcgaagattgtcaccctcgtgccggctgggatcaaatcgctggggttggctgtctctagcgttgagaacgaccccgaggagacgacagagaaggcctgcgaccgcttcacatttcttcatttaggcagcggagacaatatgcaggtcatgccacagttgggggagatgcttttttgtctcactagccgctgccccgaggagtttgaaagttacggttgttactgtgggcaagagggacgcggcgaaccccgcgacgatctggacagatgttgtttatcccatcattgctgtctcgagcaggttcggaggctcggttgcctgcttgagaggttaccctggagcccagttgtgtgtgtcgatcacacccccaagtgcgggggccagtctctctgtgagaaactgctgtgtgcctgtgatcagaccgccgctgaatgcatgactagcgcatcattcaaccagagcctcaagtcaccatcccggctcggctgcccaggccagcctgctgcatgtgaagatagtctgcacccagtacctgctgccccaacattgggctccagcagcgaagaagatagtgaagaggatccaccgcaagaggacctgggtcgcgccaaaaggttcctgcgcaagtccctcgggccattgggcattggccccctgcatggccggtag

SEQ ID NO: 127478 - DNA, 5994 bp, synthetic construct
  misc_feature 1..5994: note = Description of Artificial Sequence: Synthetic coding sequence
  source 1..5994: mol_type = other DNA
atggcactactgatacacctgaaaaccgtctccgagctgcggggccgcggtgataggattgctaaagtgactttcagaggccagtcattttattcccgagtgttggagaattgtgaggacgttgcagattttgacgagacgttccgatggcccgtagccagtagcatagataggaacgaaatgcttgagattcaagtgttcaattactctaaggtgttttccaataagctgattggcactttcagaatggttctgcagaaagtggtggaggaatcccacgtagaggttacagacacactcattgacgataacaacgctataataaaaacctccttgtgtgtggaagtcaggtatcaggccaccgacggaacagtgggtagctgggatgatggcgattttctcggggacgagtctctgcaggaagaggagaaagactctcaagaaacagacggattgctaccaggttctcgacctagcagccgcccaccaggcgaaaaaagcttccgcagagcggggaggtccgtgttttccgcgatgaaactgggcaaaaaccggagtcataaggaagagccccagcgacccgatgagcctgccgtcttggagatggaggacttggatcatctggccatcaggctcggcgatgggttggatcccgacagtgtctcattggcctccgtgactgctttaaccactaacgtctcaaacaaacggagtaagcctgacataaagatggagcctagtgccggccggccgatggactaccaggtttccataacagtcattgaggcgcggcagctggttggcttaaacatggacccggtggtttgcgtagaagtgggcgacgacaagaaatataccagcatgaaggaatccacgaactgtccctattacaatgaatatttcgtgttcgacttccacgtgtctccagatgtgatgtttgacaaaatcataaaaatttctgtcatccactccaaaaacctactacgatccggaactctggtgggaagttttaagatggacgtaggaactgtttatagtcaacccgaacaccagtttcaccataagtgggcaattctgagcgaccctgacgatatttcatctgggctcaagggctacgtgaagtgcgacgtggcagttgtggggaagggcgataacatcaaaacgccccacaaggccaacgagacggatgaggacgacatcgagggcaacttgctgctacccgagggtgtgccccccgagaggcagtgggcccgcttctacgtcaaaatctaccgggccgaagggcttcctcgaatgaatacctccctaatggccaatgtgaagaaggcttttatcggggagaataaagacctggtcgatccctacgttcaggtttttttcgctggacaaaaaggtaaaacctcagtgcagaaatcaagctatgagccactgtggaacgagcaggtcgtgttcactgacttattcccccccctgtgtaaaagaatgaaggtgcaaataagagattctgataaggtgaatgacgtcgctattggtacccattttatagacctgagaaaaattagcaatgacggagataagggcttcctgcctacattgggccctgcctgggtcaatatgtacgggtccacaagaaattatacacttttagacgaacaccaggacctgaatgagggccttggtgaaggcgtgtctttccgagcaagactactccttggcctggcagttgagatcgttgacacaagtaaccctgagctgacaagtagtaccgaagtgcaggtcgaacaagctactcccataagtgaaagttgtgctgggaaaatggaggagttttttctgtttggagcattcctagaggccagcatgattgatcgacggaatggggataaacctatcaccttcgaagtcactatcggaaactacggaaacgaagttgacggcctctcccggccgcagaggccccgcccacgcaaagagccaggtgatgaggaagaagtcgacctcatccagaatgcctcagacgatgaagccggtgacgcaggcgatctcgcttccgtgagctcgaccccacccatgcgccctcaggttaccgaccggaactactttcatctcccgtacctagagaggaagccttgtatatacatcaagtcttggtggccagatcagcgacgacgactgtataacgcaaacatcatggatcatatcgccgacaagttggaagaaggcttgaatgatatccaggagatgattaaaacagaaaagtcctatcctgagcggaggctacgtggcgtactggaagagctctcctgcgggtgttgccgcttcctgtccctggcagacaaagaccaaggccactccagccgtacaagattggacagagagcggcttaagtcttgtatgcgggaactagaaaatatgggacagcaagcccgtatgctgcgggctcaagttaagcggcacacggtcagggacaaactcagactctgccagaattttctccaaaagttgaggtttcttgcagatgagccccagcactctattcctgacatttttatatggatgatgtctaacaacaaacgggtggcatatgccagagttcctagcaaagatctgctgttttctattgtggaagaggagaccggaaaggattgtgccaaggtgaagaccctattccttaaattacccggcaaacgtggatttggctccgcaggctggactgtacaggctaaggttgaattatacctatggctcggtcttagcaagcagagaaaggagttcctgtgcggcttaccgtgtggatttcaggaggttaaggccgcacagggactgggtctgcacgctttccccccagtatcactcgtttatacgaaaaaacaagcctttcaacttagggcgcatatgtaccaggcccgcagtctatttgcagccgactcaagtggactttccgatccctttgcccgtgtcttcttcatcaatcaatcccagtgtactgaggtgctgaatgaaaccttgtgccctacctgggatcagatgttagtgtttgataatctggagctttacggcgaggcccatgagctgcgcgacgacccacccatcatagtcatcgaaatatacgaccaggactctatgggtaaggccgattttatgggtcgcacattcgcaaaacccctggtcaagatggctgatgaggcatactgtccacccagattccctcctcagttagaatattaccagatctatagaggaaacgcgacagctggtgatcttttggcagcgttcgagctgctccagataggtcctgccggcaaggctgacttgccccccattaatggcccagttgacgtagacaggggccctatcatgcccgtgccaatgggcatacggcccgtcttgtcaaagtaccgcgtggaagttctcttttgggggctcagagaccttaagcgagtgaaccttgcccaggtggaccgccctcgcgttgacatcgaatgcgccggaaagggggtgcagtcctctttgatccacaactacaaaaaaaatccaaacttcaataccctggtgaaatggtttgaggtggacctgccggagaatgaactcctccaccctcctctaaatatcagagtggttgactgtcgcgcgtttggccggtatactctggtgggatcccatgccgtttcaagccttcggcgcttcatttatcgtcccccagaccggtctgccccttcatggaacacaaccgtgcgcctgctacgccgatgtcgggtgctgtgtaatggcggcagctccagtcactccaccggagaggttgtagtgacgatggaacccgaggttcctatcaagaagcttgagacaatggtcaagttggacgccacttccgaagcagtggtgaaagtggatgtggccgaggaagagaaggaaaagaagaagaaaaaaaaggggactgctgaggagcccgaggaggaagaacctgacgagtccatgctggactggtggtcaaagtacttcgcatctattgacacaatgaaagagcaactgagacagcaggaaccttccgggatagaccttgaggagaaggaagaggtggataatactgagggacttaagggctctatgaaaggaaaggagaaggcccgggctgcaaaagaagagaaaaaaaaaaaaactcaatccagtggttccggtcagggttccgaagcacccgagaaaaagaaaccgaaaattgacgaactgaaggtctacccaaaagaactcgaatccgagtttgataatttcgaagactggctgcacacattcaatctgctgagggggaaaactggggacgatgaggacggcagcacggaagaagagcgtattgttggcaggtttaagggatctctctgtgtctataaggtccctctacccgaggacgtcagcagagaagctggatatgacagtacatatggaatgttccagggcatcccctccaacgacccaataaatgtgcttgtgagagtgtacgtcgtgagggccactgatctgcacccagcggacattaacggtaaggcggatccctatatcgctataagactgggtaaaacagatatacgggacaaagagaattatatttccaaacagcttaatcccgtcttcggaaagtccttcgatattgaggccagctttcctatggaatcaatgcttactgtagccgtttatgattgggacttggtgggtacagatgatctgataggagaaacaaagattgatttagagaacagattctattcaaaacaccgggccacctgtggtatagcacagacctacagtacgcatggctataacatctggcgagatcctatgaagccaagccagattttgactcgcctgtgtaaggatgggaaggttgatggccctcactttgggcctccgggccgggtcaaagtggcaaaccgcgtgtttacaggaccctctgagatcgaggacgagaatggacagcgcaagcctacagatgagcacgtggcactattagccctcaggcattgggaagatatccctagggctgggtgtaggctggttccagaacatgtggagacacggcccctgttaaaccctgataaacctgggatcgaacagggtcgtctggagctttgggtcgatatgttccccatggacatgcccgctccgggcaccccactggatatttctccaagaaagcccaagaagtacgaacttcgggtgatcatctggaacaccgacgaagttgtcttagaggatgacgatttttttactggcgagaaaagcagcgatatcttcgtgagagggtggttgaaggggcagcaagaagacaaacaggatactgatgtgcactatcactcattgactggagaaggcaactttaattggaggtacttgttcccattcgactatctcgccgcagaggagaaaatagtaatttctaaaaaagagagcatgttctcatgggacgagaccgagtataaaatccccgcacggctcactctgcaaatctgggatgccgaccacttttcagccgatgacttcctgggcgccattgagctggatttgaatcggtttccgagaggcgccaagaccgcaaaacagtgtacaatggaaatggctacaggggaagtggatgttccactggtgtccatatttaagcagaagcgagtgaagggctggtggccactgctggccaggaacgaaaacgatgaatttgaactcactggaaaggtggaggcagagctgcacctcctcacagccgaggaagcagaaaagaatcctgttggactggcacggaacgagcctgatcccctggaaaagcctaacaggcccgacactagctttatctggttcttgaaccctctgaagtcggcccgttatttcctgtggcatacttatagatggcttctcttgaagctgctcttactcctactgctactgcttctgcttgccttatttctgtattccgttccaggctacctcgtcaagaagatcctgggagcgtag

SEQ ID NO: 127479 - DNA, 3693 bp, synthetic construct
  misc_feature 1..3693: note = Description of Artificial Sequence: Synthetic coding sequence
  source 1..3693: mol_type = other DNA
atgatcaaaaccgagaagtcctatcccgaaagacgactgcgtggcgtcctcgaagaactatcttgcggctgctgcaggtttctaagtctggccgataaagaccaaggacacagcagtcgcactcggctggacagagaaagacttaaaagctgtatgcgcgagctggaaaatatggggcagcaggcccggatgctgagggcccaggtgaaaagacacaccgtcagggacaagctgcggctgtgtcagaacttcctgcagaagctgagatttcttgctgatgagccacaacattcaatcccggacatcttcatctggatgatgagcaacaataaacgagtggcatatgctagggtgccatcgaaagacctgttattttcgatcgtggaggaagagacggggaaggactgtgccaaggtgaaaactctgttcctcaagctgccagggaaacgtggattcggcagcgctggttggacagtccaggcaaaggtggaactgtatctctggctcggactgtccaagcagcggaaggaatttctgtgcggactcccgtgtggatttcaggaggtcaaggctgcgcaggggctaggccttcacgcttttcctccagtcagcctggtgtacacaaagaagcaggcgtttcagctgagagcccatatgtaccaggcaaggagccttttcgcggcggactcatctggcctgtctgaccccttcgctcgagtgttctttattaatcagagtcagtgtaccgaagtattgaacgagactctctgtcccacttgggatcagatgttggtgttcgataatttggaactatatggggaggcccacgaattgcgcgatgacccgcctattatagtgatcgaaatttatgatcaagatagcatgggaaaagctgatttcatgggccgaacctttgctaagcctcttgttaaaatggcggacgaagcttattgcccgcccagatttccaccccagctagagtactaccagatctataggggaaatgcaacagcgggagaccttctcgctgctttcgaattgctgcagatagggcccgccggcaaggctgatctgccaccaattaatgggccagtggacgtggaccggggccctataatgcctgtaccgatgggaatcagaccggttctgtcaaagtatcgggtggaagtgttgttctggggacttcgggacctcaaacgagttaatttggctcaagttgatcggccccgggttgatattgagtgcgcagggaagggagttcagagctcattaatacataattataagaaaaaccccaacttcaacacccttgtgaaatggttcgaggtagacctacctgaaaatgagctgttacatcctccccttaatataagagtggtggattgccgggcttttggccgctatacacttgtggggagtcatgcagtctccagcctcagaaggttcatttacaggcccccagacaggtctgcccccagttggaatacaactggtgaagtggtggttacaatggagcctgaagtgccgatcaagaaactcgaaacaatggtcaagctggacgccacctcagaggccgtcgtcaaggttgatgtggccgaggaggagaaagagaagaagaagaagaaaaaaggcacggcagaagagcctgaagaggaagaaccagacgaaagtatgctcgattggtggtccaaatatttcgcaagtattgacactatgaaggagcagctgaggcagcaggagccaagcggtattgatctggaagagaaggaagaagtcgacaataccgagggtctcaaaggatctatgaagggcaaagaaaaagctagggcagctaaggaggaaaaaaaaaagaaaacccagtcatcgggcagcgggcagggatctgaggcccctgagaagaaaaaacctaagatagacgagctgaaggtatatcctaaagagctagaatctgagttcgacaacttcgaggattggctgcatactttcaatttactgcggggcaagacaggtgatgatgaagatggtagcacagaagaggaaaggatcgtgggaagatttaagggctcactgtgcgtttataaggtccccttacccgaggatgtctctagagaggctggttatgacagcacttacgggatgttccagggcatccccagcaacgatccgatcaatgtgctggtgcgtgtttacgtggtgagagccaccgacttgcaccctgccgacatcaatggaaaagccgatccttacatcgccatcagattggggaagaccgacataagagataaggaaaactacatttcaaaacagctgaatcctgtgttcggtaagagcttcgacattgaggcatccttcccgatggagagtatgctgacagtcgcggtttacgattgggacttggtggggacagacgaccttatcggcgagacgaaaattgacctggaaaacaggttctattccaaacaccgggccacctgtggaattgcccaaacctattccacacatggatacaacatttggagggacccaatgaagccatcccagatcctgacacgtttgtgcaaggacgggaaagtcgatgggccccactttgggccccccggccgggttaaagtggcaaacagggtttttactggccctagcgaaatcgaagacgaaaacggccaacggaagccaactgatgaacacgtggcactcctagccttaaggcactgggaggacatccctagagcgggatgccgtctcgtacctgaacacgtggaaacaagaccgctcctgaaccctgacaagcccggtattgagcagggccggttggaactgtgggttgatatgtttcctatggatatgccggcccccggaacacctctcgatattagtcccaggaaaccaaagaagtatgagctgagggtcataatttggaacaccgatgaagttgtcttagaagatgatgacttctttactggtgagaagtctagtgacatctttgttagaggttggctgaaaggccagcaggaggacaagcaggacacggatgtgcattatcatagtctgacaggggaaggtaactttaattggcggtatctgttcccgtttgattacctggccgcggaggagaagatagttatctccaagaaagaaagtatgttttcatgggacgaaaccgaatacaagatccccgcaaggctgacactgcaaatctgggacgctgaccatttcagcgccgacgacttcctgggggccatcgagctagatctaaatagatttcctagaggtgctaaaacagccaaacagtgtacaatggagatggctaccggagaggtcgatgtgccgctggtgtcgatctttaagcagaagagagtgaagggctggtggccattacttgcgcgaaatgagaatgacgaattcgaactgacaggcaaagtagaagccgaactgcatctgttgaccgccgaagaagcagagaagaaccccgtaggcttggcacgaaatgaacctgacccactggagaagcccaatcgacccgatacaagctttatttggtttctcaaccctctaaagagcgccaggtatttcctttggcatacctaccggtggttgctcctgaagctgctcctacttctgttgctgctgctgttgctggcactatttctctacagcgtacctgggtatctggtgaaaaagatactgggagcctag

SEQ ID NO: 127480 - DNA, 3693 bp, synthetic construct
  misc_feature 1..3693: note = Description of Artificial Sequence: Synthetic coding sequence
  source 1..3693: mol_type = other DNA
atgatcaagaccgagaagtcatatccagagcgaagacttcgcggagtgttggaagagttatcttgtggctgttgccgattcctctccctggccgataaggaccaaggtcactcgagccggacccgcctggaccgcgaacgcctgaagagctgcatgcgagagctggagaacatgggacagcaggccagaatgttgcgtgcacaggtaaagagacacaccgtgagggacaaactccgtctgtgccagaattttctccaaaagctccgatttctggctgatgagcctcagcactccattccagatatctttatttggatgatgagtaataataagagggtggcatacgcgcgggtcccatccaaggatctacttttttccatagttgaagaggagacaggtaaagattgcgccaaggtgaagaccctgttcctcaaactgcccggcaagcgagggttcgggagcgcaggatggactgtccaggccaaggtcgaattatatctctggttaggtctcagtaagcaaagaaaggagttcctctgtgggctgccttgcggattccaagaagtgaaggctgcacaggggctgggcctccacgcattcccaccggtgtcactggtgtatactaaaaaacaagcgttccagctccgcgcgcatatgtatcaagctcgatctctgttcgctgccgattcttccggtttgtctgatccttttgctagagtcttcttcataaatcagtcccagtgtaccgaggtacttaatgaaaccctctgccccacctgggatcagatgttggtgttcgacaacctcgaattgtacggagaagctcatgagcttcgagatgatcctccaatcatcgttattgaaatctatgatcaggacagcatgggaaaagctgacttcatgggtaggacctttgcaaagcccttagtaaaaatggcagacgaggcgtattgcccacctcggttcccgccccaactggaatattaccaaatctacaggggcaacgcaaccgccggagacctccttgcagcgtttgagctgttgcaaatcggcccagccggtaaggccgaccttcctcccattaacggtccagtagatgtggatcgcggtccgattatgccagtgcctatgggcatacgccccgtgttgtctaagtatcgtgtcgaggtgctattctgggggttaagggatctgaaacgagtcaacttagcacaggtggatcgcccaagagtggacatcgagtgcgcggggaaaggcgtgcagtcgagcctcatccacaattacaaaaagaaccctaactttaataccctcgtcaaatggttcgaagtcgatctgccagagaacgagcttcttcatccccccttgaacatccgtgtggtggattgtcgggcctttggtaggtatacacttgtcggctcacatgctgtctcctcactgcgccgattcatttacagacccccagataggagcgctccctcctggaatactaccggggaggtggttgttactatggagcctgaagtgcccataaaaaaactggagactatggtaaagcttgacgccacatcagaggcagtggtgaaggtggatgtggcggaggaggaaaaggagaagaagaaaaaaaagaaaggaaccgctgaggaacctgaagaggaggagccggacgaatccatgctggattggtggagcaagtactttgcctctatagacactatgaaagaacaactgcggcagcaggagccatctggcatcgatctcgaggagaaggaagaggtcgataatacagaggggctgaagggcagcatgaaggggaaggaaaaagcacgggccgcaaaagaggaaaaaaagaagaaaactcagtccagtgggagcggccaaggctctgaggcccccgagaaaaaaaagcccaagattgacgagttaaaagtctatccaaaagaacttgaatccgaattcgacaacttcgaggattggctccatactttcaacctactgagaggcaaaactggagacgatgaagacggcagcactgaagaggagaggattgtcgggcggttcaaaggttccctctgcgtgtataaagtaccactgcccgaagacgtatcccgcgaggcaggctacgacagtacatatggcatgtttcagggcataccatccaacgaccccatcaatgtgctggtgagagtgtacgtggtgcgtgcgacagatctgcaccctgccgacattaatggcaaagctgatccttatattgcgatcaggttgggtaaaacagacatccgagacaaggaaaattacatcagtaagcagttaaaccctgtcttcggaaaatcatttgacatcgaggcaagtttcccgatggaatcaatgcttactgtggccgtgtatgattgggacctggtcggaactgatgatctcattggcgagaccaagatcgacctggaaaaccggttttacagcaagcaccgagccacgtgtggaattgcacaaacctactctactcacggttataatatatggcgcgatcctatgaaaccatctcagatcctcaccagactctgcaaggatgggaaggtggacggcccccactttggtcccccaggccgggtcaaagtggccaatcgcgtgtttacgggcccatctgaaatcgaggatgagaacggtcagagaaagccgactgacgagcatgtggctctgcttgccttgagacattgggaggacatcccgagggccgggtgtcggctcgtacccgaacatgtggagacccggcccttgctgaatccagataagccggggatagagcagggcagactagagctgtgggtggatatgtttcccatggacatgcctgctccgggcacaccacttgatataagcccccgcaaaccgaaaaagtatgagctcagagttatcatctggaatacagatgaagtcgtattggaggacgatgacttttttaccggcgaaaagtcgagcgatattttcgtccgggggtggttaaaaggacagcaggaggacaagcaggatacagacgtgcactaccattccctaacaggtgaaggtaatttcaactggcgttacctatttccatttgattacttagctgctgaggaaaagattgtgatctccaaaaaggagtcgatgttctcctgggacgagaccgagtataaaatcccagcccgactgacattgcagatttgggatgccgatcacttcagtgcagatgatttcctgggcgccatcgaattggacttaaataggttcccgcggggggctaagaccgcgaagcagtgcacaatggaaatggctactggcgaagtcgacgtccccttggtgagcattttcaaacagaagcgagtcaaaggatggtggccgctgcttgcaagaaacgagaacgacgagttcgaattgacaggcaaggtggaagccgagcttcatttgcttacagccgaagaggccgagaagaatcccgtcggattggcccgaaatgagcccgacccgctggagaaacccaaccggcctgatactgcgtttgtttggttcttgaacccgctgaaatccataaagtatctgatctgtactcgttacaaatggctcattatcaagattgtcctggccctgttagggctgctgatgttgggcctgtttctctattcgctccccgggtacatggtcaagaagctgttgggagcatag

SEQ ID NO: 127481 - DNA, 234 bp, synthetic construct
  misc_feature 1..234: note = Description of Artificial Sequence: Synthetic coding sequence
  source 1..234: mol_type = other DNA
gaggccgagaaaaatcccgtgggtctcgctaggaatgaacccgatccgttggagaagcctaaccgccccgatactgcatttgtttggtttctgaaccccctgaaaagtatcaagtacctaatttgtacgcgctataaatggctgattattaaaatcgttttagcactgggttgcagctgctggggacccttgcaaccaccgtggctgcacggccagaaggccccatggggctag

SEQ ID NO: 127482 - DNA, 342 bp, synthetic construct
  misc_feature 1..342: note = Description of Artificial Sequence: Synthetic coding sequence
  source 1..342: mol_type = other DNA
gacttcctaggcgacgaatctctgcaggaagaagagaaagattcacaggagacagatggcctgctgcctgggtcacggcccagctctcggccacccggggaaaaaagtttccggagcaagggtagagagaaaacgaagggggggcgggatgatgaacataaggcaggccgtagcgtcttttccgcgatgaaactcgggaagaatcgctcgcataaggaagagccgcagagaccggatgagcccgcggtgctggagatggaagatctggatcatcttgctatacggttgggtgatggactagatcccgacagtgtgtctttagcttctgttactgcactctag

SEQ ID NO: 127483 - DNA, 3924 bp, synthetic construct
  misc_feature 1..3924: note = Description of Artificial Sequence: Synthetic coding sequence
  source 1..3924: mol_type = other DNA
atgatgaccgatacccaggacggacccagcgaaagcagtcaaattatgcgcagcctgacacctttaatcaatagggaagaagcatttggcgaggctggagaagccggactgtggccgtccattacacacactcctgacagccaggaggaggggctcaacgacatacaggaaatgattaaaaccgagaagtcgtaccctgagcgccgtctacgcggcgtgctggaggagctttcgtgtggatgctgccgctttctgtctctggcagataaagatcagggacactcctctcggaccagactcgatagggaacggttaaaaagctgcatgagagaattggagaatatggggcagcaggctcgtatgctgagagcacaggttaaacgacacactgtgcgcgacaaactgagactctgccagaatttcctccaaaagctgcgtttcttggcggacgagccccagcatagtattcctgatattttcatttggatgatgtccaacaacaagcgggttgcctatgcccgcgtgcctagtaaagacctcctcttctcaatcgtggaagaggaaacaggtaaagattgtgcgaaggttaaaaccttattcctcaagttacccggaaaacgaggctttggatcggctggttggaccgtgcaggccaaagtcgagctctacctctggttggggctgtcaaagcagaggaaagaatttctctgtggtctgccatgcggctttcaggaggtgaaggccgcccagggcctgggtttacatgccttccctccagtcagtcttgtctacactaagaaacaggcatttcaattgcgcgcgcacatgtatcaggccaggtccctctttgccgccgactcatctggtttaagcgatccgtttgctcgggtctttttcatcaatcagtctcagtgcaccgaggtactcaatgagactttatgtcctacatgggatcagatgctcgtgtttgacaatctggaattgtacggcgaggctcatgaacttcgggatgacccaccgataattgtgattgagatatacgatcaggattctatgggaaaagcagacttcatggggcggacgttcgccaagcctctagtgaaaatggcggacgaagcctactgtcccccgagattcccacctcagctggaatactatcagatctaccggggaaacgcaactgctggcgatctcctcgctgccttcgaacttctccagattggcccggctggcaaagcggacctccccccaattaacggaccagtggacgtggatcgcgggcctattatgcccgtgccgatggggatccgccccgtgctgagcaagtatcgagtggaggtgctgttctggggactcagggaccttaaacgggtgaatctggcccaggtggatcggcctcgggttgatattgagtgcgcgggaaaaggcgtgcagagttctttaatccacaattataagaagaatccgaatttcaatacactggttaagtggtttgaggtcgatctgccggagaacgaattgctgcaccccccactgaacatcagggttgtggactgccgtgcgttcggtagatacaccctggttggatcgcacgcagtgtctagtttgcggagattcatatataggccaccagatcgttcagctcccagttggaatactactgtaaggttgcttagaagatgccgggtgctgtgcaacggaggctcgagtagtcattccacaggcgaggttgtggttacgatggaaccagaggtgccaataaagaaactggaaactatggttaagcttgatgccaccagcgaggccgttgtcaaggtggacgttgctgaagaagagaaagagaagaaaaaaaaaaagaaaggaaccgccgaagagcccgaggaggaagaaccagacgaatcgatgctcgactggtggtccaagtatttcgcatctatcgatactatgaaagagcagctaagacagcaggagccttctggtattgacctcgaggaaaaggaagaagtcgacaatacggaagggctgaaggggagtatgaagggcaaggagaaggcccgcgccgccaaagaggagaagaagaaaaagacacagtcctcaggttctggacaggggagtgaggcccccgagaaaaagaagcctaagatcgacgagcttaaagtatatcctaaggagttagagtccgaatttgataacttcgaagactggcttcacacgttcaatcttctgagaggaaagacgggggacgacgaggacggatcgaccgaggaggaaagaatcgtcggccggtttaaaggaagcctttgcgtgtacaaagtgcctctgccagaggatgtctcaagggaagcaggatatgacagcacctacgggatgttccagggaattccgtcaaacgaccccatcaatgtgctcgtaagagtgtatgtggttagggctacggatctacatccagccgatattaatggcaaagccgatccatacatcgccatacggctgggcaagaccgatatcagggataaagagaactacatctccaagcagctgaacccagtattcggtaaatcctttgatatcgaggcatcctttcccatggaatccatgctcaccgtcgctgtgtacgattgggatttagttggtaccgacgatctgataggtgaaacaaagatcgacctggaaaatcggttctattcaaaacatcgcgccacctgcggcattgctcagacttactcaactcatggatacaatatatggcgcgatcctatgaaaccctcccagatcttgacacggctatgcaaagacggaaaggtggatgggcctcactttgggcctccagggcgagtgaaagtggcaaaccgagtctttacgggtccttccgaaatcgaggacgaaaacggccagcggaaacctaccgatgaacatgtcgctctgctcgccctaagacattgggaggacatccccagggctggatgccggctggtccctgagcacgtggagactaggcccctgctcaacccagacaaaccaggaatcgaacaaggccgtctggaactttgggtggacatgtttcccatggacatgccggcaccaggaacacccctggacatctccccacgcaaacctaagaagtatgaactgcgggtgatcatctggaataccgacgaagtcgttcttgaggatgacgatttttttacaggtgaaaaaagctctgatatcttcgtcagaggatggctgaagggacagcaggaggataaacaggacacagatgtgcactatcattctctgacgggcgaaggtaactttaactggaggtacctatttcccttcgattaccttgccgccgaggagaaaatcgttatatcaaaaaaggagtcaatgttctcgtgggacgagactgaatacaagatcccagccaggctcactttgcaaatttgggacgcggatcatttctccgccgatgattttctaggggctattgaactggacctcaataggttcccccgtggcgctaagaccgccaagcagtgcaccatggagatggcaactggagaggtggacgttccccttgtcagcatctttaagcagaagagggtgaagggatggtggcccttgctggcacggaacgaaaatgacgagttcgagttaacaggtaaggtggaggccgagctgcacttgctgaccgcagaagaggctgagaaaaatccggtagggctagcccggaacgagcctgatcctctcgaaaaacctaatagacctgacacctcatttatctggtttctcaatccactaaagtccgcccgttacttcctctggcacacctaccggtggctactgctgaaactgctgctgttgttgcttctacttctcctgctcgccctgtttctttattccgtcccaggatacctggttaagaaaatcctaggggcctag

SEQ ID NO: 127484 - DNA, 4527 bp, synthetic construct
  misc_feature 1..4527: note = Description of Artificial Sequence: Synthetic coding sequence
  source 1..4527: mol_type = other DNA
atgtttccagccaggggagtgccgctgcacctagaaggggagggggtctttccatggggaccaggggacgtctcactgccgtatttatctaccagtgatgtgtcctttagcgtgattgttgagaacgtgaattgctactctagcggcatgatctgtaggaaatttatatcaatcaatgtgggcaacagcctgatcgtgttcgatgacgacagcggtaacccatctcccgagagctttctggacgataagcaggaagttcatacctggcgggttgggttttttactctcgtacacttccctcaggagcacattacacttctgtgggaccagcgcaccactgtgcatgtgcaggccgggcctcagtggcaaggccagctcgctggcctctgcggcaactttgaccttaagaccatcaatgaaatgcggactccagagaatctcgagctgactaacccccaagagtttggcagcagttgggccgccgtggagtgccccgatacgcttgatcccagggatatgtgcgttctgaaccctctccgggagccgtttgctaagaaggagtgctctatcctcctctccgaagtcttcgaaatatgccaccctgtggtcgatgttacgtggttctactcgaactgcctgaccgatacatgtggctgctcccaaggcggtgattgcgaatgcttttgcgctagtgtgagtgcttacgcacatcagtgctgccagcacggagtggctgtagactggagaacccctaggctgtgcttgctgggtaagggaccataccagctctcaagcctcgctgccggaggggcactagttggtatgaaggccgtgggagacgacatcgtgttagtcagaaccgaggatgttgcaccagccgacattgtgagctttctcctcacagctgccctgtataaggccaaggcccacgatcccgacgtagtctccctggaggcagcagaccgtcctaacttcttcctgcacgtgactgccaatgggagtcttgaacttgccaagtggcaggggagagacactttccaacaacacgcctctttcctcctgcacagaggaacccgacaggccggactggtggctctggagtctctagccaagccgagttcctttctttatgtgtcgggagccgtactcgcactgaggctctacgagcacaccgaagtcttccgccggggaacactgtttcggctgctggatgctaagcctagcggggccgcctatccgatctgtgaatggcgctacgatgcctgtgcgtcaccttgtttccagacttgtcgagatccaagggccgcatcctgccgggacgtgccccgtgtggaaggatgtgtaccagtgtgccctaccccacaggtgctggatgaagtcacccagaggtgtgtatatctcgaagattgcgtggagcccgccgtatgggtgcctactgaggccctcggtaatgaaaccctccccccatctcaggggctccctactccctcggacgaggaaccccaattatcacaggagagtccaagaacacctactcaccgacccgccctgactcctgcagctccccttacaaccgcgctcaaccccccagttaccgctactgaagaacctgtggtttctccaggccccacacagacgactcttcaacaaccactggaactgaccgcatcacagctccccgcgggacctaccgaaagccccgcttcgaagggcgtcacggcctcattgctggcgatcccacacaccccagagagctcttccctgcccgtcgctctgcagactcctactccaggtatggtgtcaggcgctatggaaaccactagagtgactgtaatatttgccggctccccaaacattactgtgtcttcccggtcacccccagctcccaggtttcccctgatgacaaaagccgtcacggtaagggggcatggcagcctccccgttcgtaccacaccgccacaacccagtcttactgccagcccctcctctcggccagtggcctctccgggggcaatttcaaggtcacctaccagttctggctctcacaaagcagtcctcacacccgcagtgactaaggtgatctccagaacaggtgtgcctcagcccacacaggcacagtctgcctccagccctagcacacccctcacagtcgccggaacagccgccgagcaggttcccgtctctcctctcgcgactaggagcctggagattgtcttgagcactgaaaaaggtgaggcgggccacagtcagcccatgggctcccccgcatccccccagccgcacccattaccttcagcgccccccaggccagcccagcatacaacgatggccactcgctcacccgcactcccccctgagacgccagctgctgcctcactctctaccgccacagatggcttggcagccactccttttatgagccttgagagcactaggcccagccaacttctgtcaggcctgccccccgatacgagcctgccactcgccaaggttggcacctctgcccctgtcgccacacccggtcccaaggcatccgtgattacaacacctctgcagcctcaggctactaccctgccagctcagacacttagtcctgtcctgccttttacccctgcagccatgacccaagcacatccacccacccacattgcccctccagcagccggtaccgccccagggctgttattaggagctaccctcccaacctctggggttctgcccgtggccgaaggcacggcttccatggtgtccgtagtccctcggaagtccaccaccggtaaagtggccatactaagcaaacaggtttccctgcctacttccatgtacgggtcagcagagggtgggccaacagaacttacacccgccacatcacacccactcacccccctcgtagctgagccagaaggagctcaggctggaacggctctccctgttcctaccagctacgcactgagccgcgtcagtgcccgaacggcgccccaggatagcatgctggtcctcctgcctcagcttgctgaagcccacggtacatcagctggtccccacctggcagcagagcccgttgatgaagcaactactgagccaagcgggagatccgctcccgccctgagcatcgtggaggggttggcagaggccttggccactactaccgaagctaacacttccactacgtgtgtcccaattgcagagcaggactgtgtgcggcacatttgtctggaaggacagcttattagagtgaaccagtcccagcattgtccccagggggctgctccgccgcggtgtggcatactgggacttgctgttagggttggaggcgaccggtgctgccccctctgggaatgtgcttgcagatgcagtatttttccagatctatccttcgtcacttttgatggaagccacgttgcgctgttcaaagaagcaatctatatcctgagccagagccccgacgagatgctgacagtgcacgtgctggattgcaagagcgctaacttaggccatctgaattggccaccattctgcttggttatgctgaacatgacacacctggcacatcaagtgacgattgacagatttaatagaaaagtaaccgttgatctacaaccagtgtggccgcctgtaagccggtatggcttcaggattgaagacactgggcatatgtatatgatcttgactcccagcgatatccagatccaatggctccattccagcggcttgatgattgtggaggctagcaaaacctccaaggcgcaggggcatggcctgtgtggtatttgcgacggcgacgctgccaacgacctaactctgaaagacggatccgttgtagggggggccgaagatccggccccattcctcgatagttggcaggtgcctagctctctgacaagcgttggccagacaaggtttcgcccagactcatgcgctactaccgattgctccccttgcctgaggatggtgagtaatcgtactttctcagcttgccatcgattcgtgcctccagaatctttttgcgagctgtggatccgtgatacaaagtatgtccaacagccctgtgtcgctctcactgtctatgtcgctatgtgccacaagtttcatgtctgcattgaatggcgcaggtccgactactgtcccttcctgtgcagtagcgactccacataccaggcctgtgtgacggcatgcgagcctccaaagacatgccaggatggaatcctggggccactcgatccggagcactgccaggtgctcggagaagggtgcgtctgttctgagggtacaattctgcacagacgccacagtgccctttgcatcccagaagcaaagtgcgcatgcggcgactgtcccgattctatacctgaatgccaagagggtgaggcactcacggtgcacaggaacacaacggagctgtgctgtccactttatcagtgcgtgtgcgaaaattttcgctgcccacaagttcagtgtggtctgggaaccgcattggtggaagtctggagtcccgacaggtgctgcccctacaagagctgcgggtag

SEQ ID NO: 127485 - DNA, 8778 bp, synthetic construct
  misc_feature 1..8778: note = Description of Artificial Sequence: Synthetic coding sequence
  source 1..8778: mol_type = other DNA
atgggcgtactggccagcgctttatgttggctcctttgcgtgtggctaccatggggagaacaggccgcagaaagcttgcgagttcagcgcctcggcgagagagtcgttgacagcggcagatccggtgctaggggcatgagaaacgtgaaaggtatgcgcaacggtcccgcccaaacacgtgtctcatcttcttcatcacatcaggaggccacactcgcgatgggcgataaggccactgtagtgggtgggcagcaggcagaggcgccggattctgtcgcaatgagcagttgggaaagacgattgcaccgcgcaaaatgcgccccctcctatctcttttcctgcttcaacggcggagagtgtgttcacccggcattctgtgactgtcggagatttaatgccacggggcctcgatgccagatggtctacaatgctggtccagagcgcgactccatttgcagagcctgggggcagcatcacgtcgaaaccttcgacggtctgtattattacctcagtggaaaagggtcatacactctagtgggacgtcatgaaccggagggtcagtcatttagcatacaggttcacaacgacccacagtgcggatcctcaccttatacttgtagccgggccgtgagtctgttttttgtgggcgaacaggaaattcacctggctaaagaagtaacgcacggcggcatgagggttcagcttccccatgtgatgggctctgcccggcttcagcaactcgcgggctatgtaatcgtgaggcaccagtctgcatttaccttagcctgggacggagcatctgcagtgtacattaagatgtctcctgagcttttgggatggactcacggactgtgtggaaacaataatgccgacccaaaagacgatctggtgacttcttccggcaagctaacggacgatgtggtggaattcgttcactcttggcaagagcaggctcccaaccagccgcccgggccgacaaccagctctctgccgcgcccaccttgcttacagcagaaccccggaacgatgcagggggtatatgaacagtgcgaagccttgttgaggccgccttttgacgcgtgtcatgcctatgtgtctccgttaccattcaccgccagctgcacctcagacttgtgtcagtctatgggtgacgtcgcaacgtggtgtcgggccctagcggaatatgcacgggcctgcgcccaggccgggcggcccttacagggatggaggactcagcttaggcaatgcacagtgcattgcaaagagaaagcgtttacttacaacgagtgtatcgcatgctgccccgctagctgtcatccccgtgcatcatgcgtcgatagcgaaatcgcttgcgtcgacggctgctattgcccgaatggcctcatattcgaagatggcggttgcgttgctcccgctgagtgcccttgcgaattccacgggaccctatatcctcctgggtctgtggtgaaggaagactgtaacacgtgtacttgcacttcgggaaagtgggaatgcagtaccgccgtttgccctgccgaatgttctgtcactggggacatacacttcactacgtttgatggtcgccgctacaccttcccagctacctgccagtatatccttgccaaaagccgttcatctggcacattcacagtcactctccaaaatgcaccgtgtggtcttaatcaggacggcgcttgtgtccaatccgtatccgttatcctgcaccaagacccaaggcgccaggtaacactaacgcaggctggcgacgtgctgctctttgatcagtacaagatcatccccccatacaccgatgatgccttcgaaatcagaaggctctctagcgtgtttctgcgcgtacggacaaatgtaggggtgagggtgttgtacgatcgggaagggcttagactttatcttcaggttgatcaacgctgggtcgaagacaccgtgggactgtgcggaacctttaacggcaacacacaggacgactttctgtctcccgttggcgtgcccgaatcaactccacaactttttggcaatagctggaaaacacttagcgcatgcagccctttggtcagcggttctcctttagacccctgcgatgtccacctgcaagccgccagttactcggtgcaggcctgttcggttctgacaggtgagatgttcgctccgtgcagcgctttccttagccctgtgccctatttcgaacagtgccggcgggacgcgtgtagatgtggccagccctgcctgtgtgccacattggcacactacgctcacctgtgccgccgtcacggattgcccgtggattttagagcgcgactgccggcctgcgccctcagctgtgaagcgtcaaaggaatattccccatgcgtggctccctgcggcagaacctgtcaggacctggcatcccctgaggcctgcggcgtagacggaggagatgacctgtcaagagacgagtgtgtcgaaggatgcgcctgtccccccgatacatacctggacacacaggctgatctgtgcgtgcctaggaatcagtgttcatgtcattttcagggggtggattaccccccaggtgattctgacatcccaagcttagggcattgccactgtaaggatggagtgatgagttgcgattcccgcgctcctgcagcggcatgccctgctggtcaggtgtttgtgaactgttccgatttacacacagatttagagctcagcagagagcggacctgcgaacagcaactgttaaacttgtccgtttctgccaggggtccttgtctcagtggctgcgcctgtccacaggggctgcttcgccatggcgatgcctgctttttgcccgaggaatgcccatgcacatggaagggtaaggagtatttccctggtgaccaggtgatgagcccctgccacacgtgtgtctgtcagaggggtagttttcagtgcacactccatccatgcgcaagtacctgcaccgcttacggcgataggcactaccggacatttgatggactcccatttgacttcgtcggcgcctgcaaagtgcatctcgtcaaatcaacaagtgatgtgtccttcagcgtgatcgtcgaaaacgtgaactgttattcctctgggatgatctgccggaagtttatttctataaatgtaggcaactctctcattgtgtttgacgatgactctggtaatccatcaccagaaagtttcctggatgacaaacaggaggttcacacttggagggtgggattcttcacccttgtgcacttcccccaggagcatatcaccctcctgtgggaccaaaggacaaccgtgcacgttcaagccgggccacaatggcaaggacagcttgccggcctttgtggcaatttcgacctgaagaccattaacgagatgcggacaccagagaacctcgagttgaccaatccccaagagtttggcagttcgtgggctgccgtggagtgccccgatacattggatcctcgagatatgtgcgttttaaatcctctgagagagccatttgccaagaaagagtgctctatcctgctcagcgaagtcttcgagatttgtcaccccgttgttgacgtgacgtggttctacagcaattgtcttactgacacgtgcgggtgcagtcagggtggagattgcgaatgtttctgcgcatctgtgtccgcctacgcccaccagtgttgccagcacggcgtggcggttgactggcggactccccgcctttgcccatatgactgcgactttttcaataaggtgctgggtaagggtccatatcagctatcgagtctggctgccggaggtgctttagtgggaatgaaagcagtgggcgatgacatcgtacttgtgcgcacagaggacgtggcgcctgctgacatcgtgtcttttctcctgactgctgccctctacaaggcgaaggcccacgaccccgatgtcgtctctttggaagcagcagaccggccaaatttttttcttcatgtgactgccaatgggtcattggaattagccaaatggcaggggagagacacgttccagcagcacgcttcatttctgctccaccggggcacacgacaagctggactggtggccctcgagtcacttgccaagccttcatccttcctttatgtctcgggtgccgttctggctcttcgcctgtacgaacatactgaagtctttcgccggggcacgctgttccggttgcttgatgctaaaccttctggagccgcatatccaatttgtgagtggcgctatgatgcgtgtgcatcaccctgtttccaaacctgccgggatccaagagctgcttcttgcagagatgttccaagggttgagggatgtgtacccgtgtgtcccacccctcaggtcctggacgaagtgacccagaggtgcgtatacctggaggattgcgttgagccagccgtgtgggtgcccaccgaggctctgggaaacgaaactctgccgcccagccaagggttacccacccctagtgatgaagaaccgcagttgagccaagagtctccgcgaacccctacccacaggcccgcactcacccctgctgctcccctaactacggcactcaacccgccggttaccgccaccgaggagcccgtcgtgagccccgggcccacgcagaccacactgcagcagccactggagttgaccgccagccagctgcccgcaggccccacggaatcccccgcaagcaagggagtcaccgcaagcctgctggcaatcccacatacgcctgagagttcgagtctgccagtagccctccagactccaacccctgggatggtcagcggcgctatggaaactaccagagtgacagtgatctttgccggctcccctaatatcacagtgtcttcccggtccccgccagcccccaggttccccctcatgacaaaagccgtgacagtccgaggacacggatccctgcccgttagaacgactccgcctcagccatccctgacagcaagcccttctagtagacccgtcgcttctcccggtgccatcagcaggtcccccacttcaagtgggtcccacaaggcagtgctgaccccagccgtcaccaaagtgatatcccgaactggagtgccccagcccacacaggcccagtcggcaagcagcccatccaccccactgactgtcgcaggaactgctgcggaacaagtgcctgtgagccccttagccaccagaagtctggagattgtactctctacagaaaagggcgaggccggacactcccagcccatgggatctccagcatcccctcagccgcaccccttgccgtctgcaccacctcggcccgctcagcataccacaatggctaccagatctccagcactcccacccgaaacgccggccgcagcaagcctctccactgcgaccgatgggttggccgccacccctttcatgtcactcgagtcaaccagaccctcgcagctgttgtccggccttccgcccgatacatctttacctctcgctaaggttggtactagcgcccccgtggccaccccgggacctaaggcatctgtcatcaccacgcccctgcaacctcaggcaaccaccttgccggcccagaccctttcccccgtgttaccatttactcccgctgccatgacgcaggcgcatcctcctacccatatcgcacccccagcggccggaaccgcgccgggactactgcttggagcaacgctgcctacctccggcgtgctcccagttgccgaaggaacagctagcatggtgtcggtggtgccaaggaaatctactactgggaaagtagccatcttgtcaaaacaggtttctttaccaactagcatgtacggctccgctgagggagggcctaccgaactcacgcctgcaacatcacatccattgactccactggtcgctgaaccggagggagcccaggccgggactgcccttcccgttcctactagctacgccctctccagagtctctgcgaggacggctcctcaagactctatgctggtactgctgcctcagttagctgaggcgcacggcacctcggccggacctcatctggctgctgagcccgtggatgaggccacaacagagccatccggtcgctccgcccctgctctgtcgatcgtcgaaggacttgccgaggcgctcgctaccactacagaagcgaacacctcgaccacttgcgtgcccattgccgaacaggattgcgtaaggcatatctgccttgaaggacagctgattcgagtcaatcagtcacagcactgcccacagggagctgcacccccccggtgcggcatcctggggcttgccgtgagagttggcggggaccgatgctgtcccctgtgggagtgtgcttgccgatgctccatttttcccgatttgagttttgtgacctttgatgggtctcatgtggctctcttcaaggaagccatatacattctgtcgcagtccccggacgagatgttgacagttcatgtgcttgactgcaaaagcgccaaccttgggcacctgaattggccccccttttgtcttgtaatgctaaacatgacacatcttgcgcatcaggtcacaatcgaccgcttcaatcggaaagtgacagtggaccttcagccagtttggccccccgtgagcagatatggatttcgaatagaagacacaggacacatgtacatgatattaaccccatcagatatccagatccagtggcttcacagcagcgggctcatgattgttgaggcctcaaagacatcaaaagctcaggggcacggcctttgtggtatctgtgacggcgacgcggccaacgacctgaccctgaaggatggttcagtagtgggaggcgccgaggaccctgcacccttccttgattcctggcaagtgccttcaagtctgacatccgtgggccagactcgattcaggcctgattcttgtgccaccacagactgtagcccttgcctgcgcatggtgtccaaccggactttctccgcgtgtcatagatttgtaccacccgaaagcttctgtgagttatggataagagacaccaagtacgtgcagcaaccttgtgtagcgctgactgtgtacgtcgctatgtgccacaagttccatgtctgcatcgaatggcgtcgtagcgattactgcccatttctgtgcagtagcgactccacctaccaggcctgcgtgaccgcgtgtgaaccgccaaaaacctgtcaggacggcattctcgggcccctcgaccctgagcattgccaggtgcttggcgaaggctgtgtgtgctctgaaggcaccatactgcatagaaggcactctgccttgtgcattccagaagccaaatgtgcatgcaccgacagtatgggtgttcctagagcgcttggtgaaacctggaactccagtctaagcggatgttgccagcaccagtgtcaagcgccagatactattgtgcccgtggatctgggctgcccttcaccaagaccagaatcatgccttaggtttggtgaggtggcgttgctcctgccaactaaagacccctgctgtcttggcaccgtctgcgtctgcaatcagaccttatgcgaagggctggctcccacatgtaggcccggacatcgcctcctgacccatttccaggaagactcttgttgtccgagttattcctgcgagtgtgacccggatctgtgtgaggcagaactggtcccttcttgtcgacaggaccagatcttgattaccggaaggctcggagacagctgttgtacatcgtacttttgcgcttgtggggattgtccagactcaatccccgagtgtcaggagggcgaagccctcaccgtgcacaggaataccacagagctatgttgtcccctgtatcagtgcgtttgcgaaaacttcagatgcccacaggtccagtgcggtctcgggaccgcgctcgtcgaggtttggagccccgatagatgttgcccttataaatcttgcgagtgcgattgcgacaccattcccgtgcccagatgtcacctgtgggaaaagtctcagctcgacgaggaattcatgcatagtgtggaaaatgtgtgtggatgcgcaaaatatgaatgcgtcaaggctccagtctgcctgagccgagagctcggcgtcatgcaaccaggacagacagtggtggagctatctgctgacggggtgtgccatactagcagatgcaccacggtgctggacccccttacaaatttttaccagatcaatactacgtcagtgctgtgcgatattcattgtgaagccaatcaagagtacgagcaccccagggacctcgctgcctgttgcggctcgtgcaggaatgtgagttgcctattcacgttcccgaatggcaccaccagcttattcctccctggggccagctggattgccgactgtgcacggcaccactgtagtagtaccccattgggcgccgtactcgtgaggtcacctatttcatgcccgccacttaatgaaactgagtgtgccaaagtgggaggcagcgtggtaccctcccttgagggctgttgccgaacatgtaaagaggacggtcggagttgtaaaaaggtcacgattcggatgacaattagaaagaatgagtgtaggtccagcacaccagtaaatctggtgtcttgtgatggccggtgccccagtgctagtatctataactataacatcaatacatatgcaagattctgtaaatgctgtcgtgaggtaggcctgcagcggcgctctgtacaattgttctgtgctactaatgccacttgggtaccatacactgtgcaggagcctacggactgcgcctgtcagtggagttag

SEQ ID NO: 127486 - DNA, 387 bp, synthetic construct
  misc_feature 1..387: note = Description of Artificial Sequence: Synthetic coding sequence
  source 1..387: mol_type = other DNA
atggccaggatcctgctcctgtttctgcccggtttggtcgcggtatgcgccgtacacgggatattcatggatcggctcgcgtcgaaaaaactgtgcgcagacgatgagtgtgtgtacactatctcacttgcatcagctcaggaggactacaatgcccccgattgcagattcatcaatgtcaaaaaaggccagcagatttacgtatacagtaaacttgttaaagagaatggggctggcgagttctgggccggtagcgtgtacggggacggccaggacgaaatgggagtagtgggctatttccctcgcaatctggtaaaggagcaaagagtgtaccaggaagccaccaaagaagtgcccacaaccgatatcgattttttttgtgagtag

SEQ ID NO: 127487 - DNA, 1446 bp, synthetic construct
  misc_feature 1..1446: note = Description of Artificial Sequence: Synthetic coding sequence
  source 1..1446: mol_type = other DNA
atgcaactctatagttcagtgtgtacgcactacccagctggagcacccggcccaacagcagccgcacccgcccctccagccgctgccacaccttttaaagtctctctgcaaccgcccggagccgcaggcgccgctcctgagccggagacgggcgaatgccagccagctgctgctgccgagcaccgcgaggccgcagcggtgccggctgctaaaatgcctgcgttttccagttgctttgaggttgtcagcggcgcagccgccccagccagtgccgcggcggggccaccaggtgcctcctgtaaacccccccttccacctcactacacaagcacggcacagattacggtgagagcgttgggtgcggatagattactgctacacggccctgaccccgtaccaggagccgcggggtccgccgccgcacccaggggccggtgtttgctgctcgccccagcccctgctgccccggtcccccctaggcgcgggtcctcagcttggctccttgaggagctactgagaccagattgccccgagcccgcgggcttggatgccaccagggaaggtcccgatcgtaattttagactctccgaacacagacaagctctggctgcagctaagcaccgaggcccagccgcaaccccaggaagccccgatccggggcccggcccctggggcgaagaacatctcgccgaacgtggtccccgcggctgggaaagaggaggggatagatgtgacgcacctggaggcgatgcagccagaaggcctgatccagaggctgaagcgccacctgctggaagcatcgaggccgctccctcgagcgctgctgagccggtgattgtgtcccgtagtgacccaagggatgagaaactcgcactctacctggccgaggtcgagaagcaggataaatatctgcggcaaaggaataaatacagattccacatcatcccagatggaaattgtctgtacagagcagtcagtaaaacagtgtatggcgaccagagtctccaccgcgagctccgggaacagacagtgcactacatcgccgatcatctggatcacttctctccgttgatcgagggcgacgtaggagagttcatcatcgctgctgctcaagatggcgcctgggctggctatcctgaactgctggcaatgggacagatgctgaatgtgaacatccatctgaccaccggaggacgcctggagtcgcctactgtctccacaatgattcactatttggggccggaagactccctgcgcccatccatctggctcagctggctttcaaacggtcactacgatgctgtattcgaccactcctacccaaacccagaatatgacaattggtgcaagcagacccaagtgcagcggaaaagagacgaggaactcgcaaagtcaatggctatcagcctttctaagatgtatattgaacagaacgcttgctcatag

SEQ ID NO: 127488 - DNA, 1197 bp, synthetic construct
  misc_feature 1..1197: note = Description of Artificial Sequence: Synthetic coding sequence
  source 1..1197: mol_type = other DNA
atgtccagaaagcaggccgccaagtccaggccgggatctggcagtagaaaagcggaggctgagcgaaagcgagacgagcgcgccgcccgccgagctctcgctaaagaacggcgaaatcgccctgaatcaggaggtggtgggggctgtgaagaggagtttgtttctttcgctaaccagctgcaggccctgggacttaagctgcgggaggttcccggagacggcaactgcctgttccgggcccttggagaccagctcgaggggcactccagaaaccatcttaagcaccggcaggaaaccgtggattacatgattaaacagcgcgaggattttgagccttttgtggaggatgacatcccgtttgaaaaacatgttgcttcacttgctaaacctggtaccttcgcgggtaacgacgctattgtagcctttgccagaaaccaccaactgaacgtcgtcatccatcagttaaatgccccgctgtggcaaatcagagggactgaaaaatcaagcgttagggaactgcacattgcctacagatacggggaacactatgactccgtgcgccgaattaatgacaactccgaagcaccagcccacctacagaccgactttcagatgctgcaccaggatgagtcaaacaagcgagaaaaaataaaaactaagggaatggatagcgaggacgacctacgagatgaggttgaagatgccgtgcaaaaggtctgcaacgcaaccggatgtagtgacttcaacttgattgtccagaatttggaggccgagaactataacattgaatctgcaatcatcgcggtcctgcgcatgaaccagggcaaaagaaataacgccgaagaaaacttggagccttctgggagagtgctcaagcagtgcggccctctgtgggaggagggcggatcgggcgctaggatttttgggaaccagggactgaatgaaggaagaaccgaaaacaacaaagcccaggccagtccctccgaggaaaacaaggccaataagaatcaactcgccaaggttacaaataagcagaggagggagcaacagtggatggaaaagaagaagcgtcaagaggagcggcatcggcataaggcactggagtccaggggctcccacagggacaacaatcggtctgaagcagaagcaaatacccaggtgaccctggtgaagacattcgccgcactgaatatctag

SEQ ID NO: 127489 - DNA, 438 bp, synthetic construct
  misc_feature 1..438: note = Description of Artificial Sequence: Synthetic coding sequence
  source 1..438: mol_type = other DNA
atggcctgcatccactacctgcgggagaatagagagaagtttgaggcattcatcgaggggtctttcgaggaatatctgaaaagacttgagaaccctcaggagtgggtcggccaggtggaaatttccgccctgtccctgatgtacaggaaagatttcatcatttacagagaaccaaatgtgtcaccgtcccaggtaaccgagaacaattttccagagaaagtgcttttgtgttttagcaatggtaatcattatgacatcgtatatccaatcaaatataaggagtcatcagctatgtgtcagagcctgctgtatgagttgctatatgaaaaggtgttcaagacggatgtctccaagatcgtgatggaacttgacaccctagaagtggctgacgaagacaatagcgaaattagcgacagcgaggacgactcttgcaagtag

SEQ ID NO: 127490 - DNA, 3345 bp, synthetic construct
  misc_feature 1..3345: note = Description of Artificial Sequence: Synthetic coding sequence
  source 1..3345: mol_type = other DNA
atggaggcagccgtgggggtgccagatggtggggatcagggtggcgcggggcctcgggaggacgctacacccatggacgcttatttgcgtaagcttgggctgtatcgcaaactggtggcgaaggatggctcatgcctttttcgggcggtggccgaacaggtcttacactcccagagtagacacgtggaagtgcggatggcttgtatccattatttacgcgagaacagagagaagttcgaagccttcatagagggcagctttgaggagtacctaaaacgccttgaaaacccacaggagtgggtgggacaggtcgagatttccgctctgtcccttatgtatcgcaaagattttattatatatagggagcccaacgtatctccaagtcaggtaaccgagaataactttcccgaaaaagtccttctttgtttctcaaacggtaatcactacgacattgtgtaccctataaaatataaggagtcgagcgccatgtgccagagcctactgtatgaattactgtacgaaaaagtcttcaaaaccgatgttagcaaaattgtcatggagctggatactcttgaggtggctgacgaagacaattccgagatatcggacagtgaagatgactcttgtaagtcaaaaactgcagcggccgctgccgacgtaaacggatttaagcccttaagcggcaatgagcagctgaaaaataacgggaatagtacgagcctccccctgtctcgcaaggttctgaaatctcttaatcccgctgtctataggaatgtggagtacgaaatctggcttaagtccaaacaggcccagcagaagagagactacagtatcgccgcgggcctgcagtacgaggtcggcgacaaatgtcaggtgcgactggaccacaacggcaagttcctgaacgctgacgtacagggaattcactccgaaaatggacctgtccttgtggaggaactgggaaagaaacacacatctaagaacctgaaggctcctcctcctgaatcatggaatacagttagcggtaagaaaatgaagaagccgtccacaagtggacagaactttcattctgacgtggactatcggggtcccaagaatccatctaagcccatcaaggccccgtcagcccttcctcctcgcctgcagcacccttcaggggtgagacagcatgctttttcttcacattccagtggctcacagagtcagaaattcagctccgaacacaaaaatctgtcccggacgccatcccagattatccgaaaacctgaccgagagagagtggaggacttcgaccatacttcacgggaaagtaactatttcgggctgtctcccgaagagcgaagagagaagcaagctatcgaggagagtaggctactgtacgagattcagaaccgcgacgagcaggcattccccgctctctcttcctcttctgttaaccagtccgcctcgcagagctcaaatccatgtgtccagagaaaatcctcccatgtgggagaccgcaaagggagtaggcgccggatggacaccgaagaaagaaaagacaaagattcaatccatggccacagtcaactagataagaggcctgaaccatctactctggaaaacattacggacgataagtacgccacggtgtcatcgccctccaaatctaagaagctggaatgtccgagtccggccgagcagaagcctgcagaacatgttagtctttcaaacccagccccactgctggtgtcaccagaggtgcacctcacccctgctgttccttccctgccggccacggtccccgcatggccgagtgaacccaccacattcggaccgaccggagtccctgcccccattccagttctttctgtcacacagacactgaccaccggtcccgactccgcagtctcgcaagcgcacttgaccccctcccctgtccccgtgtcaatccaggcggtgaaccagccgctcatgccgctcccccagactttgtctctataccaggaccctctttacccaggatttccctgtaatgagaaaggcgatcgtgccatcgtccctccttactcactttgtcagactggagaggacctgcccaaagataaaaatatcctgagattcttttttaatctcggtgtcaaggcttacagctgccctatgtgggcaccgcactcctacctgtacccacttcaccaagcatacttggcagcctgtcggatgtaccctaaagtaccagttccagtgtatcctcacaatccctggttccaggaggcacccgccgcacaaaacgaaagtgattgtacttgtactgatgctcattttccaatgcagactgaggcatccgttaatggacagatgcctcaacctgagatcgggccacccacgttcagctcgccactggtgataccgccctcccaggtgagcgagtcacacgggcagctaagctaccaggccgatctggaatcagagactccaggacaattactgcacgccgattacgaggagagtctcagcgggaaaaatatgtttccccagccctcatttgggccaaatccttttttggggcccgtgccaatagcacccccctttttccctcacgtgtggtatggatacccgttccaaggatttattgagaacccagtaatgagacaaaacattgtactaccgtcagacgagaaaggcgaactggacctctctctagaaaacctggacttgagtaaagattgtggctccgtcagcacggttgatgaattcccagaggctcgcggggaacacgttcactcactgcctgaggcctccgtctcttctaagcccgacgaaggtcgaactgagcagagcagccagactcggaaggctgacacggctctggcttcaatccctcccgtagcagagggaaaagctcaccccccgacccagattctaaatcgggagagagaaaccgtgcccgtcgaactggagccgaagcggacaattcagtcactgaaggaaaagacagagaaagtcaaagaccctaagaccgccgcggatgtcgtcagtcccggagctaactctgtggactcccgcgtccaacgccccaaagaggagagttctgaggatgagaacgaagtgagcaacattcttaggtccggaaggtctaaacagttttataaccagacatatggaagcagaaaatacaagtctgactgggggtatagcggaagaggcggatatcagcacgttaggagcgaggagtcctggaaaggtcagccgtcacggagcagggacgagggctaccagtatcacaggaacgtcagaggtaggcccttcaggggtgaccgtcgccgcagcggcatgggcgatgggcacagaggacagcacacttag

SEQ ID NO: 127491 - DNA, 3150 bp, synthetic construct
  misc_feature 1..3150: note = Description of Artificial Sequence: Synthetic coding sequence
  source 1..3150: mol_type = other DNA
atggcgtgtattcattatttgagggaaaatcgcgagaaatttgaggccttcattgaaggctcatttgaggagtatctgaagcggcttgagaatcctcaggagtgggttggacaagtagaaatcagcgcactgtcattgatgtacaggaaggactttataatctatcgcgagcccaacgtatcccccagccaggtgacagaaaacaactttccagaaaaggtgttactatgcttttcgaatggaaaccactacgatattgtgtatccaatcaaatataaggagtcaagcgcaatgtgccagtctctgttatacgagctgttgtatgaaaaagtgtttaagaccgacgtgtccaaaatcgtaatggaactggacactctggaagtggccgacgaggataatagcgagatttcagatagtgaggacgattcttgcaaaagcaagacggccgccgcagctgcggatgtcaatggttttaaacctctgtctggcaacgaacagttgaagaataacggcaatagtacatcccttcctcttagtaggaaggtgttgaaatcactgaatccagccgtttatcgtaacgtggagtacgaaatttggctcaaatccaagcaggcccaacagaagagggactatagcattgccgccggcttgcagtacgaagtgggggataagtgtcaagtcagactggatcataacggcaagtttctgaatgcagatgtgcagggcatacactcagagaatggtcccgtcttggtcgaggagctcgggaagaagcatacctctaagaacctgaaggcccccccgcccgagtcctggaacaccgtgagtggaaagaaaatgaagaagccctctactagcggccagaatttccattcggatgttgactaccgaggacctaagaatcccagcaaacccatcaaggccccctcagcactgccgccgcgcttacagcatcccagtggggttaggcagcacgcattctcaagccacagctctggatcacaaagtcagaagttcagttcagagcataagaatctgagcagaaccccttcccagatcatcagaaagccagatagggagcgcgtggaagatttcgaccatacctctcgagagtcaaattacttcgggctatcacccgaagagagaagggagaaacaggcaatagaggagagccggttgttgtacgagatccaaaaccgcgacgaacaagcatttcccgcactgtctagctcgtctgtgaatcaatctgcgtcccagtcatcaaatccatgtgtgcaacgcaaatcttcacacgttggcgatcgcaagggtagccgccggcgcatggatacagaagagcggaaggacaaagatagtatccatggccatagccagctggataaacgaccggaaccttctaccttggagaacattacggatgacaaatatgctacagtgtccagcccctctaagtcgaaaaaattggagtgcccctcaccagccgagcagaagcctgctgagcatgttagcctgagcaacccagcacccttactggtgagccctgaggtacacctcaccccagcagtgcctagtctgcctgccactgttcctgcctggcctagcgaacctacaacttttggtcccaccggagtgcccgcccctatccctgtgttgagtgtaacccaaactctcacaactggtcctgactctgctgtgtcgcaggcccacctgactccctcaccagtaccggtttccatccaagccgtaaaccaacctctgatgcctctgcctcagactctgtcactgtaccaggatccattgtacccaggcttcccttgtaatgaaaagggggatcgcgcaatcgttcctccttatagcctgtgtcagaccggagaagacctccccaaggataaaaatattctccgctttttcttcaacctgggcgttaaagcctactcatgccctatgtgggctccccactcatatttatatcctcttcatcaggcatacctcgcggcgtgtcgaatgtatcccaaagtgccagtccccgtctaccctcacaatccttggttccaggaggctcccgcagctcagaatgagtctgactgtacatgcaccgatgcccactttcccatgcagacagaagcgtcagttaacggccagatgccccagccagagatcgggcctccaaccttctcgagtccattagtgatccctccgtcccaagtgtcagagagccatgggcagctgtcctatcaggccgatctggagagtgagacccctggtcagctgcttcacgcagactacgaagagtcactatccgggaaaaacatgtttccccagcctagctttgggcctaatccctttctcgggcccgtgccaatagcccctccattctttccccacgtttggtacggatatcctttccaggggttcatcgagaaccctgtgatgaggcagaacatcgtactcccaagcgacgagaaaggcgagctagacctttctctggagaatctggacctgagcaaagattgcggcagtgtgtcaacagttgatgagtttcctgaagccagaggagagcacgttcatagcttgcctgaagcttcggtgtcgagtaagcctgatgaggggcggaccgaacagagctcccagacccgcaaagctgacaccgccctggcctctataccacctgtggctgaaggaaaagcccaccccccaacacagatcctcaaccgggagagagaaacagtgcccgttgaattggagccaaaacgaactatccagtctctcaaggagaagaccgaaaaggtgaaggatcccaagaccgcagcagatgtggtatccccaggagctaacagcgtggattcgagagtccagcggccaaaagaagaatcctccgaggacgaaaacgaggtcagtaatatactgaggagcgggcgcagcaaacaattctacaatcagacatacgggtctcgcaagtacaagtctgactgggggtatagtggcaggggcggctaccagcacgttcgttccgaagagtcctggaaaggtcagccaagccgatcaagggacgaaggctaccagtaccaccgaaacgtgcgcggacggccatttcgaggcgaccggcgccggtccgggatgggggatggacaccggggacagcacacctag

SEQ ID NO: 127492 - DNA, 420 bp, synthetic construct
  misc_feature 1..420: note = Description of Artificial Sequence: Synthetic coding sequence
  source 1..420: mol_type = other DNA
atggcgtgcattcattatttgcgcgagaaccgcgagaaattcgaggcttttattgagggttcattcgaagagtatctgaaacggctcgagaacccgcaggagtgggtcggccaggtcgagatctccgccctgagcctgatgtatcgcaaggacttcataatctatcgtgagcccaacgtgtctccatcacaagttaccgagaacaatttccctgagaaagtgcttctttgctttagcaacggcaatcactatgacatcgtctaccctattaaatacaaggaatctagcgctatgtgccaaagcctgttatacgaactcctgtacgagaaagtgttcaagactgatgtctccaagattgtcatggaactggacaccctggaagtggccgatgaagacaattctgagatctccgacagctag

SEQ ID NO: 127493 - DNA, 438 bp, synthetic construct
  misc_feature 1..438: note = Description of Artificial Sequence: Synthetic coding sequence
  source 1..438: mol_type = other DNA
atggcatgcattcactatctcagagagaaccgggaaaaattcgaggctttcatagaggggtccttcgaagagtatctcaagcgactggagaacccgcaggaatgggtgggacaggttgagataagtgcactttccctgatgtaccggaaggatttcatcatctacagggagccgaatgtgtcccccagtcaagttaccgaaaacaatttccctgagaaggtgctcctctgttttagcaacgggaaccactatgacatcgtgtaccctattaaatacaaggagtcaagcgcaatgtgtcagtcgttgctttatgagctcttgtacgagaaggtcttcaagaccgatgtatctaagatcgtaatggagctggacactcttgaggtggctgatgaggataattccgagatcagtgatagcgaagatgacagttgcaagtag

SEQ ID NO: 127494 - DNA, 1716 bp, synthetic construct
  misc_feature 1..1716: note = Description of Artificial Sequence: Synthetic coding sequence
  source 1..1716: mol_type = other DNA
atgacgattctgccgaagaaaaagcctccacctccagacgccgacccggcgaatgagcccccgccccctggcccaatgcctcctgcgccccgaagaggaggcggagtgggagtaggaggcgggggcaccggggttggaggcggagatcgagaccgtgatagtggtgttgtgggggcaaggccacgggcctcaccccctcctcagggaccactccctggaccgcccggcgccttgcatagatgggcactggctgtgcccccgggggccgtcgccggtcctagaccccagcaggcttctcctccgccctgcggcggtccagggggaccaggtggcggtccgggcgatgcactgggtgctgctgctgctggagtcggagccgcaggcgtggtcgtgggggttggtggcgctgtcggtgtgggcggatgttgctccggccctggccattcgaaacggcggagacaggctccaggcgttggggcagtaggggggggttcacctgagcgcgaggaggttggcgcaggctataatagtgaagacgagtacgaagcggccgccgctcgtattgaggccatggatcctgctacagtcgaacagcaggagcactggtttgaaaaagctctgcgtgataagaagggcttcattatcaagcagatgaaggaggacggagcatgcctttttcgagcagttgctgaccaggtctatggagaccaggatatgcatgaggtggttcggaaacattgtatggattatctgatgaaaaatgcagactattttagcaactacgttacggaagacttcacaacctatatcaaccggaaacgaaagaataactgtcatggtaaccatatcgaaatgcaggcgatggccgagatgtacaaccggcctgtagaagtgtaccagtacagcactggcacctcagccgtggagcccattaatacctttcacggaattcatcagaatgaagacgagcccataagagtgagctaccaccggaacatccactataactccgtggtgaacccaaataaggctaccatcggcgttggcctgggtctcccaagtttcaagcctggctttgcagaacagtctctcatgaagaacgctatcaagaccagcgaggagagttggatagaacagcagatgcttgaggataaaaaaagggcaaccgactgggaagcgacgaacgaagcaattgaagaacaggtggctagagaatcctatctgcagtggctcagagatcaggagaagcaggcgagacaagtgcgcgggccatcgcagccccgcaaagcaagcgctacttgctcatccgccacagccgctgctagctccggtctggaagagtggacttccaggtcgcccaggcagcgcagcagtgcttcaagtcccgagcaccccgaacttcacgccgaattaggaatgaagccaccctctcctggcacagtgttagcactggcaaagcccccatccccttgtgcacccggtaccagtagtcaattttcagctggcgccgaccgcgctacatcaccgctggtttccttataccctgctctcgaatgcagagctctgattcagcagatgagccccagtgcttttgggctgaacgattgggatgacgacgagatactggcttctgttctggccgtgagccagcaagaatacctggactcgatgaagaagaacaaggtgcaccgggacccgcctcccgataagtcctag

SEQ ID NO: 127495 - DNA, 1701 bp, synthetic construct
  misc_feature 1..1701: note = Description of Artificial Sequence: Synthetic coding sequence
  source 1..1701: mol_type = other DNA
atgaccattctcccaaaaaaaaagccacctcccccggatgctgaccccgccaacgagcctcccccacccgggccaatgcccccagcacctcgccgcggcggcggcgtgggcgtaggtggaggggggaccggggtaggcggcggggacagggaccgtgactccggggtcgtgggagccagaccccgtgcctccccgccaccccagggccctctgcctgggccacccggggcccttcaccgttgggctctagccgttccacccggcgccgtcgctggccccagaccacagcaggcctcccctcctccctgtggtggccctgggggccccggaggtggccccggcgatgcgctgggggcggccgccgcgggagttggagctgcaggagttgtagttggcgtgggaggggccgtgggggtggggggatgctgttccggcccgggccactcgaagagacgtcggcaagcccccggtgttggggctgttggtggcggaagtcccgagagggaagaggttggcgcaggctacaattcagaggatgagtacgaagccgccgcggctagaattgaggctatggatcctgctacggtggagcagcaggagcattggttcgagaaagccttacgtgacaaaaagggttttatcatcaaacaaatgaaggaagatggtgcttgcctgtttcgtgccgtcgccgatcaggtttatggtgatcaggacatgcatgaggttgtgagaaagcattgcatggattacctgatgaagaacgccgattatttttccaactacgtcacagaagattttacaacatacatcaataggaagcggaagaataattgccacggaaatcatatcgagatgcaggccatggcagaaatgtataatcggccagtcgaggtctaccagtactctacagagcccatcaacacctttcatggcattcaccagaacgaggatgaaccaatcagagtgtcctatcatcggaatatccactacaattctgttgtgaacccaaataaggcaaccatcggcgttggcctaggtctgccctccttcaagcccgggttcgctgagcaatctctcatgaaaaacgctattaaaacatctgaggagagttggattgaacagcagatgctcgaagacaagaaacgtgctaccgactgggaggccacgaacgaggccattgaagaacaggtggctcgcgaatcctacctgcagtggcttagggaccaggagaaacaggcccggcaggttcgaggacctagccagccgcgcaaggcatcagccacctgttcttcggcaacagctgctgcctctagcggactggaagagtggacatcccgctcccccaggcaacggagctccgcgtcctctcccgagcaccccgaactgcacgccgaactcggcatgaaacctccaagcccaggcaccgtgctagccttggccaagcctccctccccatgtgcccctggtacctccagccagttctctgcaggagccgatcgcgcaactagcccactggtctcactataccctgcactcgaatgtcgcgccctgattcagcaaatgtctccatctgccttcgggctaaacgactgggatgacgatgagatcctggccagtgtgctcgcggtgtctcagcaagagtacctcgattccatgaaaaagaataaggtgcacagagatcctcccccagacaagtcctag

SEQ ID NO: 127496 - DNA, 1701 bp, synthetic construct
  misc_feature 1..1701: note = Description of Artificial Sequence: Synthetic coding sequence
  source 1..1701: mol_type = other DNA
atgacaatactccctaagaagaaaccccctcctcctgatgcagacccagcaaatgaacccccgcccccaggacccatgcctcccgcccctagaaggggcggaggtgttggagtgggtggagggggtaccggagtggggggaggggacagggaccgcgacagtggcgtggtgggcgcgagaccccgagcttcgccccccccccaggggcctttacccggcccacctggagcgctgcaccggtgggccctggctgtgcctcccggcgctgtggccggccccaggccccaacaagcctcccccccgccatgcggaggccccggtggacccgggggaggacccggcgatgcattaggcgcggctgcagctggcgttggagcggcgggagtggttgttggcgtcgggggcgccgtgggcgtcggcggatgttgcagtggtcccggacattcaaagaggcgaagacaggcgccaggtgtgggcgccgtgggcgggggtagcccagaacgggaagaggtcggagcagggtacaactctgaggatgaatatgaggcagcagcagctcgcattgaagcgatggatcctgcaaccgtggagcagcaggagcattggtttgaaaaggccctgcgcgacaaaaaaggtttcattattaaacagatgaaagaagacggggcttgtttatttcgggccgtcgcagaccaggtgtacggggaccaagacatgcacgaagttgtccggaagcattgtatggattatctgatgaagaatgccgattacttttcaaactacgtgaccgaggactttactacatatatcaacagaaagcggaagaacaactgtcatggcaaccacatagaaatgcaggccatggccgaaatgtacaatcgcccagtggaagtgtatcagtattctactgagcccatcaacacctttcatggtatccaccagaatgaggacgaacctattagagtgtcctaccataggaacatccattacaactctgtggtcaatcctaacaaggcaaccattggagttgggctcggtctcccatcatttaagcctggcttcgcagagcagagtctgatgaagaacgctattaagacctccgaagaatcctggatcgagcaacagatgctggaggataaaaaacgtgctacggactgggaggcaaccaatgaggccatcgaagaacaggtcgcgagggaatcttacctgcagtggctgagagatcaagagaaacaggctaggcaggttagaggccccagccagcctcgcaaagcatctgctacatgttcaagcgcaacagccgcagcctccagcggactagaggagtggactagcagaagtcctagacaaaggtcttctgcctccagccccgaacacccggaactccacgctgaactcggtatgaagccgcctagtcccgggacggtcttagctctggccaaacctccgtccccatgcgctccgggcactagcagtcagtttagcgccggggccgacagggctaccagccccctagtgagtttgtacccagcccttgagtgccgggctttgattcagcaaatgtcgccgtctgcattcggtctaaatgattgggacgatgacgaaatcctcgccagcgtgctcgccgtgagccagcaggaatatctggatagtatgaagaagaacaaagtgcatcgtgacccacccccggacaaaagctag

SEQ ID NO: 127497 - DNA, 1050 bp, synthetic construct
  misc_feature 1..1050: note = Description of Artificial Sequence: Synthetic coding sequence
  source 1..1050: mol_type = other DNA
atgaaggaagatggcgcatgtctatttagggcagtggccgatcaagtttacggagatcaggacatgcatgaagtggtccgtaaacactgcatggattatctgatgaaaaacgcagactatttctcaaactacgttaccgaagatttcacaacctacatcaaccgcaaacggaaaaacaattgccatggtaaccacattgaaatgcaggccatggcagagatgtataaccgcccagttgaagtctatcagtactctactgaacccatcaacaccttccacggaatccaccaaaacgaggatgaaccgattcgggtgtcatatcaccgaaatatacactataactccgtggtgaatccaaacaaagcaaccataggtgtgggactgggattaccttcctttaagcccggctttgcagagcagagtctgatgaaaaacgcaatcaagacgagtgaagagagctggatcgagcagcagatgctcgaagacaaaaaacgggcgacagattgggaggccactaatgaggcaatcgaggaacaggtggcgagagaaagctatctgcaatggctccgcgatcaggagaagcaagcgagacaagttagaggaccatcccagcccagaaaggcgtcagccacatgttcttctgcaaccgcagcagccagctctgggcttgaagagtggacctccagatcaccccgccagcgatctagcgcttcctcccctgagcaccctgagcttcacgcagagcttggcatgaagccgccgtctcctggaactgttcttgccttggccaaacctccaagtccttgtgcccctggaacgagctcccaattctctgccggggcagaccgggccacaagcccactggtctctttgtaccccgccctcgaatgccgcgcccttatccagcagatgtcccctagtgcttttgggctgaacgattgggatgatgatgagatacttgcctcagttctcgccgtcagccagcaggagtacctggattctatgaagaaaaataaggttcacagggaccccccccctgacaagagttag

SEQ ID NO: 127498 - DNA, 1629 bp, synthetic construct
  misc_feature 1..1629: note = Description of Artificial Sequence: Synthetic coding sequence
  source 1..1629: mol_type = other DNA
atgacgattctcccgaagaaaaagccgcctccgcccgatgccgatcctggaggaactggcgtgggcggaggggacagggaccgagactctggggtagtgggggctcggcctcgcgcaagcccccccccacagggcccactgcctgggccacccggggcactgcaccgctgggcgcttgccgttccaccgggggccgtggctggtccccggcctcaacaggcctctcctcccccatgtggggggcctggagggcccggcgggggaccaggcgatgctctcggagccgctgctgccggcgtgggtgctgccggtgtggtggtgggcgtgggaggggctgtcggtgtagggggatgctgcagcggcccaggacattccaagcgccgacgacaggcccccggagtgggagcagtcggaggtggcagtccagagcgggaggaggtgggggcggggtacaactcggaggatgaatatgaggccgcggctgcccgaatcgaggcaatggacccggcaacggtcgagcagcaggaacactggttcgagaaggctcttcgcgacaaaaaggggttcataatcaaacagatgaaagaggacggagcttgtttattcagagctgtggcagaccaagtgtatggcgatcaggacatgcatgaagtcgtgcggaagcactgcatggattatctgatgaagaacgcagactatttttcgaactacgtgacggaggactttactacctatatcaatagaaagcgtaaaaataactgccatggaaatcatatcgaaatgcaggccatggcagaaatgtacaatcgcccggtggaggtttaccagtacagtacagaaccaatcaacacattccatggaatccaccaaaacgaagacgagcccatccgtgtgtcataccacagaaacatccactataacagtgtcgttaatcctaacaaggctactattggtgtcgggctgggtttacctagcttcaaaccaggattcgctgagcagtcgctcatgaaaaacgccatcaagactagtgaagaatcctggattgaacagcaaatgctggaagataaaaagcgagccactgactgggaggccaccaacgaggcaatcgaggagcaggtagcacgagaatcctacctgcagtggttgagagaccaggagaagcaagcgcggcaggttagggggccctcccagccaaggaaagcttcggctacatgttcgtcggccacagcagctgctagtagcggcctggaggagtggacctctagatccccccgtcagcgttcaagcgcttccagtccagagcaccccgaattacacgcagagttagggatgaagcctcctagccccggtaccgtgttggccctggctaagccacccagcccctgtgcacccggtacctcctcacagttttctgcaggtgccgatcgcgcaacttctcctctggtttcactttaccctgctctagagtgtcgagccctgatacaacagatgtctccaagtgccttcggcctaaatgattgggatgatgatgagatcctcgcgtccgtgctcgctgtaagtcagcaggagtacctggattcaatgaagaagaacaaggtgcatcgggaccctccaccggacaaaagttag

SEQ ID NO: 127499 - DNA, 1335 bp, synthetic construct
  misc_feature 1..1335: note = Description of Artificial Sequence: Synthetic coding sequence
  source 1..1335: mol_type = other DNA
ggtgttgtggtgggggtggggggggctgtgggggtcggaggctgctgcagtggacccggacattccaagcgtagacgccaggcccctggtgtcggggctgttgggggaggctctcccgaaagggaggaagtcggagctggctataactctgaagacgagtatgaagccgccgcggcaaggattgaggccatggacccagcaacggtggaacagcaagagcactggtttgagaaagcactgagggacaaaaaggggttcattatcaagcaaatgaaggaagacggtgcctgcttgtttcgagccgtcgcagaccaggtctatggggatcaggatatgcacgaggtcgtaaggaagcattgtatggactacctgatgaagaatgccgactacttcagcaactatgtcaccgaagactttactacgtacattaaccgaaaaagaaaaaataactgtcacggtaatcatatcgagatgcaggccatggctgagatgtacaatcggccagtggaagtctaccagtacagcacaggtacgagcgccgtcgagcctatcaatactttccatgggatccaccagaatgaggacgaaccgattcgagtgtcctatcacaggaatatccattacaattctgtcgttaaccccaacaaggcgaccattggggtgggattgggtctccccagctttaagcctgggtttgctgaacaatcactcatgaaaaacgccattaagacgtcagaggaatcttggatcgagcagcagatgcttgaggacaaaaaacgggcaacagattgggaggccaccaatgaagctatcgaagagcaggtggctcgagagagctatctgcaatggttaagagaccaggagaagcaagctcggcaggtgagaggccctagccagccgaggaaggcctccgccacttgttccagtgctaccgcggccgcctcttccggattggaagagtggacttcgagaagcccacggcaaaggtccagcgcttccagtccagaacacccagaattgcatgccgaattgggcatgaagccccctagccctggcacagtactggcacttgctaagcccccctctccatgcgcgcccggcacatctagtcagttctctgccggcgccgatagggctacgagccctttggtatcactgtatcccgccctcgaatgccgtgccctcatccagcagatgtccccaagcgcttttggattaaacgattgggacgacgacgagatactggcttcagtgctggctgtgagtcaacaggaatatcttgactctatgaaaaaaaacaaggtgcaccgggatccaccaccagacaagagttag

SEQ ID NO: 127500 - DNA, 867 bp, synthetic construct
  misc_feature 1..867: note = Description of Artificial Sequence: Synthetic coding sequence
  source 1..867: mol_type = other DNA
atggacgatccaaaaagtgaacagcaaaggatcctgcgccgtcaccagcgcgagcgccaggaactgcaggctcagatccgtagcctgaaaaattccgtgcctaaaaccgataagactaaaagaaagcagctcctgcaggatgtggcacggatggaagctgagatggcacagaagcaccgccaagagttagaaaagttccaagatgactcatccatagagtctgttgtcgaagaccttgccaagatgaacctggaaaatcggccaccaagaagcagcaaagcacaccggaaacgggaacgcatggagtcagaggagcgagagcgccaggagtcaatctttcaggcagagatgtcggagcacctagctgggtttaagagagaggaggaagagaaactagcagctatactaggagcccggggactggaaatgaaggcaataccagccgatgggcattgtatgtatagggctatccaggatcagcttgtgttttccgttagcgtggaaatgctcagatgccgaactgcttcatacatgaaaaagcacgtcgatgagttcctgcctttctttagcaaccccgaaacttctgattcctttggctacgatgatttcatgatttattgtgacaatatcgtaaggacaacagcctggggagggcagttagaactgagagctctgtcacacgtcctcaagactcccattgaagtgatacaggccgacagtccaaccctgataataggagaagaatacgtcaagaagccaatcattctggtttacttacggtatgcatattctctgggtgagcattacaacagtgtgacgcctctggaagcgggggcggccggaggcgtgctgccccggcttctgtag

SEQ ID NO: 127501 - DNA, 972 bp, synthetic construct
  misc_feature 1..972: note = Description of Artificial Sequence: Synthetic coding sequence
  source 1..972: mol_type = other DNA
atggaaccgcgcgtccgcgtggaaggctggaaggtgcctacatcgaggtgtcgatttctgctagctagagtcctcgggtacttagtcgttatggaagcagtattgaccgaagagctggatgaggaagaacagttgctgcgccggcatagaaaggagaaaaaggagctgcaggccaagatccagggaatgaaaaacgctgtccctaagaacgataagaaacggcggaagcagctgaccgaagacgttgccaaacttgaaaaagagatggagcagaagcaccgggaagaactggagcaattaaaattaacaaccaaagagaacaagatcgactctgtggcagttaatatttctaacctggtcttagaaaatcagcctccacggatcagcaaggcgcagaagaggagggagaaaaaggctgctctcgagaaggaaagggaggagaggatagctgaagcggagatagagaatcttacaggtgctcgccacatggaatccgagaaactggctcagatcctggcagccagacaattggagatcaaacagatcccttctgacggccactgcatgtataaggcgattgaggaccagctcaaggaaaaggattgtgccctaaccgtcgtggcgcttcggtcccaaactgccgagtacatgcagtcccacgtggaagattttctgccatttctgacgaatcctaatactggagatatgtacactcctgaagaatttcagaagtactgcgaagatatcgtgaacaccgcggcttggggaggacaactggaacttagagccctatcacacattctgcagacgcctatcgaaatcatccaggcagactctccacctatcattgtgggtgaggagtatagcaaaaaaccactgatcttggtgtatatgcggcacgcctatggattaggagaacattacaacagcgtgactaggctcgtgaacatcgtcaccgaaaattgtagttag

SEQ ID NO: 127502 - DNA, 579 bp, synthetic construct
  misc_feature 1..579: note = Description of Artificial Sequence: Synthetic coding sequence
  source 1..579: mol_type = other DNA
atgataagcaaagagaagaaggctgcactcgagaaagaaagggaagagcgaatagccgaggccgagatagaaaatctgaccggcgcccgtcacatggagagcgagaaactggcacagatcttggccgcccggcaactggaaatcaagcagatccctagcgacgggcactgcatgtacaaagctattgaggatcagctgaaggaaaaggactgtgcactgactgtcgtagccctgaggagccagactgctgagtatatgcagtcacatgtggaagacttcttaccttttttgaccaatcccaacaccggcgatatgtacacccccgaagaattccagaaatactgcgaagacattgtaaacaccgcagcgtggggggggcaactggaactacgggcgctttctcacatcttgcagactccaatcgagattatccaggccgattcccctccgattatagtgggagaagagtatagtaagaagcctcttatcctggtttacatgcgacacgcctacggcttgggcgaacattacaactccgtgaccagactggtcaacattgtgactgagaactgttcatag

SEQ ID NO: 127503 - DNA, 2781 bp, synthetic construct
  misc_feature 1..2781: note = Description of Artificial Sequence: Synthetic coding sequence
  source 1..2781: mol_type = other DNA
atggtgagcagcgtgctgcccaatccgaccagtgccgagtgctgggctgccctcttgcacgaccccatgaccctcgatatggatgccgtccttagtgactttgtgagatccacgggcgccgagccagggcttgctagagacctgttggagggtaaaaattgggatctgaccgctgccttgtcagattatgagcagttgcgtcaggtgcacactgccaacttacctcatgtgttcaatgagggacggggtcccaaacaacctgaaagagaaccacagcccggacataaggtggaaaggccttgtctccagcgccaggacgacatcgcccaggaaaaacgactcagccgcggcatctcccatgctagcagcgccatcgtgtccctggctcgcagccatgtcgcatccgagtgcaacaatgaacaatttcccctggagatgcccatttataccttccagctgccagacctaagcgtgtactccgaggatttcagaagcttcatcgagcgggacctaatagaacaggctaccatggttgcactggagcaggccggacgactcaactggtggtctaccgtctgcacctcatgcaaaagacttttgcccctcgccacaaccggggacggaaactgtctgctccacgcagcatctctgggcatgtggggatttcatgatcgggacctggtgctgcgaaaagcactgtacacaatgatgaggacaggggccgaacgggaagcactgaagcgccgatggcgttggcaacagactcagcaaaacaaggaggaagaatgggagagagagtggacagaattgttaaaactggcaagtagcgagccccgcacacacttttctaaaaatggcgggactggaggaggggtagataatagtgaggatcctgtgtatgaatccctcgaggagttccacgtgttcgtactagcacacatactgcgaagaccaattgtggttgtggctgataccatgcttcgggactccggaggtgaagcatttgcccctatccccttcgggggaatttatctgccgttggaggttccaccaaatagatgccactgctcgccactagtgctagcctatgaccaggcccacttctctgctctagtgagcatggagcagcgcgatcagcagagggagcaggcagtgattccactcactgactccgagcacaaactgcttccgctgcacttcgccgtcgaccctggaaaagattgggagtggggaaaggacgataacgacaatgcacgacttgcccacttgatcctgtctctggaagctaagctcaatcttctgcattcctatatgaatgtcacatggatccggataccaagtgagacccgcgcgccccttgctcagccagagtcccctacagcaagcgctggagaggatgtccagagtttggcggacagcttggattccgacagggacagcgtctgttctaactccaacagtaataatggcaagaatggtaaagataaagagaaggagaagcagcgcaaagagaaggataagacacgggccgatagcgtcgctaataagctgggaagttttagcaaaacccttggaattaagctgaagaagaacatggggggcttgggcggacttgtgcacggcaagatggggagagccaactccgccaatggcaaaaacggggattcagcagagagaggcaaggaaaagaaggccaagtcacgcaaagggagtaaggaggaaagtggcgctagtgcctccactagcccttccgagaaaaccacaccatcccccaccgataaagctgccggcgcctcaccagccgagaaaggtgggggtcctagaggagatgcctggaagtatagcaccgatgtcaagctgagtctgaatattttgagagcagccatgcagggagaaaggaagtttatttttgccgggttgctgttgaccagtcatcggcaccagttccatgaagaaatgatcggatactatctgacttccgctcaggaacggtttagcgccgaacaggaacagagaaggcgggatgcagccaccgccgccgccgcggccgccgctgctgcggccgcaactgccaaaagaccgccaagacggccagagactgaaggtgtgcccgtgccggaacgtgctagcccaggcccccctacccagctagtgctgaaactgaaagaacgcccgtcacctgggccagcagcgggcagggccgctagggctgctgccggggggaccgcctcccccggagggggcgcccggcgcgcctccgcgagcggccctgtgccgggcagaagcccccctgcaccagcacgtcaaagcgttattcatgtgcaggcgtcaggggcacgcgatgaagcttgcgcacctgccgttggagccctacggccctgtgcaacctaccctcaacagaataggtcgctttcctcccagtcttatagtcccgctagggcggccgccctgcgcacagtgaatactgtggaaagcttggccagagccgtcccaggagccctgcctggcgcagcaggcaccgcaggcgcagcagaacataagtcgcaaacctacaccaacggtttcggagctctccgggatgggcttgagttcgctgacgccgatgcacctaccgcccggtcaaatggtgagtgtgggcgcgggggccccgggcctgtgcaacgtcggtgccagagggaaaactgtgctttctacggcagggccgaaaccgaacactattgctcatactgctacagggaagagctacgcaggagacgggaggcccggggggctagaccatag

SEQ ID NO: 127504 - DNA, 2802 bp, synthetic construct
  misc_feature 1..2802: note = Description of Artificial Sequence: Synthetic coding sequence
  source 1..2802: mol_type = other DNA
atggtctctagcgtgcttcccaaccctacctcggcagagtgctgggcggcacttctccacgacccaatgacacttgatatggatgcagttttaagtgattttgtcaggtccaccggcgccgaacctggtctggctagagatctgctggagggcaagaattgggacctgaccgcagctctgtctgattacgagcagctgagacaggtccacactgctaacctccctcacgtgttcaacgaaggcagaggtccaaagcaacccgaacgtgagccacagcctggccacaaggtcgagcgcccttgcctccagcggcaggatgatatcgcccaggagaagaggctgtctagaggaatttcccatgcctcctcagcgattgtaagtctggcccgctcacacgtcgcttctgaatgcaacaatgagcagttcccattggagatgccgatctacacctttcagcttccggacctgtctgtatattcggaggacttcaggtccttcattgagcgagacctgatagaacaggcaactatggtcgctctggagcaggctggtcgactgaactggtggtccaccgtgtgtacgtcttgtaaaaggctacttcctcttgccacaacaggggacggcaactgcttgttacatgcagcctccttgggcatgtggggatttcatgatcgcgacctagtcctaagaaaagccctgtatacgatgatgaggaccggcgccgagagagaggctctcaagcgacgctggagatggcaacagacccagcagaacaaagagagtgggctcgtttataccgaggaagagtgggagcgagaatggacagagttgctgaaattggcatcttcagaaccacgcacacacttcagcaagaatggagggactggcggtggagtggacaactctgaggatcctgtgtacgagtcacttgaggaattccacgtgttcgtgctggcccacatcttgcgacggccaatagtcgtcgttgccgataccatgctccgagactccggcggcgaggcatttgctcctattcctttcggcggaatttacttgccactggaagtgcctcctaatagatgccattgctcaccactcgtgctggcatatgaccaggctcacttttcagcactggtgtccatggaacagagggaccaacagagagaacaagccgtgattccactgacagacagcgaacacaagcttctgcctcttcacttcgccgtggaccccggcaaagattgggagtgggggaaagacgataacgacaatgccaggctggcgcatcttattttgtccttggaggctaaattgaatctgctccacagctacatgaacgtgacttggatcagaattccctccgaaactagggcccccctggcccagcccgagtccccgacagcatccgcaggtgaggacgtgcagtcactcgcggatagcttagattcagatagggactcagtttgttctaacagcaattccaacaacggaaaaaacggcaaagataaagagaaggagaaacagaggaaggagaaagacaaaaccagggccgattccgtagctaacaagctgggttccttttctaagacgttgggaatcaaactaaaaaaaaatatgggtggcctgggtggacttgtgcatgggaaaatgggcagagccaattcagcaaatgggaagaacggggactctgctgagaggggaaaagagaaaaaagcgaagagccgcaaggggagtaaggaagagagcggagcttcagcttctacctcgccttcagaaaaaaccacacccagtcccaccgataaggcggctggagcttccccagctgaaaagggcgggggccctaggggggatgcttggaaatatagcactgacgtgaaactgagcctcaatatactgagagctgctatgcaaggcgaaagaaaattcatcttcgccgggttgctgttgacatcgcaccggcaccagttccatgaagaaatgatcggctattacctcaccagtgctcaggagaggttctcggccgaacaggagcagcgtcggcgggatgccgctaccgcagctgccgccgcagccgccgctgctgccgctaccgctaagcgcccaccgagacggcccgagacggagggcgttccagtccccgagagggcttccccgggaccgcccacacagttagtgctgaagctgaaggagcggccctcgcccggccccgcggccggacgagccgcaagggctgctgctggcgggaccgcgagccccggtgggggtgccaggcgcgcttccgcatccgggcccgtgcccggtcgaagcccacctgcccctgcccgacagtccgtgatccacgtgcaagcaagtggcgcacgagatgaagcctgcgcacctgccgttggcgccctccgtccctgtgcgacctacccccagcagaacagatcgttgtcatcccagtcttactcccccgctcgggcagccgccctgagaaccgttaatactgtggagtctctagcacgtgctgtgcccggtgctcttcccggggctgctggcacagctggggcggctgaacacaagtctcagacttacaccaacggcttcggagcgttacgcgacgggctggagttcgccgacgccgacgctccaaccgctcgcagtaacggcgaatgtggccgcggcggtcctgggccagtccaaagaagatgccagcgagaaaactgcgccttctacggccgagccgagactgaacactactgttcttattgttatagggaagagctccgacgacgcagagaggcccgtggggcccggccctag

SEQ ID NO: 127505 - DNA, 333 bp, synthetic construct
  misc_feature 1..333: note = Description of Artificial Sequence: Synthetic coding sequence
  source 1..333: mol_type = other DNA
atggtgtccagcgtgttgcctaatccaacgtctgctgagtgctgggccgctctgctccacgatccgatgacactcgacatggacgcggtactgtcagactttgtccgctcaacaggcgccgaacccggcctggccagagacttactcgagggaaaaaactgggatctgacagctgccctgtctgattacgaacagctaaggcaagtgcacactgccaatctacctcacgtgttcaacgaaggcaggggacctaaacagcccgaacgcgagcctcagcccggacacaaggtggaacgtccatgcctgcagaggcaggacgatattgcccaatag

SEQ ID NO: 127506 - DNA, 2532 bp, synthetic construct
  misc_feature 1..2532: note = Description of Artificial Sequence: Synthetic coding sequence
  source 1..2532: mol_type = other DNA
atgacccttgacatggacgcagtgctgagcgatttcgtcagatctactggagctgagcccggtctggcacgggaccttctagagggcaagaattgggatgtaaacgccgcgctctctgacttcgagcagctccgacaggtccacgccggaaatctccctccaagtttctcggaggggagtggtggttctaggactccagaaaaaggctttagcgatcgggaacctacaaggcccccacgacctattttacagcgccaagacgacatcgtacaggaaaaacggttaagcagaggtatttctcacgcgagctcatccattgtatccttagcccgaagccacgtatctagtaacgggggcggcggcggatccaatgagcatcctctcgagatgcctatatgcgcctttcagttacccgatcttaccgtttataacgaagatttcagatctttcatcgagagagatctgatcgagcagtctatgttggtggccctcgagcaagccggaaggttaaattggtgggttagtgtagatcccacctcacagagactgcttcctctcgctacgaccggcgatggtaactgccttctgcacgccgcgagtctggggatgtgggggtttcatgatcgggatctgatgctacgcaaggcactctatgcgctcatggagaagggcgtcgagaaggaggctctgaagaggcgctggcggtggcagcagacacagcaaaataaggagagtggacttgtgtataccgaagacgaatggcagaaagagtggaatgagctaatcaaactggcgtcgagcgagcccaggatgcacctcggtacaaatggcgctaactgtggtggtgttgagtcctctgaagagcccgtctacgaatccctagaggaatttcatgtgttcgtgctagcacacgtgctcagaaggcctattgtcgtggttgctgatacgatgctccgtgactccggtggcgaagcgttcgcacccatccctttcgggggtatatacctcccactggaggtgccagccagtcagtgtcaccgctctccattggtgttagcatacgaccaggcccatttctcagccctggtgtccatggaacaaaaagaaaacactaaagaacaagctgttatccctttgacagactcagaatacaagttgctccctctgcactttgctgtcgaccccggaaagggatgggagtggggcaaagatgattccgataatgtacgcctggcgtccgtcatcttgtccctggaggtcaaactgcacctcttacacagctatatgaacgttaagtggattccactgagctctgatgcgcaggcccctctcgcccagccagagtcacctaccgcttctgctggagacgagcccagatcaacccccgaatctggtgattctgataaagagtcagtcgggtcttcctccacgagtaatgaggggggacgacggaaggagaagagcaagcgggaccgtgaaaaagataagaaaagagcagacagcgtggccaacaagctggggtcatttggcaagaccttggggagcaaattaaaaaagaacatgggaggactcatgcacagcaaaggttcgaagccgggcggagtgggcactggcctgggtggatcctcgggcacagaaacccttgagaaaaagaagaagaactctctcaagtcctggaagggtggcaaagaagaggctgcaggagacgggcctgtgtctgaaaaaccaccagcagagagtgtagggaatgggggctccaagtatagccaggaggtcatgcagagtctaagcattttgcgtacggcaatgcagggagagggtaagttcattttcgtgggcacacttaagatggggcaccgtcaccagtatcaggaggaaatgatccaacggtatctgagcgacgctgaggagcgctttttagcggagcaaaagcagaaagaggctgagcgcaagattatgaacggaggcatcggcggcgggccaccacccgccaagaaacccgagccagatgctagagaggaacagccaacaggcccacccgccgaatctagagccatggccttttccaccggatatccgggagattttaccatcccccgcccatccggcggaggcgtgcactgccaggagccccgtcgacaattggctggaggcccgtgcgtggggggcctccctccttacgccacgtttccgcggcagtgcccacccgggcgtccttacccccaccaggatagcatccctagccttgagccaggttctcacagtaaagacggacttcatcggggcgcgctgttgccgcctccctaccgagtcgcggacagttactccaatggctacagggaaccccccgaaccggatggctgggccggtggcctccgaggactaccccccacccagacgaagtgtaaacagcccaactgctctttttatgggcacccggaaaccaacaatttctgttcttgctgttacagggaggaactgcggcgacgggagcgagagcctgatggggaacttctcgttcataggttttag

SEQ ID NO: 127507 - DNA, 1284 bp, synthetic construct
  misc_feature 1..1284: note = Description of Artificial Sequence: Synthetic coding sequence
  source 1..1284: mol_type = other DNA
atgaccttagacatggatgcagttctgagcgattttgtgcgctctactggggccgagcccgggctggccagagacctgctggagggaaaaaactgggacgtaaacgcagctttatccgacttcgaacagctgcgccaggtgcatgctggtaacttgcccccttcattttctgagggatccggggggagtcgaacccccgagaagggcttctcagatcgtgagccaaccagacctccccggccaatcctgcagcgccaggacgacattgtgcaagaaaagagattatctcgtggtatcagtcacgcatctagtagcatagtgagtctcgcaagaagtcatgtcagctctaacggaggcggcggcggcagcaacgagcatcccctggagatgcctatctgcgcctttcaactaccagacctgacggtttataacgaagactttagatctttcattgaacgcgacttaatcgagcaatcaatgctggtcgctttggagcaggccggccgtctaaactggtgggtgagcgttgaccccacgtcccagcgcctcctgcccttagcaacaacaggagatggcaactgtttgctgcacgcggcttcgctggggatgtggggctttcatgatcgtgatctgatgctgaggaaagccctgtacgcactgatggaaaagggtgtagagaaagaggcactcaagaggagatggaggtggcagcagactcaacagaacaaggagtccggcctggtctatactgaagacgagtggcaaaaagagtggaatgagctcatcaaactagcttcatcggagccaaggatgcatctggggacaaacggcgcaaattgtgggggcgtggagtcgtccgaggaacccgtgtacgaatcccttgaggagtttcatgttttcgtgctggctcacgtactgaggcgacctatcgtggttgtggccgacactatgctgcgagacagcggcggcgaggcattcgcacccatccccttcgggggtatttacttgcctctcgaggttcccgccagtcagtgccatcggtcgcctctcgttctggcttacgaccaggcccatttcagcgctctcgtgtccatggaacagaaggaaaacacaaaggagcaagccgttatccccctgaccgatagtgagtacaagcttctgcccttgcatttcgccgtagaccccggcaaaggctgggaatggggcaaggatgacagcgataatgttaggctggctagtgttattctgtcattagaagtcaagttacatcttctgcacagctag

SEQ ID NO: 127508 - DNA, 2445 bp, synthetic construct
  misc_feature 1..2445: note = Description of Artificial Sequence: Synthetic coding sequence
  source 1..2445: mol_type = other DNA
atgaccctagacatggacgccgtgctctctgatttcgtacgatcaaccggcgctgagccggggttggcaagagaccttctcgaaggcaagaactgggacgtgaatgcagccctttcagactttgaacagctgagacaggtccatgcaggaaacctccctccttcctttagcgagggctcaggcggctccagaacacctgagaagggtttcagtgacagagagcctacaagacccccacgacctattttgcagcgacaggatgacatagtccaggagaagaggctgtctagaggcatttcccatgcctcttccagtatcgtgtctctggcccgttcccatgtgtcatccaacggaggaggcggcggatcaaatgagcaccctctggaaatgccgatctgcgcctttcagctgcctgatcttactgtgtacaacgaggattttcgctctttcatagagcgcgaccttatcgagcagtcaatgcttgtggccttagagcaggcaggacgactcaattggtgggtgtccgtggatcctaccagccaacgccttctgcccctggcaacaacaggggacgggaattgcctgttgcacgccgcttccttggggatgtgggggttccacgatcgggaccttatgctccgaaaagctttgtatgcacttatggagaaaggagtggaaaaagaggcactaaagaggaggtggaggtggcaacaaacgcaacagaataaggaaagtggtctggtgtataccgaggacgaatggcagaaggagtggaacgaattaatcaaactggcttctagtgagccccgaatgcacctcgggacgaacggggctaattgcggaggagtcgagtcaagtgaggaacctgtctacgaatctctggaagagtttcatgtcttcgtgctggcacacgttttacgaagaccgattgtggtagtggccgacacaatgctgcgggactcgggcggtgaagccttcgccccgattcccttcgggggtatctatttacccttagaagttcctgcatcgcaatgccaccgatctcctctggtgctcgcgtacgaccaggcccactttagtgccctggtgtctatggagcagaaggagaatactaaagagcaagccgtgattccactaacagactccgagtacaaactgctgcccttgcacttcgccgtcgatcctgggaaggggtgggagtggggcaaggatgattcagacaacgtgcggctcgccagcgttatactctctttagaggtgaaactgcacctactgcactcgtacatgaatgtcaaatggatccccctatcatccgacgcccaggcccccttggcccagccggaatcaccaactgcgtcagccggagacgaacccaggagcaccccagaaagcggggattctgataaagagagtgttggctcgtcttcgacctctaacgaaggtggccgtcgtaaggagaagtctaagagggaccgggagaaggataagaagagggctgattccgtagctaacaagctggggtccttcggaaaaactctgggctcaaagttgaagaagaatatgggggggctgatgcactcaaagggaagcaagccaggcggagtcggcaccggattaggaggatcttccggcactgagactttagaaaagaaaaagaagaactctcttaagtcctggaagggtggaaaggaggaagccgccggggatgggccggtgtccgaaaaaccaccggccgagagcgtggggaacggaggatccaagtattcgcaagaagtgatgcagtcactgagcattttacgaacagccatgcaaggagaaggtaaattcatttttgtcggaacactcaagatggggcaccgtcaccaataccaagaggagatgattcagcgctacctttctgacgctgaggaaaggttccttgcagaacaaaagcaaaaggaggctgagcgaaagatcatgaatggcggcattggtggtggtcccccaccggccaagaaaccggaaccggatgccagagaggagcagcctaccggtccgcccgccgagtctagagctatggctttttccacaggctatccaggagatttcaccatcccccggccaagcggcggcggagtgcactgccaggagccccgacgccagctggccggaggcccttgcgtgggtggactccctccgtacgcaacatttcccagacaatgccctccaggcagaccgtacccgcaccaagactctattccctccctagaacctggtagccactccaaggatgggctgcaccggggcgcattgctgcctccaccctacagagtggcggacagctattccaatggctacagggaacctccggagccagacggctgggcaggcggactgcgcggcctccctccaactcagaccaagtgcaaacaacccgacggtgagctgctggtccacaggttctag

SEQ ID NO: 127509 - DNA, 927 bp, synthetic construct
  misc_feature 1..927: note = Description of Artificial Sequence: Synthetic coding sequence
  source 1..927: mol_type = other DNA
atgtgcggagtagagggctgctgccaaggaggagccacacggaggggctctcttcctggagggcgccagttggccacccgaaagcgatctgtcgttagacgctgtttgaagatggcagctgaggagccccagcagcagaagcaggagcctctcgggtcggacagcgaaggggtgaactgtttggcttatgacgaggctataatggctcagcaagatcggattcaacaggaaatcgcggttcagaaccctctcgtgagcgagaggctggagctaagcgtcctctacaaggaatacgccgaggacgacaatatctaccagcagaagatcaaagatctccacaagaaatacagttacatccgtaagacccgccccgatggaaactgcttttatcgggcctttggcttctcgcacctggaggcccttttggacgactcaaaagagttacagagattcaaggctgtgtcagccaagtcgaaggaggacctggtgagccaaggcttcaccgaattcacgattgaagacttccacaacaccttcatggacctaatcgagcaagtagagaaacagacatctgtggctgacctgttggcttcgttcaatgatcagtccacatctgattatctagttgtgtacctgcggctattaacatctggatatcttcaacgtgagtctaagttttttgaacacttcattgagggggggcgcaccgtcaaggagttttgccagcaggaagtcgagcccatgtgtaaagagtcagaccacattcacatcatcgctctcgcgcaggcattgtctgtatccattcaggtggagtacatggacagaggcgagggtgggaccacaaacccacatatcttcccggagggtagtgaacccaaagtgtatctgctgtaccggccaggtcactacgatatcctttacaaatag

SEQ ID NO: 127510 - DNA, 816 bp, synthetic construct
  misc_feature 1..816: note = Description of Artificial Sequence: Synthetic coding sequence
  source 1..816: mol_type = other DNA
atggccgcggaagagcctcagcaacaaaagcaggaacccctgggcagcgactctgagggcgtgaactgcctcgcttatgacgaggccattatggcccaacaggaccggattcagcaggagatagccgtgcagaaccccctggtatccgaaagactcgaactgagcgtgctctacaaggagtacgccgaagatgacaacatctaccagcagaaaattaaagaccttcataagaagtactcttacatcaggaagacccgcccggacggcaactgcttctaccgagccttcggcttcagtcacctggaagctctgctggacgattctaaggaattgcagcgtttcaaggccgtgtccgccaagtccaaagaggatctcgtgagtcaagggtttaccgagttcaccattgaagacttccacaataccttcatggacttgatcgagcaggttgaaaagcagacctccgtggcagacttacttgctagctttaacgatcagtctacatccgattatcttgttgtctaccttaggctattgaccagtggatatttacagcgtgaaagcaagtttttcgagcatttcattgaaggcgggaggaccgtgaaggagttctgccagcaagaagtggagccaatgtgcaaagaatccgatcacatacacattatcgctcttgcccaggctctgtctgtgtcaattcaggtggaatacatggacagaggtgagggcgggacaacgaatcctcatattttccccgagggcagcgaaccgaaagtgtatctactgtacaggccagggcactatgacattctgtataaatag

SEQ ID NO: 127511 - DNA, 816 bp, synthetic construct
  misc_feature 1..816: note = Description of Artificial Sequence: Synthetic coding sequence
  source 1..816: mol_type = other DNA
atggccgcagaagagcctcagcagcaaaagcaggaacctttgggctcagactctgaaggtgtgaactgtctcgcctacgatgaagcaatcatggcccaacaggaccggattcagcaggaaatcgctgtgcaaaatcctctcgttagtgagcgtctggagttatcagttctgtataaggagtacgccgaggatgataacatttatcagcaaaaaatcaaggaccttcacaaaaagtatagctacataaggaagactcggcctgatggaaattgtttttacagggcattcggcttcagtcacctggaagcactgcttgatgactccaaagagctccagcgctttaaggctgtgtctgccaaatctaaagaggatttggtttcacagggtttcactgaattcacaattgaggatttccataatacattcatggaccttatagaacaggttgaaaaacagacgtcagtcgctgacctcctggctagtttcaatgatcaatcaacatccgattacctggtggtatatttacgactgctcaccagtggctatttgcagcgagagtcaaagttctttgaacacttcattgagggcggtaggacagtcaaggagttttgtcaacaggaagtcgaacccatgtgcaaggaaagtgaccacatccatataattgctttggcccaggctctgagtgtgagcatacaggtcgagtatatggatcggggtgagggaggaaccactaacccccatatatttcctgagggctcagagccgaaagtgtacctgctttatagacccgggcattatgacattctctataagtag

SEQ ID NO: 127512 - DNA, 843 bp, synthetic construct
  misc_feature 1..843: note = Description of Artificial Sequence: Synthetic coding sequence
  source 1..843: mol_type = other DNA
atggctgctgaggagcctcagcaacaaaagcaggagcctctgggtagtgattcagaaggcgtcaactgtctggcgtatgatgaagccatcatggcccagcaggatcgcatccagcaagaagatatgacggatccttgtcttttgcagattgctgtgcagaatccactggtgtccgagaggctcgaattgtccgtgctctataaggagtacgcagaagacgataacatttaccagcagaagattaaagacttgcataagaaatattcatacatacgtaaaacccgccctgatgggaactgcttttacagagcctttggattctctcacttagaagctctgctcgacgacagcaaagagttgcaacggtttaaagctgtgtctgcaaagagcaaggaagacctggtgagtcagggcttcaccgaattcacgatcgaggactttcataacacctttatggacttgatagaacaggtggagaagcagactagtgttgccgatctgctggcctctttcaacgaccaaagtactagcgattacctggttgtgtacttgcggctactgacctccggctacctgcagcgtgagagcaagttttttgagcatttcatcgaaggtggacgcacagtgaaagagttctgccagcaggaggtagaaccaatgtgcaaggagagcgatcacatccacatcattgcattggcccaggccctttcagtaagcatccaggtcgaatacatggaccggggggagggcggaaccactaacccacacatcttcccagagggctccgaacctaaggtctacctcctttatcggccaggtcattatgacattctgtataagtag

SEQ ID NO: 127513 - DNA, 705 bp, synthetic construct
  misc_feature 1..705: note = Description of Artificial Sequence: Synthetic coding sequence
  source 1..705: mol_type = other DNA
atgtccgaaacgagcttcaatctgatcagcgaaaaatgcgacatcctctctatactgagagatcaccccgaaaatcggatataccgaaggaagattgaagagctgtcaaagaggttcacagcaatcagaaaaaccaaaggcgacggcaactgcttttatcgagccctcgggtactcctacttagagtctcttcttggcaagagtagagagatctttaaattcaaagagagggttttgcaaacccccaacgacttgctcgccgcaggattcgaagagcacaagttcaggaattttttcaatgccttctattccgtggtagaattggtcgagaaagatgggtccgtgtcttccctgctcaaggtcttcaatgatcagtctgcctctgaccatatcgtgcagtttctgcgactgctgacttcggctttcatacggaaccgagctgactttttccgccactttattgatgaagagatggatataaaggacttctgtacccatgaagtggagccaatggcaacagaatgtgatcatatacagataaccgccctaagccaggctctgagtatcgctctccaggtagagtacgtagacgagatggacactgctctgaaccaccacgtgttccccgaagccgccactccatccgtatacctgctgtacaaaacctcgcactacaatatcctgtatgccgcagataaacactag

SEQ ID NO: 127514 - DNA, 222 bp, synthetic construct
  misc_feature 1..222: note = Description of Artificial Sequence: Synthetic coding sequence
  source 1..222: mol_type = other DNA
atgagcgaaacctccttcaatttgatctctgagaagtgtgacatcctaagtatcctgcgcgatcaccctgagaatagaatttatagacgcaagatcgaagaactgtctaagcgcttcacagctatacggaagacaaagggggacgggaactgcttctatcgcgcccttgggtatagctatctggaatccctgcttggaaaatctcgcgaaatctttaagtag

SEQ ID NO: 127515 - DNA, 753 bp, synthetic construct
  misc_feature 1..753: note = Description of Artificial Sequence: Synthetic coding sequence
  source 1..753: mol_type = other DNA
atggccgccttgtcatgtctgctggacagtgtgcgaagggatattaagaaggtggacagagagctgcggcagttgcggtgtatcgatgagtttagcacacggtgtttatgtgatctctacatgcacccctactgttgttgcgacctccacccctatccctactgcctttgctactcgaaaagaagtaggagttgcggactttgcgacctttacccctgctgcctttgcgactataagctgtactgtctaaggccgtccctccgaagtctggaacggaaggcgatcagggcgattgaggatgagaaacgtgagctggcaaagctgcgacgcacaaccaatagaattcttgcaagcagctgctgttcttctaacattctgggctcagtgaacgtatgtgggttcgaaccagatcaggtaaaggtgcgcgtgaaggatgggaaagtctgcgtgtcagctgagagagagaaccgctatgattgcctcgggagtaagaagtactcatacatgaacatctgcaaggaattctccctgccgccgtgtgttgatgaaaaggatgtgacctactcatacggactcggcagctgtgtgaagatcgaaagcccctgttatccgtgcacttctccttgttctccctgctcaccttgctccccctgtaacccatgttctccctgtaacccttgttctccctatgacccttgtaatccttgttatccctgcggttcgagattcagctgtcgcaagatgatcctgtag

SEQ ID NO: 127516 - DNA, 2418 bp, synthetic construct
  misc_feature 1..2418: note = Description of Artificial Sequence: Synthetic coding sequence
  source 1..2418: mol_type = other DNA
atgaaagacaggagcagtactccgcccctgcacgttcacgtggatgagaacaccccagttcacgttcacatcaaaaagctgccaaaacctagtgctacctcttcccagaagtctcataagaggggaatgaagggagataccgtgaacgttcgcaggtcagtgcgagtcaagactaagaatcctccacattgcctagagattacaccaccaagctcagagaagctggtgtctgtgatgagacttagtgacctttcaactgaggacgacgactccggccattgtaaaatgaatcgatatgataagaaaattgacagtctcatgaatgccgttggctgcctgaagtcagaggttaaaatgcagaagggtgagcggcagatggctaaaaggttccttgaggagcgaaaggaagagctggaagaagtggcacacgaactggccgagactgagcacgaaaacaccgtcctcaggcataatatcgaacgcatgaaagaggagaaggatttcaccatactgcagaagaagcatcttcagcaggagaaggaatgcttaatgtccaaactcgttgaggccgagatggatggagccgccgctgcgaaacaggtgatggccctaaaggataccatcggtaagctgaaaactgaaaagcagatgacgtgcaccgacatcaacacgcttacacgccagaaggaactcctcttgcagaagctctcaacgtttgaagaaactaatcgtacactcagagatcttctcagagaacagcactgtaaggaggactctgagcggctgatggagcagcaaggcgcccttttaaagcggctggctgaagccgactctgagaaagccagattactgcttcttttgcaggataaggataaggaggtcgaggaacttctgcaggagattcagtgcgagaaagcacaggcaaagaccgcatctgaactttcgaagtccatggagtccatgcggggccatctccaagcacaacttcggtccaaggaagccgaaaactctcgactctgcatgcaaatcaagaatctggagagaagtggcaatcagcacaaggccgaagtggaggccatcatggagcagctgaaagagcttaagcaaaagggcgatcgggacaaagaatctctaaagaaggcgatcagagcccagaaggaaagagccgagaagagtgaagagtacgccgaacaactgcacgttcaattagctgacaaagatctctacgtcgctgaggcattgtctaccctcgaaagttggagatcgcgctacaaccaggttgtgaaggaaaagggggacctggaactggaaataattgtgctgaatgacagagtgactgaccttgtgaaccagcagcagaccctggaggaaaaaatgcgtgaagatcgggactcactggtcgaacgtctgcatcggcagacagccgagtactctgccttcaaactagaaaacgagaggctgaaggcttcatttgctccaatggaggataagctcaatcaggcgcatctggaagtgcagcagctgaaggcttcggtcaagaattatgagggaatgattgacaattacaagtcccaggttatgaagactagactcgaagctgacgaagtcgccgcacagttagaacgctgcgacaaggagaacaaaattttaaaggatgagatgaacaaagaaatcgaggcagccagacgccagtttcagtctcagctcgctgaccttcagcagcttcctgacatcctgaagattactgaggccaaactggcggagtgtcaagatcagctgcagggatatgaaagaaaaaacattgacctgactgccatcatttcggacctacgcagcagaatcgaacaccagggggataaattagagatggcgcgggagaagcaccaggcgtcgcagaaagagaataagcaactgagtctgaaagtggatgagttagaacgaaaacttgaagccacctcagcacagaatattgagtttctgcaggtcattgcgaagcgcgaagaagctattcaccagtcccaactgcgcctggaggaaaagacacgtgaatgcggcacacttgcgaggcagttggagtcagcaatagaggatgcccgcaggcaggtggagcagactaaagagcatgctctttcaaaggagcgtgccgcgcaaaacaagatactggatctggagactcagttatcacgtacaaagacagaactctcccaactccgcaggtctcgtgatgatgccgataggcgataccagagccgattacaagatctgaaggatcgcctggagcaatctgaatcaaccaaccggtccatgcagaactacgtgcagttcttaaaatcttcttatgcaaatgttttcggcgatggtccttactctacgttcctcacatcatccccgatccggagccggagcccaccagcctag

SEQ ID NO: 127517 - DNA, 2475 bp, synthetic construct
  misc_feature 1..2475: note = Description of Artificial Sequence: Synthetic coding sequence
  source 1..2475: mol_type = other DNA
atgaaggaccgcagttccaccccaccgctccacgtgcatgtggatgagaatacgccggtgcatgtgcacatcaaaaagctgcccaagccttctgcaaccagtagccagaagagccacaaaagagggatgaaaggcgacacagtcaacgtgcgtagaagcgtgcgcgttaaaaccaaagtcccctggatgccccctggtaaaagtagtgcacgacccgttgggtgtaagtgggaaaatccacctcattgcctggagattacccccccaagcagcgagaagcttgtgagcgtcatgaggttgagcgatctatcgacagaggacgatgattcaggccactgcaagatgaatcggtatgacaagaagattgacagtctgatgaacgccgttggttgtctgaagagcgaggtgaagatgcagaagggagagcgccagatggccaagaggtttctggaggagaggaaggaagagctggaggaggttgcacacgagctggcagaaacagaacatgaaaatactgtattacggcacaacatagagcgcatgaaagaggaaaaagacttcaccatcctacagaagaagcacctccagcaagaaaaggaatgtttgatgagcaagctggtggaagctgaaatggatggcgctgctgctgcaaagcaggtgatggctctgaaggataccatcggcaaactgaaaaccgagaagcagatgacatgcacggatattaacacgttaacccggcaaaaagaactgcttctgcaaaaactgtctaccttcgaggaaacaaatcggaccctgcgtgatctgttgagagaacagcattgcaaagaagactctgagcggctgatggagcagcagggcgctctactcaagcggctcgctgaagcggatagcgagaaagcaagactgctactactgctgcaggataaggacaaagaggtggaagagcttttgcaggagatccagtgcgagaaagcgcaggcaaaaaccgcatctgagctatccaagagcatggagagtatgagaggccatctgcaggcccagttgcggagtaaagaggctgagaacagccggctttgcatgcaaatcaagaacttggaacggagcggaaatcagcacaaagccgaggtggaagctattatggagcagctcaaagaactgaagcagaagggagatagagataaagaatctcttaaaaaagcaatccgcgcacagaaagaaagggccgagaaatcggaggaatacgctgagcagcttcacgtgcaacttgcggataaagatctgtacgtcgctgaggctctctcaaccctggagtcgtggcgatcgagatataaccaagtcgtgaaggaaaagggcgacctggagctggagatcatcgtgctcaacgatagggtgaccgaccttgttaatcagcagcagacgctcgaggagaagatgcgagaggatagagactcattggtcgaaagactccatcgccagacagctgaatactctgccttcaagctcgaaaatgagagactgaaagcgtcattcgcccctatggaggacaaactcaatcaagcccacctcgaggtccagcagcttaaggcatctgtaaaaaattatgaggggatgatcgacaattataagtctcaggtaatgaagaccagattggaggcagatgaggtcgctgctcagttagagaggtgcgacaaggaaaataagatattgaaagatgaaatgaataaagagatcgaggccgctcgccgacaattccaatctcagctcgccgacctccagcagttacccgacattctcaaaatcactgaagccaagctggcggagtgccaggatcagctgcaaggatatgagcgcaagaatatcgacctgacagcgatcatctccgaccttaggagcaggatcgagcaccagggtgataaactcgaaatggccagggaaaagcatcaggctagccagaaagagaataagcagctctcgctcaaagtggatgagttagaacggaaactcgaagccactagcgctcagaatatcgagttcttgcaggtaatagccaagcgcgaagaggcaatccatcaaagtcagctgcggctcgaagagaagactcgcgagtgcggaaccctggctagacagctggagagcgccatcgaagatgccagacgacaggtggagcaaaccaaggaacacgcgctaagtaaagagcgtgccgcccagaacaagatcctcgaccttgagacccagctgtcaaggactaagacagagttaagccagctgaggcggtcgcgggatgacgccgacaggcggtatcaaagcaggctgcaggatctgaaagatcgcttggagcagtccgaaagcaccaacagatctatgcagaattacgtccagtttctaaaaagcagctacgccaatgtgttcggtgacgggccttattcgacattcctcacgagtagccctattaggtcgaggagccccccggcctag

SEQ ID NO: 127518 - DNA, 1917 bp, synthetic construct
  misc_feature 1..1917: note = Description of Artificial Sequence: Synthetic coding sequence
  source 1..1917: mol_type = other DNA
atgagcgcctcttcttctggtgggtcacctcgattcccttcatgcggaaagaatggtgttacatctctgactcagaagaaagtactgcgggccccctgtggcgcaccatctgttaccgtcactaaaagtcacaagagggggatgaaaggagatacagtaaacgtaaggcgtagcgtgagagtgaaaaccaagaatcctccacactgtctcgaaattacccccccaagctcagaaaagttagtctcagtcatgcgtctgtccgatctgtctactgaggacgatgatagcgggcattgtaagatgaacagatatgacaagaagatcgacagtttaatgaacgctgtgggatgcctcaagtccgaagtgaaaatgcagaaaggcgagagacagatggcgaaaagatttcttgaggagaggaaagaggagctggaagaagtcgctcatgaattagccgaaaccgagcacgaaaataccgttctgcgccataatatcgaacgaatgaaggaggaaaaggatttcacaatactccagaagaaacacctgcaacaggaaaaagaatgtctcatgagcaaactggtggaagctgagatggatggagccgccgcagccaagcaggttatggcactaaaggataccataggaaaactgaaaacagagaaacaaatgacctgtaccgacatcaataccctcacgcggcaaaaagagctgcttcttcagaaattgtcgacattcgaagaaacaaaccgtactttgagggaccttcttcgtgaacaacattgtaaggaagatagcgagagattgatggagcagcagggtgctcttcttaaaaggcttgctgaggccgattctgagaaagcacgccttctgctgctgttgcaagacaaggacaaagaagtcgaggaactgttgcaagaaattcagtgcgagaaggcccaggcaaagaccgcctccgaactgtccaaatcaatggaatctatgcggggccatctgcaggcccagttacgatcaaaggaagctgagaactcccgtctgtgcatgcaaattaagaatctggaacggtctggtaatcagcacaaggcggaagttgaggccatcatggagcagctgaaagagcttaaacagaaaggcgatcgggacaaggaatcgctgaaaaaagctatcagggcccagaaggaacgcgctgagaagagcgaggaatatgctgagcaacttcacgtccagctcgccgataaggacttgtatgtggccgaggcgctgagcaccctcgaatcttggagaagcagatacaatcaggtcgtcaaggagaaaggtgacctcgagcttgagatcattgtcttaaacgacagggtgaccgatctggtcaatcaacagcaaactttggaggagaagatgcgcgaggatagagactccttagttgagaggctgcacaggcagacggcagaatactccgcgtttaagcttgaaaacgaacgcctgaaggcctctttcgcaccaatggaggacaagttgaaccaagcccatctggaggtgcagcagctgaaagcatctgtcaagaattacgaggggatgattgacaattacaaaagccaggtgatgaaaacgcgactagaagccgatgaggtggccgcccagctagaaagatgtgacaaggagaataaaatcttgaaggacgagatgaataaagaaatcgaagcagctcgccgacagttccagagtcagctggcagacctgcagcagctgcctgacattctcaaaatcactgaagcgaaactggctgagtgtcaggaccagctgcaagggtacgagcggaaaaacatcgacttaacggcgataatctcggacctccgatctcgggtgcgagattggcaaaaaggttctcacgaactgacccgcgcgggggcgaggatcccgcgatag

SEQ ID NO: 127519 - DNA, 2490 bp, synthetic construct
  misc_feature 1..2490: note = Description of Artificial Sequence: Synthetic coding sequence
  source 1..2490: mol_type = other DNA
atgtctgcaagttccagtgggggtagtccccgatttccttcatgcggcaagaatggcgtcactagccttactcagaagaaagtgctgagagccccttgtggtgcgccctcagtgaccgtcaccaagagccataagaggggcatgaagggtgatacagttaatgtccggagatctgtccgcgtcaaaaccaaggtaccctggatgcctcctggtaaatctagcgcacgtccagtgggctgtaagtgggaaaaccccccgcattgccttgaaatcacacctccgagctcagaaaagctcgtttccgtgatgaggctatctgatctgtctaccgaggatgatgactccggccactgtaaaatgaatcgctatgataagaaaatcgattcattaatgaacgccgtcggctgcctcaaaagcgaagtcaaaatgcagaagggcgagcgacagatggccaaaagattcttggaggagagaaaagaggaactggaagaagtcgctcacgagttggccgaaacagaacacgaaaacaccgtgttgcgccacaacatcgagcggatgaaggaggagaaagatttcacaattcttcaaaagaagcacttgcaacaagaaaaggaatgcctaatgagcaagctcgtcgaggctgaaatggacggggccgctgccgccaagcaggttatggctttgaaagacacaatcggaaaactgaaaaccgaaaaacagatgacttgtacagatatcaatacgctcaccaggcagaaagaacttttgctgcagaaattgtctacattcgaggagactaatcggacattgcgtgacctgctcagagagcagcactgcaaggaggactcagaacgactcatggagcagcagggtgccctactgaagcggctcgccgaagcagactccgaaaaagcgagactcctcctcctgctgcaggacaaggacaaagaggtcgaagagttgctgcaggagatccagtgcgagaaggcccaggcgaagaccgccagtgagctttctaagtctatggagagtatgcgaggtcacctgcaggcacagctgcgctcaaaggaggctgagaatagccggctgtgcatgcagattaaaaatcttgagcgcagcggcaatcagcacaaggcagaggtggaagctattatggagcagcttaaggaactgaaacaaaagggcgacagagataaagagtcactgaaaaaggctatccgcgcacagaaagagagggccgaaaaaagcgaagagtatgccgagcagttacacgtgcagttggctgacaaagacctatacgttgcggaagccctctcaacgctggaatcttggcgcagtagatataaccaggtcgtaaaggaaaaaggcgacctggagctggagattattgtcctgaacgatcgtgtcacagacttggtaaaccaacagcagacacttgaagagaaaatgcgtgaagaccgcgattcccttgtagagagactccacagacaaacagctgaatactccgcgttcaaactcgagaatgagcgcctcaaagcaagtttcgcccctatggaggataagctaaatcaggcgcacctagaagtacagcagcttaaggcaagtgtgaagaactatgagggaatgatcgacaattacaaatctcaagtgatgaaaacacgtttggaggctgatgaagtcgcggcgcagctggagcgctgcgataaggagaataagattctcaaagatgaaatgaataaggagatcgaagcagcccgacgccagttccagagccagctggcggatcttcaacagctcccagatatcctgaagataacagaggcaaagctcgcagagtgccaggatcagttacagggatatgagcgtaaaaacattgatttgacggccataatttctgatcttcgctccagaatcgaacaccagggggacaagctcgaaatggcgcgggagaagcaccaggcttctcagaaagaaaacaagcagctgtctctcaaggtggatgagcttgagcgcaaacttgaagccactagcgcacagaatattgagtttttgcaagtgatcgctaagagggaagaggctatccaccagtcacagctgcggcttgaggagaagacccgtgaatgtgggaccttggcaaggcagctggagtctgctatcgaagatgccagaaggcaagtggaacaaaccaaggaacatgctttaagtaaggagcgggcagcacagaacaagatcctggatctcgagacccagttatctcggactaagaccgaactgtctcagctgcgcaggagccgcgatgacgctgacaggaggtaccagtcccggctccaggatctgaaggaccggctcgagcagagcgaatcaaccaaccggagcatgcaaaattacgtccagtttctgaagagctcttacgctaatgtgttcggcgacggtccttattctaccttcctgacctctagcccaattcggtcacgatcccctccagcttag

SEQ ID NO: 127520 - DNA, 2106 bp, synthetic construct
  misc_feature 1..2106: note = Description of Artificial Sequence: Synthetic coding sequence
  source 1..2106: mol_type = other DNA
atgggagagctgcccacgggctgtaggaagcgtcgaaggaagaggggaggtgcggcagccagagccagattgcatccacctcggaggctccacggcacaactcttgcctccgattttaacgacttcatacgcaggaggttctgggcacaaccttgccgctcatggttcccttcctgcgggaaaaatggtgttacctctctcacccagaagaaggtgctgagggccccctgtggagcccccagcgtcactgtcaccaaatctcataaacgtggtatgaagggagacacagttaacgttagaagaagtgtgagggttaagactaaggtgccttggatgcctcccggcaagtcttctgcccggccagttgggtgcaagtgggaaaaccctcctcattgcctggagatcactccaccctccagtgaaaagttggtgtcggtcatgcggttgagcgatctgagtacagaggacgatgattcggggcattgtaaaatgaataggtacgataagaagattgactcccttatgaacgccgtaggatgtctgaagtccgaggttaaaatgcagaagggcgagagacaaatggccaagaggtttctggaggagcgtaaagaagagcttgaggaagtcgcccatgagctcgctgaaacagagcatgagaacaccgtgttgcgccataacattgagagaatgaaggaagagaaggactttaccatccttcagaagaagcatcttcagcaggaaaaggaatgtctgatgtcaaagcttgtggaagccgagatggacggcgccgctgccgccaaacaggttatggctctcaaggacacaatcggcaaactcaagaccgaaaagcagatgacttgcacggacataaacactctgacgcgacagaaagagcttttgctgcaaaaactgagtacctttgaagagactaatcgaacactccgcgatttgctgagggagcagcactgtaaggaagattccgagcgcctaatggaacaacagggagcccttcttaagcggttggctgaggcagacagtgagaaagcacgcctactgctgctgctgcaggacaaggacaaggaggtcgaggaactactccaagagattcagtgtgagaaggcccaggccaagacggcttctgaactgtccaaaagcatggagtctatgcggggacaccttcaggcacagttacgaagtaaagaggctgaaaatagcaggctttgcatgcaaatcaaaaacctggagcggagcggaaatcagcacaaggccgaggtggaagccattatggagcaattgaaagaactgaagcagaaaggcgatagggacaaagaatcccttaagaaagctatccgtgcccaaaaggagagagcagagaagtccgaagagtatgctgagcaactacatgtgcagctcgcagataaggacttgtatgtggctgaagcgctatccaccctggagtcttggcgcagccgctacaatcaggtggtgaaggagaagggtgacctggaattggagattatcgtactaaatgatagagtgacagacctggtcaatcagcagcaaactctggaagagaagatgcgggaagatagagacagccttgtggagaggctgcacaggcaaactgccgagtacagcgcttttaagttggagaacgagagactcaaggcgtcattcgcccctatggaggacaaactgaaccaagcacatctcgaagtacaacagctcaaggctagcgtgaaaaattacgagggaatgatagataattacaaaagtcaggtcatgaaaactcgattggaggcggatgaggttgccgcccaactggaaagatgcgacaaagagaataagattctgaaggacgagatgaataaagaaatcgaagccgcccgccggcagttccaaagccagctagctgatctccaacagttaccagatatcttaaaaattacagaagctaaacttgcagaatgccaggatcaattgcagggctacgaacgcaaaaatatcgacctcactgctattatttctgatcttcggtcccgagtgagggattggcagaagggatcccatgagctgacaagggccggtgctagaattcctcgctag

SEQ ID NO: 127521 - DNA, 1974 bp, synthetic construct
  misc_feature 1..1974: note = Description of Artificial Sequence: Synthetic coding sequence
  source 1..1974: mol_type = other DNA
atggctgatcaacagggtccacaccaaaaccggtttcctagctgcggcaagaacggtgtcacgagcctgactcagaaaaaggttttaagagcaccttgtggagcacccagcgtcactgtgactaaatcacacaagcgcggaatgaaaggagacaccgtcaacgtgcggagatctgttagggtgaagacaaaggttccctggatgcctcccggtaaatctagcgcccgccccgtgggatgtaagtgggaaaacccgcctcactgcctggagatcacccctccgtcaagcgaaaagctcgtcagcgttatgaggttgagtgatctctctacagaggatgatgactcggggcactgtaaaatgaatcggtacgataaaaaaatagacagccttatgaacgccgtggggtgtctgaaatctgaggtcaaaatgcagaagggagagcggcaaatggcaaagaggtttctggaggaaaggaaagaggagttagaggaagtggcccacgagctggctgaaactgaacacgaaaacaccgtgctccggcacaacatcgagagaatgaaggaggagaaagatttcacaatcctgcagaaaaaacatctgcagcaggagaaggagtgtctgatgagcaagctggtcgaggcagagatggacggcgctgcggcagcgaagcaagttatggccctcaaggacacaatcggcaagcttaagacagagaagcagatgacctgtaccgatatcaacacactgacacgacagaaagagttgctgcttcaaaaactcagtacattcgaagagacgaacagaactctgcgagacctgctgcgggagcagcattgtaaggaagattctgaacgcttaatggagcagcagggagccttgctgaagcgccttgctgaggctgactcagagaaggctcgcctcctcttgcttctccaggacaaagacaaagaagtcgaggagcttctacaggaaattcagtgcgaaaaagctcaggctaaaacagcatccgagctgagcaaaagcatggagtctatgcgcggacacctgcaagctcagctccgctccaaagaagcagagaacagcagattgtgcatgcaaatcaaaaatctcgagcggtctggaaaccagcataaagcagaagtggaggccatcatggagcagctgaaggaactcaaacagaaaggcgaccgcgacaaggagtctcttaaaaaagccattcgcgcccagaaagaacgggctgaaaagtcagaagaatacgctgaacagcttcacgtgcagctcgccgataaagatttgtatgtggccgaggctctgtctacccttgagagctggagaagcaggtacaatcaagtggttaaggagaagggggacttagagctggagataatcgttctcaacgaccgcgtaactgacctggtaaatcagcagcagaccctagaggaaaagatgcgggaggatagggactccctggtcgagagactccaccgccagacagccgagtattctgcattcaaactggagaacgagcggttgaaagcgagcttcgcgcctatggaggacaagttgaaccaggcccacttagaggttcaacagctcaaagctagtgtgaaaaattacgagggcatgattgataactacaaatcccaggttatgaagacccgactagaggccgacgaggtggcagcccagctggagaggtgtgacaaggaaaacaagattttgaaagacgaaatgaacaaggagatcgaagccgcccgccgccagttccagtcacagctggctgatctgcagcagcttcccgacattctcaaaataaccgaggctaaactcgcggagtgccaggatcagttgcaaggttacgaacgcaagaatatcgatctgaccgcgataatctccgacttacgttcccgggtacgcgattggcagaaggggagccacgagctgaccagagccggggctcgcatccctcgctag

SEQ ID NO: 127522 - DNA, 570 bp, synthetic construct
  misc_feature 1..570: note = Description of Artificial Sequence: Synthetic coding sequence
  source 1..570: mol_type = other DNA
atgaaagaccggagctcaaccccgccattgcatgtccacgtagacgagaataccccagtccacgtgcatataaaaaagctgcccaaaccatcagcaacaagctcacagaagtctcacaagcgcggtatgaagggcgataccgtgaacgttaggcgtagcgtgcgggtcaaaactaaggttaaaatgcagaagggagagcgacagatggccaagcgctttctcgaggagcgaaaagaggaacttgaggaggtagctcacgagctggccgaaaccgagcacgaaaatacggttctccgccataatatagaaaggatgaaggaagagaaagacttcaccatcctgcaaaagaagcacctccagcaggagaaagagtgtctaatgtccaagctggtagaagcggaaatggacggggccgctgccgcaaagcaggttatggccctgaaagacactatcggaaagctcaaaacggagaaacagatgacttgcactgacataaacactcttaccagacagaaggagttgctgctgcagaagctgtcaactttcgaggagacaaacaggacactttag

SEQ ID NO: 127523 - DNA, 618 bp, synthetic construct
  misc_feature 1..618: note = Description of Artificial Sequence: Synthetic coding sequence
  source 1..618: mol_type = other DNA
atgtcagcctcctccagtggcgggtccccgcggtttccctcctgtggcaaaaacggagtgacctctctgacgcagaagaaggtgctcagagctccctgcggggcaccctctgtgacagtaacaaagagtcacaaacgcgggatgaagggggacaccgtgaacgtcaggcgaagtgtccgcgtaaagaccaaggtgaagatgcagaagggagaaagacagatggccaagcggttcctggaagaacggaaagaggagctcgaggaggtggcacacgaactggctgagacagaacacgaaaatactgtgctccgccacaacatagagagaatgaaggaggaaaaggacttcacaatcctgcagaaaaagcaccttcagcaagagaaagagtgcctgatgtcaaagctggtggaagctgagatggacggtgccgcggccgccaagcaagtgatggccctgaaagatacaatcggcaaactgaaaaccgaaaagcagatgacctgcactgacattaacacactcactcgccagaaggagctcctgctacagaagctttcaacctttgaggagacaaacaggacactgagggacctgttaagagagcagcactgcaaagaatag

SEQ ID NO: 127524 - DNA, 543 bp, synthetic construct
  misc_feature 1..543: note = Description of Artificial Sequence: Synthetic coding sequence
  source 1..543: mol_type = other DNA
atgtccgcaagttcttccggcggctcccctagattcccttcttgcggaaaaaacggagttacgagcctgacacagaagaaagtactcagggcgccatgtggcgctccctccgtcaccgtgaccaagtcccataagagaggaatgaaaggtgatacagtgaacgtacggcggagcgtaagagtgaagacaaaggtcccatggatgccccccggaaaaagctctgcacgaccagtgggctgtaaatgggaaaatccaccgcattgccttgaaatcactccgccatcaagtgaaaaactggttagcgtgatgcgactgtccgatctctcaactgaggatgatgattctggccattgcaagatgaatagatacgataagaagattgactccctgatgaacgccgtgggctgtcttaagagcgaagtgaagatgcagaaaggggaaagacagatggctaagcgcttcctggaggagagaaaagaagagctcgaggaggtcgctcatgagcttgcggaaaccgaacatgaaaacaccgttctgcgctag

SEQ ID NO: 127525 - DNA, 648 bp, synthetic construct
  misc_feature 1..648: note = Description of Artificial Sequence: Synthetic coding sequence
  source 1..648: mol_type = other DNA
atgaaagatcgtagtagcacccctccgctgcacgtccacgtagatgaaaatacaccagtgcatgtccacattaaaaagctgcccaagcctagcgcaactagcagtcagaagtcccataaaagaggtatgaaaggggacacagttaacgttcggcgtagtgtacgagtgaagacgaaaaaccccccacattgccttgaaatcactcctccctcttccgaaaagctcgtgagcgtaatgcgattaagcgacctgagcaccgaggacgatgactctggacactgcaagatgaaccggtatgataaaaaaattgactccctgatgaatgccgtggggtgtttaaagagcgaggtgaagatgcagaagggggaaagacagatggccaaaaggtttctggaagagcgcaaagaagagctggaggaagtagcccatgaactggccgaaaccgaacatgagaacacagtgctaaggcataatattgagcggatgaaagaggagaaggacttcactattctgcaaaaaaaacacttacagcaggagaaggaatgcctgatgtccaagctggtggaagctgagatggacggtgccgccgctgctaagcaggtgatggcacttaaggatactatcggaaagctgaagaccgtggggtag

SEQ ID NO: 127526 - DNA, 471 bp, synthetic construct
  misc_feature 1..471: note = Description of Artificial Sequence: Synthetic coding sequence
  source 1..471: mol_type = other DNA
atgtctgcctcatcctctggcggcagcccgcggttcccttcgtgcggcaagaacggagtgacatctttaacgcagaagaaggtgctaagggccccctgcggagccccatctgtgacagtcacaaagtctcacaagcggggaatgaagggtgataccgtcaacgtgcgccggagcgtacgcgtcaagaccaagaatcccccacactgtctggagataacgccaccctccagcgagaaactggtgagcgtgatgagactgagtgacctctcgacggaagatgacgatagtggccattgtaagatgaatcgatatgataaaaaaatcgactctttgatgaacgctgtgggttgtctgaagtcagaggttaagatgcagaagggggaaaggcagatggccaaacgctttctcgaagaaagaaaagaagaacttgaagaagtggcccacgagctagctgaaaccgaacatgagtag

SEQ ID NO: 127527 - DNA, 1731 bp, synthetic construct
  misc_feature 1..1731: note = Description of Artificial Sequence: Synthetic coding sequence
  source 1..1731: mol_type = other DNA
atgaaagatcggtcttccacaccacccttgcatgttcacgtcgacgagaatactccggttcatgttcacatcaagaagctgcctaaaccttccgcgactagctctcaaaaatctcacaaacggggcatgaagggagacacagtgaacgtccggaggagtgtgagagtgaagactaaggtgaagatgcagaagggagaacgccagatggcaaaacgatttttagaagagcgcaaagaggagctggaagaggtagcccacgagctagcagagacagagcatgagaatactgtcttacggcataacatcgagcggatgaaagaagagaaggacttcaccatcttgcagaaaaagcacctgcagcaggaaaaggagtgtctgatgtcgaagctagtcgaagctgagatggacggagcagctgccgctaagcaagttatggcactgaaagatacaatcgggaagttgaagaccgaaaagcagatgacctgtaccgatatcaatactttgacccgccagaaggagctgctactgcagaaactttcgacatttgaagaaacaaatagaactctgcgggatcttcttcgagaacagcattgtaaggaggactcagagcgtctcatggagcagcagggtgcgctgcttaaacgcctcgcggaagcggacagtgagaaggccaggttgctattacttcttcaggataaggacaaggaagtggaggagctgttacaggaaatacaatgtgagaaggctcaggccaaaacagcttcagagctctcaaaatccatggagtcaatgcggggtcatctgcaggcacagctcagaagcaaggaggcagagaatagtagattatgtatgcagataaagaacttggaacggtcagggaatcagcacaaagccgaagtggaagcgattatggagcagttgaaagaactcaagcaaaagggcgaccgtgacaaagaatctcttaaaaaagccataagggctcagaaggaacgagccgagaagtccgaagaatacgccgaacaactgcacgtgcaactggcagataaggacctgtatgtggctgaagctctgtccaccttagaaagctggcggagccggtacaaccaggtagtgaaggagaaaggggatctagaactcgagattatcgtgcttaacgacagggtgacagacctggtgaatcaacaacagacattggaggagaagatgcgagaggacagagatagccttgtcgagcgcttgcacaggcagaccgctgagtattctgctttcaagcttgagaacgagaggcttaaggcttccttcgcccctatggaggataagctcaaccaagcgcatctcgaggttcagcaactgaaggccagcgtgaagaattatgaggggatgattgataattataaatctcaggtaatgaagacccgtctggaagctgatgaggtggcagcccagctggagaggtgtgataaggagaataaaattctgaaggacgaaatgaacaaggaaatcgaggccgcaaggaggcagttccagagtcaattggccgacctccaacagctgcccgacattcttaagatcacagaggccaagcttgccgaatgccaggatcagctgcaagggtatgagcggaagaacatcgatctaaccgccattatctctgatctaaggagtcgcgtgagagactggcagaaaggctctcacgagctgactcgggccggcgcccggatcccacggtag

SEQ ID NO: 127528 - DNA, 444 bp, synthetic construct
  misc_feature 1..444: note = Description of Artificial Sequence: Synthetic coding sequence
  source 1..444: mol_type = other DNA
atgaaggacagaagttccacaccccctttgcatgtgcatgttgatgaaaatactcccgtgcacgtacatataaagaagttgccaaagccttctgctacaagttcacagaagagtcacaagcgggggatgaagggagataccgttaacgtccgcaggagtgtgcgcgtcaagacgaaagtcccatggatgcccccaggcaaatccagcgcacggccagtgggctgcaaatgggaaacttctgaagagactcctaccacaggggagggcgtccctcatgtgcaggcgggcggtggcggcaacggctgggggtgtgggtgtcaagctgggcatggtttggagggatatcaccgggaggccgaaaacagagagacaaacgatttacacggccatcagcacccagacaaagccgagggcacttcccccgccgaggccgaacatatttag

SEQ ID NO: 127529 - DNA, 1917 bp, synthetic construct
  misc_feature 1..1917: note = Description of Artificial Sequence: Synthetic coding sequence
  source 1..1917: mol_type = other DNA
atgggcaggaatagatatccccccgcctgctggtttccctcatgtggcaaaaatggggtgacgtctctgacacaaaaaaaagtgctccgggccccttgcggcgccccgtcagtcaccgttacaaagtcccataagaggggcatgaagggggacaccgtgaacgtccgcaggtccgtgcgcgtgaaaactaagaaccctcctcactgcctggaaataaccccgcctagttccgagaagctagtgtctgtcatgcggctgagcgatctgagcacagaggatgacgactcaggtcactgtaaaatgaacagatacgacaagaagatagacagcctgatgaacgcagtagggtgcttgaagagcgaggtgaaaatgcaaaaaggggagcggcagatggctaagagattcctggaagagcgaaaagaagagttggaggaggtcgctcacgagcttgctgagacggaacacgagaacaccgtgctacgccacaacatagaaaggatgaaggaggagaaagattttaccatcctccaaaagaagcatttgcagcaggagaaagagtgcctgatgtccaaattagtggaggctgaaatggatggcgcggccgctgccaagcaggtgatggccctcaaggataccatcggcaaactgaagacagaaaagcagatgacttgtaccgacatcaacacgttgacaaggcagaaagagctactcttgcaaaaattatcaacattcgaggaaactaatcggacccttcgcgacctcctgcgcgaacagcactgcaaggaggattctgaacggctgatggagcagcagggggcccttctgaaaaggttggccgaagcagatagcgaaaaggcccggctgctcctactgctgcaggacaaagacaaggaagttgaagaactacttcaagaaatacagtgtgagaaagcacaggctaagaccgcatccgagctgtctaagtcaatggagtcaatgcggggtcacctccaagcacaacttaggagcaaggaggccgagaactcaaggctgtgtatgcagatcaagaaccttgaaaggtcaggcaatcagcacaaagcagaagtggaggcgattatggagcagctcaaagaactgaaacagaagggagacagggataaggagtccctcaaaaaagctatacgggcccaaaaagaaagggccgagaaatcagaggaatatgctgagcagttacatgtgcagctggccgataaagatctgtacgtagctgaggcactgagcactttggagagctggaggtctcgatataaccaggttgtcaaagaaaagggcgatctggagttggaaataattgtattaaatgaccgcgtgactgatctcgtcaatcagcagcagacactggaagagaagatgcgggaggatcgggacagtctggtagagcgtctgcatagacagacagccgagtactccgccttcaagctggaaaatgagaggctcaaagcctcttttgccccgatggaggacaaactcaatcaagcccacctcgaagtccagcagctgaaagcctccgtcaagaattatgaggggatgattgataactacaaatcccaggtgatgaaaacgcgtctcgaagcagacgaagttgcggcccaactggaacgatgcgacaaagagaacaaaatactgaaggatgaaatgaacaaagaaatcgaggccgcacggagacagttccagtcccagctggctgatctgcagcagctcccagacatactcaaaattacagaagctaagttggctgaatgccaagaccaattgcagggctacgaacggaaaaatatagacctgacagctatcatcagcgatctgagatcccgggtgagagactggcagaaaggcagccacgagctaactagagccggggcacgtatcccccggtag

SEQ ID NO: 127530 - DNA, 765 bp, synthetic construct
  misc_feature 1..765: note = Description of Artificial Sequence: Synthetic coding sequence
  source 1..765: mol_type = other DNA
atgacggaagaggtctggatgggaacatggaggcctcaccgcccaaggggacctatcatggctttgtacagcagccctggtcccaagtacctgatcccccctacgaccggctttatgaagcacacacctaccaagcttagggcccccgcttactcattccggggtgcaccaatgctcctggccgagaactgtagtccagggccaagatataacgtcaatcctaagatccttcggactggtaaggacctcgggcccgcgtatagtatcctgggtcggtaccagacgaaaacaatgctgacccccggtccaggggattatttccccgagaagtcaaccaagtatgtgttcgatagcgcaccatctcatagtatttccgctcggacaaaagcgttccgggttgatagcacaccaggacctgctgcctacatgctgcccatggtgatggggcctaacacagtaggtaaggctagccagccttccttctcgataaagggccggtcaaagctggggggattctcagatgacctccacaaaacacccggcccggcagcctacagacagaccgatgtgcgcgtcacgaaattcaaggccccccagtatactatggcagctcgggtggagccgcccggggacaagacgctgaaaccagggccaggggcccattcccctgagaaagtaacgttgacaaagccctgcgctcctgtggtcacctttggcattaagcatagcgactatatgacgccgcttctagtggatgttgagtag

SEQ ID NO: 127531 - DNA, 417 bp, synthetic construct
  misc_feature 1..417: note = Description of Artificial Sequence: Synthetic coding sequence
  source 1..417: mol_type = other DNA
atgactgaagaagtctggatgggcacctggcggccacaccgtccccggggcccaatcatggcactctatagcagccctgggccaaagtatctgatcccccctacaacagggtttatgaagcacactcctactaagcttagagctcctgcatactcttttcggggagctcccatgctgctggccgaaaattgctcccccgggcctcggtacaacgtcaatccgaagatcctgaggacaggcaaagatctgggccccgcctattccatcctaggtcgataccagacaaaaaccatgctgacccccggcccggctctaaagtctgcatttcctagctggacaccaccagaccctacatggtctcctcccgttctcgagccccgaggcccaacacccagaatgctgggctcccctccctag

SEQ ID NO: 127532 - DNA, 375 bp, synthetic construct
  misc_feature 1..375: note = Description of Artificial Sequence: Synthetic coding sequence
  source 1..375: mol_type = other DNA
atgacagaggaagtttggatgggcacatggcgcccgcaccgccccaggggccctattatggccctatactcgtcacccggtcccaagtacctgatcccacctactactggtttcatgaaacatactcccaccaagcttagagccccagcgtactcattcaggggcgccccaatgctgttggccgagaattgctcccccccgaacactgtgggcaaggcaagccagccctccttctccatcaaaggccgcagcaagctgggaggattctccgatgacctacacaaggtcactctcacaaagccttgtgccccagtcgtgacatttggcatcaaacacagcgactacatgactccgctgcttgtagatgtggagtag

SEQ ID NO: 127533 - DNA, 774 bp, synthetic construct
  misc_feature 1..774: note = Description of Artificial Sequence: Synthetic coding sequence
  source 1..774: mol_type = other DNA
atggacgcggaatattccggcaatgaatttcccaggagcgagggggagcgagatcaacaccagcgccctggaaaagaacgaaagtctggagaagccggatggggtacaggcgagcttggtcaggacggtcgcttattatcaagcaccctgtcgctgagttctaatcggtcactcggccagcgtcaaaattcacctctgccgtttcagtggcgcattacccactcttttcggtggatggctcaggtgcttgctagcgaactttctctggtcgccttcattctcctgctggtggttgcgtttagcaagaaatggttggatctctcccggtcgctgttctaccagcgctggcctgtcgatgtttccaaccgcattcacacctcagctcatgttatgtctatggggctcttacatttctacaaatctcgctcctgcagtgatctcgagaacggcaaagtaacttttatcttttccacgttgatgctgttccccattaacatctggatcttcgaactggagcgcaacgtgtctatccctataggatggagctattttattggctggttagtcctcattctctatttcacctgcgctatcctgtgctattttaaccacaaaagcttttggagtctgattctctcccatccttccggagccgttagctgtagttcctcttttggcagcgttgaggagtctccacgcgcgcaaacgattaccgataccccaatcacccaggagggcgtgctggacccagaacagaaggacacgcacgtgtag

SEQ ID NO: 127534 - DNA, 1488 bp, synthetic construct
  misc_feature 1..1488: note = Description of Artificial Sequence: Synthetic coding sequence
  source 1..1488: mol_type = other DNA
atggtcacatggttgtaccgctttctgcctacatccaatatggccgcaaagctcaggtctttgttgcctcctgatctccggctgcagttctggctgcacgcaaggttgcaaaagtgtttcctgtcgcgcggttgcggttcttattgtgcaggtgctaaagccagtccacttcctggaaagatggccatggggctgatgtgtgggagacgggaactgctccgtttacttcagtcaggacgccgggtacattccgtggctggtccttcccagtggcttggaaagcctctaacaactagactcctgtttcccgcggcaccgtgctgttgtcggccacattacctctttttggctgcgtcagggcctcggtccctgtccactagcgccataagttttgccgaggtacaggtccaggcgccccccgtggttgctgcgactcccagtccaacggctgtcccggaagtcgcctctggggagacagccgatgttgtgcagaccgcagctgagcagagcttcgcggaactggggctgggcagttacaccccagtgggccttattcagaatcttctggagtttatgcacgtggacctgggactcccatggtggggggcgatcgcagcctgcacagtttttgcccgttgccttatcttccccctgatcgttactggccagcgagaggcggccaggatccacaatcaccttcctgagattcaaaaattcagcagcaggatccgggaagcaaagttggccggagaccacatcgagtactataaagcctcctcagagatggccctataccagaagaagcatggtatcaaactgtacaagccattgatactgccagtgactcaggcccctattttcatcagctttttcatagccctcagggagatggccaacctgcctgtaccatccctgcagacaggcggattgtggtggttccaggacctcacagtcagcgatccaatttacattttaccactcgccgtcactgctaccatgtgggcagtccttgaactgggcgctgaaaccggcgtgcagagcagtgatttgcagtggatgcggaatgtgatccgaatgatgcccctcattaccctcccaattaccatgcacttccctacagcagtgtttatgtactggcttagctccaacctgtttagcctggtccaggtcagctgtctgaggatacccgccgtgcggactgtgttgaagattccccagcgggtggttcacgacttggataaattaccacctagagagggctttctggaaagcttcaagaagggatggaaaaatgctgagatgacccggcagttacgcgagcgagagcagagaatgagaaatcagctggagctggccgcaaggggtcctctccgccagacatttacacacaacccgctgctccagccaggtaaggacaatcctccaaacatcccatcctcatcaagcaaacctaagagtaaatacccttggcacgatactctcgggtag

SEQ ID NO: 127535 - DNA, 1260 bp, synthetic construct
  misc_feature 1..1260: note = Description of Artificial Sequence: Synthetic coding sequence
  source 1..1260: mol_type = other DNA
atgcggggcacgcaagtgcattccgtggccggcccctctcaatggctcggcaaacccctgaccacccggctcttgtttcctgctgctccctgttgttgccgaccgcactatctattcttggctgcctccggaccaagatcgctttccaccagtgccatcagctttgctgaggtccaagtccaggcgcccccagtggttgcagccacgccatctcccactgctgtaccagaggttgcttccggggagaccgcagacgtagtacaaaccgctgccgagcaaagcttcgccgaactggggctaggaagttatacacccgttggcctgatacagaatctattggaatttatgcacgtggatctggggcttccatggtggggtgcaatagccgcctgtacagtcttcgcgaggtgcctgatctttcctctgatcgtcacaggccagagggaggcagctagaattcacaaccatcttcctgaaatccagaagttttcctcccgaattcgcgaggctaagctggcgggcgatcacatagagtactacaaggccagttcagaaatggcactgtatcaaaagaaacacggcatcaaactgtacaagcctctgattctgccggtcactcaggcccccattttcatctcatttttcattgccctgcgagagatggccaacttacccgttcccagcttgcagaccgggggtctgtggtggtttcaggatctgactgtgtcagatccgatctatattttgccgttggccgtcacagccaccatgtgggcagtgttggagctgggagctgaaaccggcgttcagtccagcgatctgcagtggatgagaaacgttatccgcatgatgcctttgattactctgcctattactatgcactttcccacggccgtgtttatgtactggctctcctccaatctctttagcctcgtccaggtatcctgtttaaggattcccgcagtaagaaccgtgctcaagatcccccagcgagtggtgcacgatctcgacaagctccctcctcgtgagggctttcttgagagctttaagaaggggtggaagaacgcggagatgacaagacagttaagagagagagagcagcgcatgaggaaccagttagaactggcagcccggggccccctgcgccaaacctttacccacaatcccttgctgcagcccgggaaggataatcctcctaacatacctagcagttcctctaagcccaagtctaaatatccctggcacgacactctcggatag

SEQ ID NO: 127536 - DNA, 732 bp, synthetic construct
  misc_feature 1..732: note = Description of Artificial Sequence: Synthetic coding sequence
  source 1..732: mol_type = other DNA
atgagtcggctgtggtacggcaagaagggaaggagacaccaacctataaaccataaatataccctggttgtgagtgtcgctgaatatcaccggaggatcgatgcgctaaatactgaagagctcagaaccttatgcagaaggctgcagataacaaccagagaggacatcaatagcaagcaggtggccactgtcaaggcggatctggagtccgaatcattccgaccaaatctgtcagatccctccgagctgctgctgcctgaccaaatcgagaagctcactaagcatctgccccccagaacaattggctacccctggacactcgtgtacgggacaggcaaacacggaacttctctgaaaacactgtacagaacgatgactggacttgatactcccgtgctcatggtgatcaaggattctgacggacaggtctttggtgcattagcttcagagccgctcaaagtgtctgacggattctacgggactggagagaccttcgtgtttaccttttgtcctgaattcgaggtttttaagtggaccggtgataacatgttcttcattaagggagacatggattccctggcgtttggcgggggaggtggcgaatttgctctttggttagacggagacctgtatcatggaaggtcccattcttgtaaaacttttggtaacagaacactctccaagaaggaggatttctttatccaggacatcgagatttgggcatttgaatag

SEQ ID NO: 127537 - DNA, 2520 bp, synthetic construct
  misc_feature 1..2520: note = Description of Artificial Sequence: Synthetic coding sequence
  source 1..2520: mol_type = other DNA
atggactatcttaccacctttaccgagaaaagtgggcggctcttgcgcggtactgccaaccgcctattgggttttggcggcggaggcgaagcacggcaggttaggtttgaggattatctaagggagccagctcaaggggacctgggctgtggatctcccccgcacagacctcccgctccatcttctcccgaaggtcccgacactggccagaaaaagaccctcgacaaaaaagacggtcgtaggatgtcttttcaaaaacccaagggtaccatcgaatatactgtggagagcagagacagccttaacagcatcgccctcaagttcgacactaccccaaacgagcttgtgcagttgaacaagctcttctcgagggccgtagtcacaggacaagtcctctatgtaccagatcctgagtatgtgtcaagcgtcgaatcgtccccatcactctcccccgtctccccactgtcccctacatcttctgaagcagagtttgacaaaactactaatcccgacgtccatcctaccgaagcaacaccgtcctctacttttacgggcattaggcctgcccgagtggtgagcagtacatctgaggaggaggaggcattcactgagaaatttttaaaaatcaactgcaagtacataacctcaggcaaaggtaccgtttcgggagtgcttctcgtcacccctaacaacattatgttcgaccctcacaagaatgatccactggtgcaggagaacgggtgcgaagaatatggcatcatgtgtcctatggaagaggtaatgtccgctgccatgtacaaagaaattcttgacagcaagatcaaggaatctctgcccatcgacattgatcagctgtccggtagggacttttgtcattcgaagaagatgaccggatcgaacaccgaagagatcgacagccggatcagagacgctgggaatgattctgccagtaccgctcctcgcagcaccgaagagtcgctcagtgaggacgtcttcactgaatccgaacttagtcccatcagagaggagctggtgtccagcgatgagcttcgacaagacaagtcttccggcgcttcttccgagagtgtgcagacggttaaccaagctgaagtcgaaagcctgacagtaaagtctgagtccactggcactcccggccacctgcgtagcgataccgaacactctaccaacgaggtgggtaccctctgtcacaaaactgatcttaataatcttgaaatggccattaaggaagatcagattgccgacaactttcaaggaatctcaggacctaaggaagattccacctctataaaggggaactccgaccaggattcctttctgcacgaaaatagtctgcaccaggaagaatcacagaaagaaaatatgccgtgcggtgagaccgcggagtttaagcagaaacagtccgtcaacaaggggaaacaaggaaaggagcagaatcaggactcccagaccgaggccgaggaactgagaaagctgtggaaaactcatacaatgcagcagactaaacagcaacgggagaacatccagcaggtgtcacaaaaggaggccaaacacaaaattacatccgcagacggtcatattgagtcatcggcactcctcaaggagaagcagcgacacagactccacaagttcctctgtctgcgggtagggaaaccaatgagaaaaacatttgtgtctcaggcatcagcaacgatgcaacagtacgcacagcgcgataaaaagcatgaatactggtttgccgttcctcaggaacgcactgaccacctgtacgcctttttcatccagtggtctccagagatctacgccgaagacaccggggagtacacgcgcgagcctggatttattgttgtgaagaaaattgaggaatctgagaccatcgaggatagtagtaatcaggcagcagcacgggagtgggaaataaccacacgggaggacattaatagcaaacaggtggccaccgtgaaggccgacttggagagcgaatccttccgccccaatctgtctgatccaagcgagctgttgctgcccgatcagattgagaaattgaccaaacacctgccacctcggactattggatatccttggacacttgtatatgggaccggaaagcacggcacgtccctgaagaccctgtatcgcactatgactgggctcgatactcctgtgctgatggttatcaaggactcagatggccaggtttttggtgccctggcctctgagcctctgaaggtctccgatggcttctacggaaccggggaaacatttgtcttcacattttgtcccgaatttgaagtgtttaaatggacaggggataacatgtttttcattaagggagatatggactctctggctttcggcggcgggggtggagagtttgcattgtggcttgatggagatctctaccatggcaggagccacagctgcaaaacattcggaaatcgcactctctccaagaaggaggactttttcattcaggacatagaaatctgggcattcgagtag

SEQ ID NO: 127538 - DNA, 2625 bp, synthetic construct
  misc_feature 1..2625: note = Description of Artificial Sequence: Synthetic coding sequence
  source 1..2625: mol_type = other DNA
atgacaaaagataaaaattctccaggcctgaaaaagaaatcacagagtgtggatatcaatgccccaggttttaatcccctggctggcgccggaaagcaaacgccccaggcctctaagcctccagctccaaagacccctattattgaggaggaacagaacaacgccgctaatacacagaagcatccttcaaggcggtctgagctgaaaagattttacactatagataccggccaaaagaaaaccctggacaaaaaagacggtcgaagaatgtcatttcagaagcctaaaggcactatcgagtacactgtcgaaagccgcgactccctcaattccatcgctctgaagtttgacacgacccctaacgagctggtccaactgaacaaactgttttcacgggcagtggtgaccgggcaggtgctctatgtgcccgatccagaatatgtttcctctgtcgagagcagtccatccctgagccctgtcagtccgctgtctccgacatcatccgaggccgaattcgacaagacaacaaatcccgacgttcatcctaccgaggcaactccctcttctaccttcacgggcatcaggccggcccgtgtggtatcaagcacaagcgaggaagaggaagcctttactgaaaagtttctaaaaatcaactgcaaatacatcaccagcgggaagggaactgtatcgggggtactgttggtgaccccaaacaatattatgtttgatccgcacaaaaatgacccactcgtgcaggaaaatggttgcgaagagtacggcataatgtgccctatggaagaggtgatgagtgctgccatgtacaaagaaattttggatagcaagatcaaggagtcattaccaattgatatcgaccagctctccggtcgtgacttttgtcacagcaagaaaatgactggcagcaatacagaagaaatcgacagtcgcatccgggacgcaggcaatgattccgcctcgacagcccccaggtcgactgaggaatccctgagcgaagatgtcttcactgagagcgagttgagccctatccgagaggagctcgtcagcagcgatgagctacggcaggataaatcctccggcgcgtccagtgaaagtgtgcagaccgtgaatcaggcggaggtggagtctctgactgtcaaaagcgaatcaaccgggactcccggccacctgaggagcgatacagagcacagcactaatgaagtgggtactctctgccataaaaccgatctgaataatttggagatggccatcaaggaggatcagatcgccgacaattttcaaggtatatcaggcccaaaagaagactcgacctcaattaaggggaattccgatcaggacagtttcctgcatgaaaatagcctgcaccaggaggagtcacagaaggagaatatgccttgcggagagaccgctgagttcaaacagaaacagtctgtgaataaaggcaagcaaggcaaagagcagaatcaggattctcagactgaggcagaggaacttcgaaaactttggaaaacccacaccatgcagcagaccaagcagcagagggaaaatatccaacaggtctctcagaaggaggcaaagcataagatcacctccgctgatggccacattgaatcctctgccctgcttaaggagaaacagcgtcatcgactgcacaagtttctttgtctcagagtcggcaagcccatgaggaagacattcgtgtctcaggcctccgccacaatgcagcagtacgcacagagggacaaaaaacatgagtattggtttgccgtgcctcaggagcggaccgaccacctgtatgccttctttatccagtggagccccgagatctacgccgaagatacaggtgagtacaccagagaaccagggtttatagtggtgaagaagattgaggagtccgagacaattgaggactcatccaatcaggcagcagcccgcgaatgggaggtagtaagtgtggcggagtaccaccgtagaattgatgccttgaatactgaggaactccgaacactgtgcagacgtctacaaataactactcgagaggatatcaacagtaagcaggtggccacagtcaaagctgaccttgaatctgagagcttccgccccaatctctcagacccgtctgagctcttgcttcctgatcagatcgagaaattaacaaagcacctgccacctcgtacaatagggtacccctggactctggtatacgggactggtaagcacgggacgtcactgaagacgctgtaccgcacaatgactggcctcgacacacctgtgctcatggttattaaggattccgacggccaggtctttggcgcgttggcgtcagagcccctcaaggtgtctgacggattctatggaactggagagacattcgtgttcaccttttgtccggaattcgaagtgttcaaatggaccggcgacaacatgttttttattaagggcgatatggattcactggcattcgggggaggagggggggaatttgccctgtggcttgatggcgacctgtaccatggtaggagtcactcatgcaagacatttggcaatagaactctctctaagaaagaggacttcttcatccaagacatcgagatctgggccttcgaatag

SEQ ID NO: 127539 - DNA, 2541 bp, synthetic construct
  misc_feature 1..2541: note = Description of Artificial Sequence: Synthetic coding sequence
  source 1..2541: mol_type = other DNA
atgagcgtgtcaaatttgagctggttgaaaaaaaagtctcagtccgtcgacattaatgcacctggattcaaccccctcgccggcgccgggaaacagaccccgcaggctagtaaacctcctgcccctaaaactcctataatagaggaggagcagaacaacgctgccaacacacagaaacatccctcccggcggtcagaattaaaaagattctacaccatcgacaccgggcaaaaaaagacattggataaaaaggacggccgccgcatgtcttttcagaaaccgaagggcaccattgagtatacagttgagagtcgagactcccttaattctattgcactgaaattcgacaccacccctaatgaactggttcaattgaacaaactcttcagtagggccgtggtgaccgggcaggttctctacgtgccggaccccgagtatgtatcatcggtggagtcatcaccatccctgtccccagtctcccccctgagccctacctcctctgaagcagagttcgacaaaacgactaaccccgacgtccaccccacagaggcaacacccagcagtactttcactggtattaggcccgcaagggttgtgtcgagtacatcggaagaagaagaggcctttacggagaagttccttaagattaactgcaagtacatcacgagcggtaaagggactgtcagcggggtgcttctggtcacacccaacaatatcatgtttgatccacataaaaatgaccctctggtgcaagagaatggatgtgaggaatacggaatcatgtgtccaatggaagaggtgatgtcagccgctatgtataaagagatactggattccaagattaaggagagcttacccatagacattgaccagctgtcaggaagagacttctgccattcgaagaagatgactggaagcaacaccgaggagatagacagccgaatcagagatgccggaaacgattcagcgtctacagcaccccggagcactgaggaatcgctgtcggaggatgtgttcacggagtctgaattatcacccattcgcgaagagctcgtctcttctgatgagctccggcaggacaaatcctcaggcgcgtcaagcgaatctgtgcagaccgtgaaccaggccgaggtagagtctctgacggttaaatcagagtcgaccgggacaccaggtcatctgcgcagcgataccgagcatagtaccaacgaggtgggaacgctctgccacaagactgaccttaataacctagagatggctattaaagaggaccagattgccgacaatttccagggtatctcaggtcctaaggaggactctacgagtataaaggggaatagtgatcaggattcttttttgcacgagaactctctgcatcaagaggagagtcagaaggagaacatgccctgtggcgagacggccgagttcaagcagaagcagtctgttaataaagggaagcagggcaaagagcagaaccaggactcacagaccgaggccgaagagctgcgaaaactgtggaaaacacatacgatgcagcagacaaagcagcagagagaaaacatccagcaggtctcgcagaaggaggcgaagcacaagatcacctcggctgacggccatatcgagagcagtgctctgttaaaggagaagcagagacaccggctccataagttcctatgcttgagggttgggaaacctatgcggaagacatttgtatcgcaggcgtccgctactatgcagcagtacgcccagagagacaagaagcacgagtattggttcgccgttccacaagagcgcactgatcacttgtacgcctttttcatccagtggtcacccgagatttacgctgaggacaccggagaatacacaagggaacctggattcatcgtcgtgaaaaagattgaggagtcagagacaatcgaagacagtagcaatcaggctgcagctcgagagtgggaaatcacaactcgcgaagatatcaactctaaacaagtcgcaactgtcaaagccgacctcgaaagcgagagcttccggcctaaccttagtgacccatctgaattgctgttaccggatcaaattgaaaagctgaccaagcacctgcctccacggactattggatacccatggaccctagtgtatgggacgggtaagcacgggacttccctgaagacactttatcggacaatgacaggactggacacacccgtgcttatggtcatcaaggacagtgacggccaggtgttcggggcactggcttccgagcccttgaaggtttcagacggcttctacggcaccggggaaacatttgtcttcacattctgtccagaatttgaggtgtttaaatggaccggcgacaatatgttctttatcaaaggagatatggattctcttgccttcggtggcggaggaggagaatttgcactctggctggacggcgacctatatcacggaaggtcccattcctgtaagacgtttggtaaccggactctgtccaagaaggaggattttttcatccaggacattgagatttgggctttcgagtag

SEQ ID NO: 127540 - DNA, 651 bp, synthetic construct
  misc_feature 1..651: note = Description of Artificial Sequence: Synthetic coding sequence
  source 1..651: mol_type = other DNA
atgtcaaggctttggtacggaaagaagggcagaagacaccagcctattaatcacaaatacacgttaataaccaccagagaagacataaactccaaacaggttgccacggtgaaggcggacctggagtcagagtcctttcgtcctaacctgagcgatccaagcgaactgctgcttccggaccaaattgagaagctgaccaaacacctgcccccaagaactattgggtatccctggactctggtgtacggtactggcaagcacggcacttcacttaagacactgtaccgaacgatgactggattagacaccccggtccttatggttattaaggattccgacggacaggtcttcggcgccctggcttcagagcccctgaaggtatctgatggtttttacggaaccggcgaaacattcgtgttcacattttgccctgaatttgaagttttcaaatggacaggagataacatgttttttattaagggggacatggacagccttgctttcggcggcggagggggagaatttgccctatggctggatggtgacctttatcatggaagaagtcacagctgcaaaacatttggtaacagaaccctcagtaagaaagaggatttttttatacaggacatcgagatttgggccttcgaatag

SEQ ID NO: 127541 - DNA, 885 bp, synthetic construct
  misc_feature 1..885: note = Description of Artificial Sequence: Synthetic coding sequence
  source 1..885: mol_type = other DNA
atgcagcagactaaacagcagcgcgagaacatccagcaggtgtctcagaaggaggccaagcataaaatcacctcggcagatggtcacatcgaaagctctgcacttttgaaggagaagcagaggcaccggttgcacaagttcctgtgcctgcgagtggggaagccaatgcgaaaaacgttcgtatcacaagcatcggccactatgcagcagtacgcccagcgagacaagaagcacgaatattggttcgctgttccccaagaacggactgatcacctgtatgctttttttattcagtggtcgccggaaatctacgccgaggatacgggggagtacacaagagagcccggatttatcgtagtgaagaagatcgaagagagtgaaactatcgaagattcgtcgaatcaggcggcagcacgagagtgggaactcactaagcacctgccaccacggacaatcggttacccatggaccctggtgtacgggacgggaaaacatggtacgtccctcaaaaccctatacagaaccatgaccggcctggacacacctgtgttaatggtgattaaggatagcgacgggcaggtctttggcgcgttagcttcggaacctttgaaggtatctgatggattttacgggacgggtgagactttcgtctttaccttctgcccagagtttgaggtttttaagtggaccggtgataacatgttcttcatcaagggagacatggattccttagcctttggtggcgggggaggcgaatttgcactttggctggacggcgacttgtaccatggccgttcacacagttgtaagaccttcgggaaccgcacgctgagcaaaaaggaggactttttcatccaagatattgaaatttgggcttttgaatag

SEQ ID NO: 127542 - DNA, 1512 bp, synthetic construct
  misc_feature 1..1512: note = Description of Artificial Sequence: Synthetic coding sequence
  source 1..1512: mol_type = other DNA
atgttttgccaaagaaaggacactgggcaaaaaaaaacattggacaagaaggacggccgcaggatgagttttcagaagcctaaggggaccatcgagtacaccgtcgagtctagagactcgcttaactccattgctctgaagtttgataccacaccaaatgagctggtgcagctgaataagttattttcccgggccgttgtcactggccaagtcctgtatgtgcccgatcccgagtatgtgtcatccgtcgagtcttctccgagcctgtcgcctgtcagccctctgagtcccaccagcagcgaggccgaatttgataagactactaacccagatgtgcatcctaccgaagcaactccctccagcacattcacaggcattagacccgccagagtggtctcgagtaccagcgaggaggaagaagccttcacggaaaagttccttaagatcaattgcaagtatataacatcgggaaagggcactgtcagcggtgtcctgttggttaccccaaacaacatcatgttcgacccacacaagaatgaccccctcgtgcaggagaatggatgtgaggaatacggaatcatgtgccccatggaggaggtgatgtctgccgcaatgtacaaggagattctggacagcaaaattaaggaaagcttgcccatcgacatcgaccagctatctggacgcgatttttgccactcaaagaagatgacaggatcaaacactgaagagattgactctagaatccgggacgcaggcaatgattcggcgtctaccgcccctcgctccacggaggagtcactctcagaagatgttttcaccgagtcagaattatcccccatcagagaggagctggtgagttctgatgaactgcggcaagataaatcttccggagcatcctctgaaagcgtacagactgtcaatcaggctgaggtggagtcccttaccgtgaagagtgaatccactggaactcccggtcatttgcggagcgacaccgagcactcgacgaacgaggtgggcactctgtgccacaaaacagacctgaataatctcgagatggccattaaagaggaccagattgctgataattttcagggaatttctggccctaaagaagatagcacaagcataaaggggaatagtgatcaggattcttttttacatgagaattcactgcatcaggaggagagccagaaagaaaacatgccttgtggcgagacggcagaatttaaacagaagcagtccgtcaacaaggggaagcagggcaaggaacagaaccaagacagtcaaacagaagcggaggagctgaggaaactttggaaaacacatacgatgcagcagaccaaacagcagcgtgaaaacatccagcaagtgtctcagaaggaagccaaacataagatcacctccgctgacggccacatcgaaagtaagtgttacagggtcaacgaggtgtcatcatccaactgcatggtatccccaagtttccttacggacagtaaggctgccgtcccttag

SEQ ID NO: 127543 - DNA, 2622 bp, synthetic construct
  misc_feature 1..2622: note = Description of Artificial Sequence: Synthetic coding sequence
  source 1..2622: mol_type = other DNA
atgtccgtttccaacctgtcatggctcaaaaagaagtcacaatcagtggatattaatgctccaggctttaaccctttagcaggggctgggaagcaaacccctcaggcttcaaagccacctgcccctaaaactccaataatcgaggaggagcaaaacaacgccgctaacactcagaaacacccctcgcggaggtccgaactgaaaagattctatactatcgatactggccagaagaagaccctggacaaaaaggacggtcggcgtatgagcttccaaaagcccaagggtaccattgagtacactgtggagagtcgggattcactgaattctattgcgctgaagttcgataccacccctaacgagctcgtccaattaaataagctcttttctagggcagttgtgaccggacaggtcctttatgtcccagatcccgagtacgtgtcctcagtggaatcatctccatccttgagtcccgtgagtccgctgtcgcctacaagttcggaggccgagtttgataagaccactaacccggatgttcatcctactgaagcaacaccttcctcaacctttactggaattaggccagctcgtgttgtgtcatccacctccgaggaagaagaggctttcactgagaagtttttgaagatcaattgcaaatatattacatcaggcaaaggtacagtctccggggtgctgctcgtgacgcccaacaatatcatgtttgatcctcataagaatgaccctttggtccaggagaatggctgtgaggaatacggcatcatgtgtcctatggaggaggtcatgagcgctgcgatgtacaaggagattttggattcaaagatcaaggaatcccttcctatagatatagaccagctctctggtagagacttctgtcacagtaaaaagatgaccggctctaatactgaggaaatcgactcccgaatccgggatgctggaaacgattctgccagcacggctccacgatcaacagaggagtctttgtcagaagacgtgttcaccgagtcggaactgtcccctatacgggaagagctcgtgagtagcgacgagctcagacaagacaaatcaagcggagcctcttcagagagcgtgcagactgtcaatcaggctgaggtcgaatccctgacagtcaagtccgagtcgaccgggacacccggacacctgaggtctgacaccgagcatagcactaacgaagtgggaacactgtgccacaaaaccgacctgaataacctggaaatggctattaaagaggatcagattgcagacaacttccaggggatttcagggccgaaagaagactccacatctatcaaaggaaactccgatcaggactcttttctgcacgaaaatagcctgcaccaggaggagagccagaaggagaacatgccctgcggcgaaacggccgagttcaagcagaagcaaagtgtgaataaaggaaagcagggaaaggagcagaatcaggactcacagacagaggccgaagagttacggaaactgtggaaaactcacacaatgcagcaaactaagcagcagcgggagaacattcagcaagtcagccagaaggaggccaagcataaaatcacctccgcggatgggcatatagagtcctccgccctactgaaggaaaagcagcgccacaggcttcacaagttcctgtgtctgcgggtaggcaaacctatgcggaagacctttgtctctcaggcctccgcaacgatgcaacagtacgcccagcgcgacaaaaaacatgagtactggttcgccgtgccacaggagcgtaccgatcacctttacgccttctttattcaatggagccccgaaatatatgcagaggacacaggggaatacacgcgagaacctgggtttatcgtggtgaaaaagatagaggagtcagaaaccatcgaggactcgtcgaatcaggcggctgcccgagagtgggaggttgttagcgtggccgagtatcaccgccggatcgatgcactgaacaccgaggaactgcgaacactgtgcaggcgcctgcagatcaccacccgcgaggatatcaattctaagcaggtggcgaccgtcaaggcggatctggaatcggagagttttcgccctaacctgtcagatccatctgagctgctcctccccgaccagattgaaaaactgaccaagcacctgccgcctaggaccattggttatccttggacactggtgtacggcacgggaaagcacgggacaagtctaaaaactctgtacaggactatgactgggctggacacacctgtgctaatggtcatcaaagatagcgacggtcaggtctttggggctctggcaagcgaaccactgaaagtcagcgatggcttttatggaactggagagacgttcgtctttacgttttgtccagagttcgaggtgtttaagtggacaggagataatatgttcttcatcaaaggagatatggactcactggcattcggcggaggcggtggggagttcgcactgtggcttgatggggatctttaccatggcagatcccattcctgcaagacattcggcaaccgcactctgagtaaaaaagaagacttctttatccaggatatcgagatctgggcatttgagtag

SEQ ID NO: 127544 - DNA, 2541 bp, synthetic construct
  misc_feature 1..2541: note = Description of Artificial Sequence: Synthetic coding sequence
  source 1..2541: mol_type = other DNA
atgtccgtgtcgaatctgagttggctcaaaaagaaatcccaaagcgttgacattaatgctcccgggttcaaccccctggcaggggcaggtaagcaaacacctcaagcctctaaaccacccgcacccaagaccccaatcattgaagaggaacagaacaatgctgccaacactcagaagcaccctagccgacggagtgaacttaagcgtttttatacgatagatacagggcagaaaaagactcttgacaaaaaagacgggcgccgcatgagttttcagaagcctaagggcaccatagaatatacggtggagtcccgagacagcctcaattctattgcacttaaattcgataccacacccaacgaactggtccaactgaacaaattatttagccgcgcggtggtgactgggcaggttctttacgttccagatcctgaatacgtctcatcagtcgagtctagcccttctctgtctcctgtgagtccgctgtcacccaccagctccgaggctgagttcgacaagacgaccaatcctgacgtgcaccccacggaggccacccctagtagtactttcacggggatccgccccgctcgcgtcgttagctctaccagcgaagaggaagaagcctttacggaaaagttcttgaagatcaactgtaaatacatcacttctgggaagggaaccgtgtctggagttttgctggtgacacctaacaacatcatgttcgatccgcacaagaacgacccgttggttcaggagaacggatgcgaagaatacggcataatgtgtcctatggaggaagtgatgtccgccgcaatgtacaaggagatccttgactctaaaattaaagaaagtctcccaatcgatatcgatcaactctctggacgcgacttttgtcattcgaagaaaatgactggaagcaataccgaggaaatcgatagcaggatccgcgatgcgggtaatgattctgcctctaccgcacctcggtctactgaggagtccctgtcagaggatgttttcacagaatctgagctgtcccctatcagggaggagttggtgagctcggatgagctacgacaagataagtccagcggagccagttcagagtcagttcagactgtgaatcaggctgaggtcgagtcccttaccgtcaagagcgagagtacaggtacacctgggcacctccgaagcgacacagaacacagcaccaatgaggtggggaccctgtgtcataaaaccgatcttaacaacctcgagatggccattaaggaggaccaaattgcagacaacttccagggcattagtggccccaaggaagactccacctctataaaaggaaacagcgatcaggactcatttctccacgagaactcattgcaccaggaggagagccagaaagaaaacatgccatgtggtgagacagctgaatttaagcagaaacaatcagtcaataaggggaagcaaggaaaagagcagaaccaggacagtcagacggaggctgaagaactcaggaagctctggaagacccacaccatgcagcaaacgaaacagcaacgtgagaacatccagcaggtgagccagaaagaagctaaacacaagatcacctccgcagacggccatatcgaatcttctgcactattaaaagaaaaacaaagacatcgtttacataagttcttgtgtctcagggtgggcaagcccatgcgtaagactttcgtttcacaagcgtctgccaccatgcagcagtatgcccagagagacaagaaacatgagtactggtttgccgtgccccaggaaaggacagatcatctatatgctttctttatccaatggtccccagaaatctacgcagaggataccggcgaatacacccgcgagccaggctttattgtggttaaaaagatcgaagagtctgaaaccattgaggattcatcgaatcaggctgccgcccgtgagtgggagatcactactagagaggatattaacagcaagcaggtggccaccgtaaaagccgatcttgagtccgagagtttcaggcccaacctttccgatccaagcgagcttttactgcctgaccagattgagaaacttaccaaacacctgcctcccagaacaatcgggtacccctggaccctagtttacggaacagggaaacacggtacaagtctgaaaacattatatcgaaccatgacagggctggatacccccgtcctgatggtgatcaaagactctgacggacaagtctttggagccctcgcaagcgaacctttgaaggtttctgatgggttctacggtactggcgagacatttgtttttaccttttgtcccgagttcgaagtgtttaagtggaccggagacaatatgttcttcattaaaggagatatggatagcttggcttttggtggcgggggtggcgaattcgccctgtggttggacggcgacctctatcacggcagaagccacagctgcaagactttcggaaaccgcaccctcagcaagaaagaagactttttcatccaggacatagagatttgggcctttgagtag

SEQ ID NO: 127545 - DNA, 822 bp, synthetic construct
  misc_feature 1..822: note = Description of Artificial Sequence: Synthetic coding sequence
  source 1..822: mol_type = other DNA
atgaccttcgatgatttaaagatacagacagtaaaagatcagcccgatgaaaagtccaacggcaagaaggccaaagggttacagtttctttacagtccatggtggtgtctggccgctgctaccctgggtgtgttatgcctggggctcgtcgttacaattatggtgctgggcatgcaactgtctcaagtcagcgacctgctgacccaggagcaggcaaatcttacgcaccagaagaaaaagctcgaaggccagatctctgcaaggcagcaggctgaggaagcttcacaggaatccgagaatgaactgaaggaaatgattgagacactggcgcggaaactgaatgaaaagtctaaagagcagatggagctccatcaccaaaacttaaatctgcaggaaacactgaaaagagttgccaattgcagtgccccctgtccccaggattggatctggcacggggaaaattgttacctcttctcctctggcagtttcaactgggagaaaagtcaagaaaaatgcttatccttggacgctaagctgcttaaaatcaacagtaccgccgatctggacttcattcaacaggcaatctcctactcgagctttcccttctggatggggctatctagacgcaatccttcttatccctggctgtgggaggacggaagcccactgatgcctcatctatttagagtgaggggcgccgtcagtcagacctacccatccggcacatgcgcatatattcagcggggagcagtatacgctgagaattgtattctagccgccttttctatctgccagaagaaagccaacctccgggctcagtag

SEQ ID NO: 127546 - DNA, 546 bp, synthetic construct
  misc_feature 1..546: note = Description of Artificial Sequence: Synthetic coding sequence
  source 1..546: mol_type = other DNA
atgaccttcgacgaccttaagatacaaacagtgaaggatcagcctgatgagaagagtaacgggaagaaggcaaaggggctgcagtttctgtacagcccttggtggtgcctggctgccgcaaccctgggtgtcctgtgcctgggcctggttgtgactattatggtgctgggtatgcagttgtcccaggtctccgatcttctcacacaggagcaggctaatctcactcaccaaaagaagaagcttgaagggcagatctcagcacggcagcaagcagaggaggccagccaggagtccgaaaacgagctgaaggagatgatcgagaccctcgcaaggaaattgaacgaaaagagtaaagaacagatggagctgcaccatcagaatctcaacctccaggaaacactaaagcgcgtcgcaaattgcagcggattgcaccctgcctccaattttttatttcagttttccatcttggacggagcggtaagtgaggaaccgcagctccccatggcactgggaggacgatttagcttcgacgctcccttaatttag

SEQ ID NO: 127547 - DNA, 570 bp, synthetic construct
  misc_feature 1..570: note = Description of Artificial Sequence: Synthetic coding sequence
  source 1..570: mol_type = other DNA
atgaccttcgatgaccttaaaattcagaccgtgaaggaccaaccagatgagaaaagtaatggcaagaaagcgaaaggcttgcaatttctttactccccgtggtggtgtctggccgcggctacattaggagttttgtgccttggacttgtggtgacaatcatggtgttgggcatgcagctgagtcaggtgtcagatctgcttacgcaggaacaggcaaaccttactcaccagaaaaaaaaattagaaggacagatttccgctcgtcagcaggctgaggaggcctctcaggagagtgagaacgagttgaaggaaatgattgaaactcttgcgaggaaactcaatgagaagagcaaggagcagatggagcttcatcaccagaaccttaatctccaggagacactgaagagagtcgcgaactgtagcgccccctgcccacaggattggatatggcatggggagaactgttacctattttcctcaggcagttttaactgggaaaaatcccaggagaaatgtctgtctttggatgcgaaacttctgaagattaattccactgctgatctgatatag

SEQ ID NO: 127548 - DNA, 1623 bp, synthetic construct
  misc_feature 1..1623: note = Description of Artificial Sequence: Synthetic coding sequence
  source 1..1623: mol_type = other DNA
atgcagcaagtcctggaaaacctcacagagctcccttcatccaccggagctgaagaaatcgatcttatatttctgaaaggaatcatggaaaatcctatcgtaaagtccttggccaaggcgcatgagcgtctggaggactcaaaattggaggcagtgtctgataacaaccttgaactggtcaatgaaattctcgaggacatcactcccttaatcaatgtcgatgagaacgtggcagagctcgtgggaattctgaaagagcctcatttccagtctcttctagaggcgcacgacatcgtggcgtccaaatgctacgatagcccacccagctctccagaaatgaataacagttctatcaacaaccagctgctgccggtggacgcgatccgcatcttagggatccacaaacgtgccggtgagcctctgggagtcacatttcgggtggagaataacgacttggtgattgctcgcatcctgcacggaggcatgattgatcgtcagggacttctgcacgtgggcgatatcataaaggaggtaaatggacacgaagttggtaataatcctaaagagcttcaggagttacttaagaatatcagcggctcggtgactctcaagatactgccatcctatagggacactatcacaccacagcaggtgtttgtgaagtgccactttgattacaatccttacaatgacaacctgattccctgtaaggaggctggactcaaattctctaagggggagattctccaaatcgtcaaccgcgaagatcctaattggtggcaggcatcccatgttaaggaaggagggtcagctggactgattcccagtcagtttctggaagaaaaaagaaaagcgtttgtgcggcgggattgggataacagcggaccattttgcgggacgatatctagcaagaaaaagaaaaagatgatgtatctgaccacccgcaacgccgagtttgatcggcatgaaattcagatctatgaggaagtggctaaaatgccacccttccagcgcaaaaccctggttcttattggcgcacagggggtcggtaggcgatcccttaagaatagatttatcgtgctgaacccgaccaggttcgggacaacggtgcccttcacctcacgcaagcccagggaagatgaaaaggatgggcaggcatacaaattcgtttctagatccgagatggaagctgacatcaaggcagggaagtatttggagcatggggaatatgaaggtaatctctacggcacgaaaattgatagcattctggaggtagtgcaaacaggcaggacatgcattctcgatgttaatccccaggccctgaaggtgttacgaactagcgaattcatgccatatgtggttttcatcgcggctcccgagttagagaccctccgggccatgcataaggccgtagtcgacgccgggatcaccacaaagctcttaaccgattccgacctgaagaagaccgtggacgagtcagcccggattcagcgggcatacaaccattactttgatctgatcatcatcaacgacaatttagacaaggccttcgagaaactgcagaccgctattgagaagctgaggatggagccccagtgggttccaatcagctgggtatactag

SEQ ID NO: 127549 - DNA, 636 bp, synthetic construct
  misc_feature 1..636: note = Description of Artificial Sequence: Synthetic coding sequence
  source 1..636: mol_type = other DNA
atgtttcatctgagaacctgtgccgcaaagctgaggccactgaccgcttcccaaactgtgaagactttctcccaaaaccgccctgccgctgcccgcactttccaacagatcagatgttactccgcccccgtcgctgctgagccgttcctttcggggacatcaagcaactacgtggaagagatgtactgtgcgtggctggagaatcccaagtccgtacacaaatcctgggacatttttttcaggaacactaacgctggggcacctcccggtacagcatatcaatctccactacctctgagccgagggtcactggccgccgttgcacacgcccagtccctggtcgaggcacagccgaacgtggacaaattagtggaggaccacctggcagtacaatcacttatcagagcctaccaaatcagagggcatcacgtagcacagctggacccactggggattctggatgctgacctggattcgagtgtccccgcagacatcatttcttcaacagataaactggggttctatggcctcgatgaatccgacctcgataaggtttttcatcttcccacaaccacattcatcggcggtcaagagagcgctttaccactgcgcgagattatccggcgcctcgaatag

SEQ ID NO: 127550 - DNA, 1284 bp, synthetic construct
  misc_feature 1..1284: note = Description of Artificial Sequence: Synthetic coding sequence
  source 1..1284: mol_type = other DNA
atgttccacctgaggacatgcgcagccaaactaaggcccctgacagccagccagacagttaagaccttctctcaaaacaggcccgcggcagccagaacctttcagcagatccgctgctattctgcacccgtggcagccgaacctttcctctccggaacctctagtaattatgtggaagagatgtattgcgcctggctggagaatcctaaatccgtccacaagtcctgggatatctttttccgcaacaccaatgcaggtgcacccccgggtaccgcctaccaaagcccactgcccctctctcgcgggagcttggccgcagttgcccacgcgcagagcctcgtcgaagcacagcctaacgttgacaagttagttgaggaccaccttgccgtgcaaagtctcattagggcctaccagattagaggccaccatgtggcccagctcgaccctttgggcattttggatgcagacctggactctagtgtccctgcggacatcatctcatccactgataagcttggcttctatgggctcgacgagtcagatctcgacaaagtctttcacttgcctacaaccacatttatcggtgggcaggagtcagctctccccctgagggagatcatcagaaggctggaaatggcatattgtcaacacatcggagttgagttcatgtttatcaatgacttggagcagtgccagtggatccggcagaagttcgagaccccaggcattatgcagtttacaaatgaggagaagagaacactgctggctcgtctggtgcgcagtaccaggtttgaagagtttttacagagaaagtggtcatctgaaaagcgcttcgggttggagggttgcgaggtgttgatcccagccttaaaaacaatcatcgacaaatctagcgagaatggagtggattatgtcattatgggtatgccccacagagggagactaaacgtgcttgctaatgttatcagaaaggagctggagcagatcttttgtcagtttgacagcaaactggaggccgctgacgaaggttccggggatgtgaaataccacctgggtatgtatcatagaaggattaatcgagtgaccgatcgtaatattacgctgagcctggtggctaacccttctcatttagaagccgctgaccctgtagtcatgggtaagactaaggccgaacagttttattgtggcgacaccgagggtaagaaagtgagaccccgcgagcgacgggcgcgccaaatagtgaaagcaccctgctcctcaatggaatttcgcagccctacctag

SEQ ID NO: 127551 - DNA, 2925 bp, synthetic construct
  misc_feature 1..2925: note = Description of Artificial Sequence: Synthetic coding sequence
  source 1..2925: mol_type = other DNA
atgtactgtgcttggctggaaaatcctaagtcagtccacaagtcttgggatatctttttccgaaacactaacgccggtgctcctcctggaacagcctaccagagtccccttcccttgagtaggggaagcttagccgccgtggcccatgctcagagcctggtcgaagcccagcccaacgtcgataagctcgtggaagaccatctggcagttcagagtctgattcgagcataccaggtgcggggccatcacatcgccaaactggaccctttaggcattagctgcgtcaacttcgacgacgctcctgttaccgtgagcagtaatgtggatctcgcagtgttcaaggaaagacttaggatgcttaccgtggggggattttacggcctggacgaatcagaccttgataaggtcttccatctgcccacaactactttcatcgggggtcaagagtccgcacttcccctccgggagataataagacggcttgagatggcttattgtcagcatattggcgtggagttcatgttcatcaacgacctggagcagtgccagtggatccggcaaaagtttgagaccccaggtattatgcagtttaccaacgaagaaaagcggactttgctggcacgacttgttcgcagcacccggttcgaagagttcctgcagagaaagtggagtagcgagaaaaggtttggcttggagggttgcgaagtactgatcccggctcttaagacgattatagataaaagcagcgagaacggagtggactatgtgattatggggatgccgcacaggggtcgacttaatgtgcttgcgaacgtgattagaaaggagcttgagcagatattctgtcaattcgactctaaattggaagccgctgatgaaggaagcggggatgttaaataccacctggggatgtatcaccggcgaattaacagagtcaccgacagaaatattactctctcactggtagccaatccctctcatctggaagccgcggatcctgtggtgatgggcaagacaaaagccgaacaattctattgcggagacacagagggcaagaaagtgatgagcatactcctacatggcgacgcagcgtttgccggacaaggcattgtttacgagaccttccacctatccgacctgccgtcctacactacccacggtacggtgcacgtagttgtcaacaaccagattggattcactaccgatccaagaatggccaggtcaagcccatatcctaccgacgtggctcgcgtggttaacgcccccattttccatgtgaacagtgatgacccggaggcagtgatgtatgtctgtaaggtggccgcggaatggcgtagcacctttcacaaggatgtggtggttgatcttgtttgttatcgccgcaacggacataacgagatggatgagccaatgttcactcagcccctgatgtataaacagattcggaaacagaaacctgtgctccagaagtacgctgaattgctcgtgtcccagggagttgtcaaccaaccagaatacgaagaggagatcagcaaatatgacaaaatctgtgaagaggcctttgctcggtcaaaggatgagaaaatcttgcacatcaaacattggttagattctccctggcctgggtttttcacgttggatggtcagccccggtccatgagctgcccatcaaccggactgactgaagatattctaacccacattggaaatgtggcgagttcagttccagtcgagaacttcaccattcacggagggctgagccgaatcctaaaaacacggggagagatggttaagaaccgcacggtggactgggcgctggcagagtatatggcctttggctcattactcaaagaaggaattcacatccgcctaagcggccaggatgtggagcggggaaccttctctcacagacatcatgtgctgcacgaccagaatgtcgacaaacgcacctgcatcccaatgaatcacctttggcccaatcaagcgccttacacggtgtgcaactcctccctatctgaatacggagttctcggctttgagcttggatttgccatggctagccccaatgccttagtgttgtgggaggcacaattcggagacttccataataccgctcagtgcatcatcgatcagtttatctgcccagggcaggccaaatgggtgagacagaacggaattgtgctcttactgccccatgggatggaaggcatgggtcctgagcacagctccgccaggcctgagagattcctgcaaatgtgcaatgatgatcccgacgtcctcccggacctcaaagaagcgaatttcgacataaaccagctttacgactgcaactgggtggtggtgaactgctctacacccggaaacttcttccacgttttacgcaggcagattctactgccttttcggaagcccctgataatttttacgccgaagagcttgctaaggcaccctgaggccagatcaagtttcgacgagatgcttccaggtactcatttccagcgcgtgatacccgaagacggcccagctgctcaaaaccctgagaacgtaaagcgtctgctattctgtacaggaaaggtatattacgaccttacgcgtgaacgcaaagcccgcgatatggtagggcaggtggcaatcacccgcatcgagcagctctcgccctttcctttcgatctcctgctcaaggaagtgcagaagtatcccaatgccgagctggcttggtgccaggaggagcataagaaccaggggtactatgattacgtcaagcctagactcaggacaacaatcagtagggccaagcctgtgtggtatgcaggccgggaccctgccgcggctcccgctacagggaacaagaagactcaccttacagaactacagaggctgctggacaccgccttcgatttggacgttttcaagaatttctcttag

SEQ ID NO: 127552 - DNA, 3060 bp, synthetic construct
  misc_feature 1..3060: note = Description of Artificial Sequence: Synthetic coding sequence
  source 1..3060: mol_type = other DNA
atgtttcaccttagaacctgtgcagccaaacttcggcccctaaccgcatcccagacggtgaagactttctcccagaaccgaccagcagccgcccgtacttttcaacagatcaggtgctactctgcccctgtggctgccgagccctttctaagcggcacttctagtaactacgtcgaggaaatgtattgcgcctggttagagaatcctaagagtgttcataaatcttgggatattttctttaggaatactaatgcaggggcccctcccgggaccgcttaccagagcccactgcccctgtctagggggtccctggctgccgtggcacatgcccagagcctggttgaagctcaacctaatgtggacaagctggtggaggatcatctcgccgtacaatcgctgatacgagcgtatcaggttcgcggccaccatattgcaaagctcgatccgctggggattagctgcgtgaattttgacgatgccccagtcacagtctcctctaacgtgggtttttatggcctggatgaaagcgatcttgacaaggtatttcatctcccaacaaccaccttcatcgggggccaggagagcgctctccccctgagagagatcattcggagattggagatggcctactgccaacacattggcgtcgagtttatgttcattaatgatttagagcaatgccaatggattcgacagaaatttgagacccccggaattatgcagtttacaaatgaagagaagcgcaccctgctggcccgcctagtgcggagtactaggtttgaggaatttctgcagagaaaatggtccagcgagaagcgattcgggctggaggggtgcgaagttttgattccagcattgaaaacaatcattgataaaagcagcgaaaatggcgtggattacgtgatcatgggcatgcctcatcgtggacggcttaatgttctcgcaaacgtgatcaggaaggaactggaacagattttttgtcagttcgattctaagcttgaggcggccgacgagggctccggtgatgtgaagtatcacttagggatgtatcacaggcgcatcaatcgtgttacagaccggaatataacgttatctcttgtggcaaacccttcccatctggaggctgcagaccctgtggttatgggcaagacaaaggctgagcagttctattgtggcgatacagagggcaagaaagtcatgtcaatcctgctgcacggtgatgctgcttttgccggacaaggcatcgtgtatgaaacattccaccttagcgacctgccgagctacactacacacggcaccgtccacgtagttgttaataatcagatcggttttacgactgatccacggatggcccgttccagtccatatcccactgacgtcgccagggtcgtcaatgcaccaatcttccacgttaattctgatgacccggaagccgtaatgtacgtttgtaaagtggctgccgaatggcggagcacttttcacaaggatgtagtggtggacctggtgtgttataggagaaacggacataatgagatggacgaacccatgttcacgcaaccattaatgtacaaacaaattaggaaacagaagcctgttctgcagaagtacgcagagctcctggtgagtcagggtgttgttaatcagccagagtatgaggaggaaataagtaaatacgacaaaatctgtgaagaggcctttgcgcgctccaaagatgagaagatcttgcacattaaacattggctggattctccatggccaggtttctttaccctggacggacagccccgcagtatgagctgtccatctacaggcttgaccgaggacatcctgacacacattggcaacgtggcctcctcggttccggtggagaattttacgatccacggaggtctcagcagaattcttaagacgaggggagagatggtgaaaaacaggactgtggactgggcactcgccgagtacatggctttcggaagtttactcaaggagggaatccacatccgactcagtgggcaggacgttgagcgcgggaccttcagccatagacatcacgtcctgcacgatcagaatgtggacaaaagaacatgtataccgatgaatcacctgtggcctaatcaggccccctatacagtctgtaatagtagtctgtctgaatacggagttctcggcttcgagctgggctttgcaatggcaagccccaacgcactggtgctgtgggaagcacagtttggagatttccacaatacagcccagtgcataatagaccagtttatttgtcccggccaggccaaatgggtgaggcagaatgggatagttctcctgctgccacacggaatggaaggaatgggacctgagcactccagtgcaagaccagaaaggtttctgcaaatgtgtaacgatgatcctgacgttctgccagacctcaaggaagccaacttcgacatcaatcagttatatgactgcaactgggtggtcgtcaactgctccacacccggtaacttttttcatgtgcttagaagacaaatactcctacctttcaggaaacctctgatcatcttcacaccaaagagcctgctgcgccatccagaggccaggtcatctttcgacgaaatgctgcccggaacacatttccaacgggttattccagaggacggtcccgcggctcaaaatccagaaaacgtgaagaggttgctgttctgtacaggaaaggtctactatgacctcactcgggaaagaaaagcgagagatatggtcggacaggtcgccatcacacggatcgagcagctgtcaccttttccgttcgacctcctgcttaaagaagttcagaagtacccaaacgctgagctggcatggtgccaggaagaacacaaaaatcagggatattacgattacgtgaaaccgaggctgcgcaccaccatcagtagagccaaacctgtttggtatgcaggcagggacccggctgctgctccagcaactggtaataagaaaacacacctcaccgaactccaacggttgctcgacaccgcatttgatctcgatgtgtttaaaaatttctcctag

SEQ ID NO: 127553 - DNA, 2424 bp, synthetic construct
  misc_feature 1..2424: note = Description of Artificial Sequence: Synthetic coding sequence
  source 1..2424: mol_type = other DNA
atggctgctactgagctacgcggtgtggtcggaccaggccctgcagcaattgcagctctaggcggcgggggtgccggacctccggtagtcgggggggggggcggtaggggcgacgccgggccgggcagcggggctgcctcaggaacggtggtggctgccgcggcaggaggccctggtcctggagccggcggagtggctgcggcaggaccagcacctgcacctcctacaggaggcagcggcggaagcggagctggaggaagtggttccgccagggaaggttggctttttaaatggactaattacataaagggatatcaaagacgctggtttgttctttccaatggactcctgtcctattatcggagtaaggctgagatgagacacacatgtagaggtaccatcaacctggccaccgctaacattaccgtagaagacagctgcaattttattattagtaatggtggcgcgcagacctatcatctgaaggcaagcagcgaggtggagcgccagcgttgggttactgctcttgaactagctaaagcaaaagctgtcaagatgctcgctgagagcgacgagtccggcgatgaagaatccgtcagtcaaactgataagacggagttgcaaaacactctcaggaccctgagctcaaaggtcgaagatctgtctacctgcaacgacttaatcgcaaaacacgggacagctctgcagcgcagtcttagtgaactggagtcactgaaactccccgccgaatctaacgaaaaaatcaagcaggtcaatgagcgcgcaacgctgtttagaattacatcgaacgccatgatcaatgcatgtcgagactttctgatgctggcgcagacacacagcaagaaatggcaaaaatccctgcagtatgaacgagaccagcgtattcgcttggaagagaccctcgaacagctggccaagcagcacaatcatctcgaaagggccttccgtggtgctactgtgctgcctgctaacacgccaggaaacgtgggctcaggcaaagaccagtgctgctctgggaagggagatatgagcgatgaagacgatgaaaatgaattctttgatgcaccagagattatcacaatgcccgaaaacttagggcacaagagaacaggctctaatatttctggagcgtcatctgacatctctctcgacgagcagtataagcatcagttagaagagactaaaaaggagaagcgtacccgcattccctataagccaaactactccctgaatttgtggagtataatgaaaaactgcattggtaaagagttgtctaagattcctatgccagtcaacttcaatgaaccattgtcaatgttacagcggctcaccgaggacctggaatatcatgaacttttagaccgggccgctaagtgtgagaactcactggaacagctatgttacgtggcggcgttcacggtgtcgtcatactcaacaactgtgtttcggacctctaaacctttcaacccgctgttgggggagacattcgaactggataggctcgaggagaacggatatagatctctgtgtgaacaggtcagccaccaccctccagctgcggcgcatcacgccgagtcaaagaatggatggactttgcgacaggagatcaagatcacgtcaaagttcagaggcaagtacctaagtatcatgccgctggggaccatccactgtatctttcatgctaccggccaccattacacatggaagaaagtgacaacaacagtgcacaacatcattgtgggtaaactgtggattgaccagtccggtgagatcgacattgtgaatcacaagactggtgacaaatgcaatttgaagtttgtgccatactcttacttctctagggacgttgctaggaaggtcactggtgaagtaactgatcctagtggcaaagtccacttcgcccttctggggacttgggacgaaaagatggaatgtttcaaagtgcaacccgtcatcggggaaaatgggggggacgccaggcagcgcggacatgaagctgaagagtcgcgggtaatgctttggaaacggaatccactgcctaagaacgccgaaaatatgtattactttagcgaactggcactgactctcaatgcatgggaaagcggaaccgccccgacagatagtcgcctgaggcctgaccagagactcatggaaaatgggcgttgggacgaggccaatgctgaaaaacagagactcgaggagaaacagcgcctaagcagaaaaaaaagggaggccgaagccatgaaagctacagaggacggcacgccttatgacccttataaggcactttggttcgagaggaaaaaggatccggtgactaaagagctgacacacatctaccggggtgaatattgggaatgcaaggaaaagcaggattggagctcgtgcccagacattttctag

SEQ ID NO: 127554 - DNA, 1224 bp, synthetic construct
  misc_feature 1..1224: note = Description of Artificial Sequence: Synthetic coding sequence
  source 1..1224: mol_type = other DNA
atggccgctacagagcttcggggagtggtcggtccagggcctgccgccattgctgcactcggggggggtggagccgggccaccagtggtgggcgggggcgggggaagaggcgacgcaggaccgggttctggtgctgccctccagagattgacagaggatctggaataccacgagctattggaccgggcggccaagtgtgaaaactccctggaacagctgtgctacgtggcggcttttacagtcagtagttactcaaccaccgtctttaggaccagcaagcccttcaatcccttacttggcgaaacctttgagctggacagactcgaggaaaacggttacaggtcgctatgtgaacaggtgagtcatcaccctcctgcagccgcccatcacgccgaatctaaaaacggctggactctgcggcaagagatcaagatcacatctaaatttcgtggaaagtatctgagcattatgcccctcggcaccatccactgcattttccatgctaccggtcaccattacacgtggaagaaggttacgacaacagtccataatatcattgtaggcaagctgtggatcgaccagtcaggcgaaatcgatattgtcaaccacaaaactggcgataaatgcaacctcaaatttgtgccctattcttactttagccgcgacgtagccagaaaagtgaccggggaggtcacagatccatccggcaaagtgcacttcgctttactcggaacctgggacgaaaaaatggaatgcttcaaagtccaacctgtcatcggcgaaaacggaggcgacgcgcggcaaagggggcacgaggctgaggagagtagagtaatgttgtggaagcggaatcccctgcctaaaaacgccgagaatatgtattatttcagcgagctggctctcaccttaaatgcttgggaaagcggaaccgcaccgacagactctcgcttgcgcccagatcagaggcttatggagaatggtcgatgggacgaagccaacgctgaaaagcagcgcttagaggagaaacagaggctcagccgcaagaagcgggaggccgaggctatgaaagccaccgaagacggcaccccttacgacccatacaaggccctgtggttcgaaaggaaaaaggatcccgttaccaaggaactgacccatatctataggggagagtactgggaatgtaaggagaagcaggattggtcttcctgcccagacatcttctag

SEQ ID NO: 127555 - DNA, 2751 bp, synthetic construct
  misc_feature 1..2751: note = Description of Artificial Sequence: Synthetic coding sequence
  source 1..2751: mol_type = other DNA
atgggaaaggccgccgcacccagcaggggcggagggtgcggcggtaggtcgcgcggcctgtccagtttgttcacggtcgttccatgcctgtcttgccacacggctgctccaggcatgtccgccagtacttccgggagtggtcctgagccaaaaccccagcctcagccagttccagaacctgagcgaggacctctgtctgaacaagtctccgaggcagtgagcgaagccgtacccaggagcgagcctgtgtctgaaaccaccagtgagcctgagcccggcgccggacagcccagcgaactgctgcagggcagtaggcccggcagtgagtctagcagcggagtcggggcagggccttttaccaaggcggcaagcgagccactcagcagagccgtcggctcagcgacatttctgagacccgaaagcggctccttgcctgccctgaaaccactcccacttctacggccaggacaggcaaaaaccccattgggtgtgcccatgagcgggaccggcacaaccagctccgctcccctcgccctattacccctggactctttcgaggggtggttactgaagtggacgaattatttgaaaggataccaaagacggtggtttgtgctgggcaatgggctcctgtcttactatcgaaatcaaggggagatggcacatacttgcagaggaactatcaacctttccaccgctcatattgacacagaggatagctgtggcatattattgaccagtggcgcgagatcatatcacctgaaggcaagctccgaggtggatagacagcagtggattactgctcttgagctagccaaggctaaggccgttagggttatgaacactcattctgacgatagtggagacgacgacgaggcaactacgccagctgacaagtcagagctccaccacaccttgaagaatctctctcttaaattagacgatctctcaacctgcaatgatctgattgccaaacacggcgctgccctacagcgcagccttacagagcttgatggcctcaagattccttctgaaagtggcgagaaactgaaggtggtgaatgaaagagctactctctttcggataacatctaatgctatgatcaatgcatgtcgggacttcttagagctggctgagattcattcacgcaaatggcagagggccttgcagtacgagcaagagcagcgagtgcacttggaggagaccattgaacaactggccaagcagcacaactccttagaacgtgcatttcactccgctcccggcagacctgccaatccgagcaagtctttcatcgagggaagcttactgacccccaagggggaggacagcgaggaggacgaagacacagagtacttcgatgctatggaggacagcacatcatttattactgtaataactgaggccaaagaggactcccggaaagcagagggatccacgggcacatctagtgtagactggtcctctgccgacaacgtgctggacggagcctcacttgttcctaagggatcatccaaggtgaagcggagggtgcggatcccgaacaagcccaattacagtttaaacttgtggagcatcatgaaaaattgcatcggccgggagttgagtaggattcctatgcccgtaaattttaacgagcccctcagcatgcttcagaggttgaccgaagatctcgagtaccatcacttgttagacaaagccgttcattgcacaagctcagttgagcagatgtgcctggttgccgcatttagtgtgagctcctacagtactaccgtgcatcgcattgccaagcctttcaatccgatgctgggcgaaacttttgagttggatagacttgacgacatggggctaagatccttgtgtgaacaggtcagccatcacccccccagtgcagctcactatgtgttcagcaaacacgggtggagtctgtggcaggagattacaatatcgagtaagttccgaggcaaatacatcagtatcatgcccctgggggctatacacctagaattccaggcatccggaaatcactatgtctggcgaaaaagcacttccaccgtccacaatattatagtgggaaagctttggattgaccagtccggagatattgagattgtgaaccataaaaccaatgaccgctgccagttgaagttcctcccatatagttacttttccaaagaggccgcccggaaagtaaccggggtggtctctgatagccagggaaaagcgcactacgtactgagcggctcctgggacgagcagatggagtgcagcaaggtgatgcacagctcaccatcaagcccttcgagcgacggaaagcagaaaacagtgtatcagacactttctgctaagctactgtggaagaaataccctctgcccgaaaacgcagagaatatgtactacttttcagaactcgcactgacgctgaatgagcacgaagagggcgttgcccctaccgattcacgtctccgcccagaccagcggctgatggaaaagggaaggtgggacgaggctaacacggaaaagcaacgcctggaagagaaacaaaggctatctcgcagaagacgcctggaggcttgtggtcccggctcctcatgttcttcggaggaggaaaaagaggctgacgcctacaccccgctctggttcgaaaagcgccttgaccccctgaccggtgagatggcatgtgtctataagggcggctattgggaagcaaaggaaaagcaggactggcacatgtgtcctaacatcttttag

SEQ ID NO: 127556 - DNA, 2625 bp, synthetic construct
  misc_feature 1..2625: note = Description of Artificial Sequence: Synthetic coding sequence
  source 1..2625: mol_type = other DNA
atgggtaaggccgctgctccttcgcgaggtggaggatgtggagggcgcagccgcggactgtcctctctgtttacagtggtcccttgcctgtcctgtcatactgccgcacccggcatgtccgccagcaccagtgggagcggcccagagccgaagcctcaacctcagcccgttcctgagccagagcgcggccctctgtcagagcaagtgtctgaagccgtgtctgaggctgttccgcgcagtgagccagtgtcagaaacgacatccgaacctgaacccggcgccggccagcctagcgaactcctgcaggggtctcgtcccggctctgaatctagcagcggcgtgggggcaggaccgttcactaaagcagcttccgaacccctttcaagggcggttggctccgcaacgtttctgcggcctgaaagtggctcattacccgcattgaagcccctgcccctgctgaggccaggccaggccaaaacgccgctgggcgtccctatgtctggcaccggtaccacctcctctgcccccctggccctcctacctttggactccttcgaggggtggttgttaaagtggaccaactatttgaagggataccagcgaagatggtttgtgttaggtaatggtcttctgtcgtactaccggaaccagggggagatggcacatacttgcagggggacaattaacctgtccaccgcccacattgacacagaggatagctgtggcatccttttgacctccggggctaggtcttatcacttgaaggcctcttctgaagttgataggcaacagtggatcaccgccctagagctagccaaggccaaagcggtccgcgtcatgaatacccactctgacgattcaggtgatgacgatgaggctacaacccctgccgacaaatctgaattgcatcatactctgaagaacctgagccttaagttagacgacctgtctacgtgtaacgacctgatcgccaagcacggtgccgccttacaaaggtccctcacagagctggacggacttaaaatcccctctgagagcggggagaagcttaaggtcgttaatgagagggcaacccttttcagaattacgtcgaacgcgatgatcaacgcctgtagggactttctggagttagccgagatccatagcaggaagtggcagcgggcattacagtacgagcaggagcagagggtgcacctggaggagaccatcgagcaactggccaaacagcacaacagtcttgaacgcgctttccactctgcccccgggcgaccagcgaaccctagtaagtcctttatcgaggggtccctgctgactcccaagggcgaagactccgaggaggacgaggacacagagtattttgatgccatggaagactctacttctttcataactgtgatcaccgaggccaaggaagattcgcggaaggcagaggggtccaccggcacaagctcagtggattggtcttccgcagacaatgtgaacttcaatgagccgctgtcaatgttacagcgtctcacagaagacctagaataccatcaccttctggataaagctgtgcactgcacatctagcgtggaacagatgtgcctggtggccgccttctccgtgagcagctatagcacaacagtacaccggatcgccaaacccttcaaccctatgctgggtgagacttttgagcttgaccgacttgacgatatggggctgcggagcctgtgcgagcaggtatcgcaccaccctccctccgcagcacattacgttttcagcaaacatggttggagcttgtggcaagagattaccattagttcaaagtttaggggtaagtacataagtataatgccactcggcgccattcacctggaattccaagcgagcgggaatcactatgtatggcgaaagtccacctcaaccgtgcacaacatcatcgtcgggaagctgtggatagatcagtccggcgacatcgagattgtgaatcacaagaccaacgatcggtgccagttaaagttcttaccttacagctacttctccaaggaagctgcacggaaggtgactggcgtcgtgagcgacagccaggggaaggcacactatgttctgtccggcagctgggatgaacagatggaatgctcaaaagtgatgcatagtagcccgagcagtcccagtagcgacggaaagcagaaaacagtctaccaaacattgagtgcaaaattgctgtggaagaagtatcctctgcccgagaatgcagaaaatatgtactatttcagcgagctcgcactgaccctgaacgagcatgaagagggcgtggccccaacagactctaggttaaggccagatcaaagactaatggagaaagggcggtgggatgaggctaataccgagaaacagcgcctagaggagaaacaacggttgagcaggcgccggcgtctggaagcctgtgggcctggatcatcatgcagctcagaagagggggaagccggacgcgaaggccggcctggaggcgaggagcgaggagcacgcgtgggcgttccccagggaagaatccccggagagcaggcaacttccccaccgaccagccccctgtgcctccccagccgcgaaggaggaggatgcctgcatgccaccgtggtgtag

SEQ ID NO: 127557 - DNA, 2253 bp, synthetic construct
  misc_feature 1..2253: note = Description of Artificial Sequence: Synthetic coding sequence
  source 1..2253: mol_type = other DNA
atgcatcgtcagagaaccagaactatgtcctccctggccgctaagcgcctcggcatgaacaggaggcctgccggatctgggggtggaggcggggaggccgccacctgggggcataggttttggcggccccaggaaagacctactgatcgaaatcagggtgaaatggcacatacttgtcgtggcacgattaacctgtcaactgcacacatcgatactgaagattcctgtggaattctgctgacctccggtgcccggtcctaccatctgaaagcctcctctgaggtagatcggcagcagtggataacagctctggagcttgccaaggcaaaggcagttcgcgtaatgaacacccatagtgacgattcaggagacgatgacgaagctactactcccgccgacaagtctgagctgcatcataccctcaagaacctaagtctaaagctagatgacctctctacttgtaacgaccttatcgctaagcacggcgccgcgctgcagagaagcctcaccgagctggatggcttgaaaattccatcagagtctggagagaagctgaaggtagtgaacgagcgagcaactttgtttaggatcacgtcaaatgcaatgataaacgcgtgccgagattttctggagctggctgagatccatagtcgaaaatggcaacgagccttacaatacgagcaggaacagcgtgtgcacctggaggaaaccatcgagcagcttgctaagcagcacaacagtctagaaagagcctttcattctgctccgggccgccctgcaaatcctagcaagtctttcatagaggggtcactgctcaccccaaagggtgaagatagcgaagaggacgaggacaccgagtacttcgatgcaatggaggatagtacctctttcatcaccgtgatcaccgaggccaaggaagacagaaaagccgaggggtcaactgggacaagctctgttgattggagtagtgccgacaatgtgcttgatggagcatccctggtccccaagggttcaagtaaggttaaacgcagagtcagaatccctaataaacccaactattctctgaacctttggtcaataatgaagaactgcatcggccgggagctgtcaaggattccaatgccagtgaacttcaacgaaccccttagcatgctccagagattaaccgaggaccttgagtaccatcacctgctggataaggccgtgcattgcacctcttccgttgagcagatgtgcttggtggctgcgttctccgtaagcagctattccacaactgtccacaggatcgccaagcctttcaatccaatgctgggggaaactttcgaactggaccggcttgatgatatgggcctcaggtcattgtgtgaacaggtttctcatcatcccccgtctgccgcgcactacgtcttcagtaagcatgggtggtctttgtggcaagagattaccatatctagtaagtttcggggtaagtacattagcatcatgccccttggcgccattcacctcgagttccaggcaagcggaaaccattacgtgtggagaaagagcacatccaccgtgcataatatcattgtggggaaactgtggatcgaccaaagtggggacattgagatcgtgaaccacaagaccaatgatagatgtcagctgaaattcttgccctactcatacttttcgaaagaagccgcccgcaaggtaaccggtgtggtgtccgattcccaaggcaaagcgcactatgtgttgtctggatcttgggacgaacagatggaatgctccaaggtcatgcacagcagcccatcgtcaccatcatccgacggtaaacagaagactgtctaccaaaccctgtccgcaaagctactgtggaagaaataccccctgcctgagaatgccgagaacatgtactatttttctgaactggcactcacactaaatgagcacgaggaaggagttgcccccaccgactctcgcttacgaccagaccagcggctaatggagaagggccggtgggatgaggccaacaccgaaaagcagcggctcgaagagaaacaacgcctgtcacggagacgacgcctggaagcatgcggacccggctctagctgctcctccgaagaggaaaaagaagccgacgcttatacaccgttatggttcgagaaacgcctggatcctctcaccggcgaaatggcctgtgtgtacaaagggggttactgggaggccaaggagaagcaagactggcacatgtgccctaacatattctag

SEQ ID NO: 127558 - DNA, 1980 bp, synthetic construct
  misc_feature 1..1980: note = Description of Artificial Sequence: Synthetic coding sequence
  source 1..1980: mol_type = other DNA
atgaaaggacggggatgctgggatactgcttctgtccggtcattttgctcaagcggttgcctgaacaaatttaaaaaggacgactcaggggacgatgatgaggcaactactccagccgacaagtctgagctgcaccacacattgaagaacctatccctgaaactggacgatctcagtacgtgtaatgatctgatcgccaaacatggtgccgccctgcagagaagtctgaccgaactggacggcctcaagattccctccgaatccggagaaaagcttaaagtggtcaacgagcgtgccacactcttcaggattaccagcaacgccatgatcaacgcctgccgggacttcttagaactggctgagatccattcgaggaaatggcaacgggccctgcaatatgaacaggagcagcgagtgcacctcgaggaaacaatcgagcagctcgcaaagcagcataattcattggaacgcgcctttcattcagcacctggacgtccagcaaacccgtcaaagagcttcatcgaagggtccctgttgacaccgaaaggcgaagattctgaggaggatgaagacaccgagtattttgatgccatggaggattctacctcttttattaccgtgataactgaagccaaggaagacagcaggaaggccgaaggcagcaccgggacctccagcgtcgactggagcagcgctgataacgttctggatggggcttctttagttcccaaggggtcaagcaaagtcaaacgacgcgtgcgtattcctaacaagccaaattactctttgaatctgtggagcataatgaaaaattgcattggaagggaactttctagaatccctatgccagttaatttcaatgagccattatcaatgctgcagaggcttactgaggacctggaataccaccatctgttggataaggcagtccattgtacatcaagtgtggagcagatgtgcctggtggcagcgtttagcgtgagtagttattctacgaccgtccaccggatcgctaagccttttaatcccatgcttggtgagacatttgaactggaccggcttgatgatatgggtctgagatcattatgtgaacaggtaagccatcaccccccgtctgctgcacactatgtgttcagtaaacacgggtggagcctgtggcaggagatcacgatttcgagcaaattcagaggtaaatacatatccattatgccactgggcgcgattcacctagaatttcaggcatctggcaatcactacgtctggagaaagagtacctccacggtgcacaatatcatagtgggaaaactctggatcgatcagtcaggggatattgaaatcgtgaaccacaagaccaatgaccgatgccaactaaagtttctgccttactcttatttcagcaaggaagcggcgcgcaaagttaccggggtggtctcagattcccaaggaaaggcacattacgtgctcagcggctcatgggacgaacagatggagtgctccaaagtgatgcactccagcccatcttccccatcctctgacggcaaacagaagacggtgtaccagacactatcggccaaactgctgtggaagaagtaccctctgccagaaaacgccgagaacatgtattacttttccgagttggccctgactctgaatgagcatgaagagggcgttgccccaacagattccaggctgcggcccgaccagagattgatggagaaaggtcgctgggacgaggccaataccgagaagcaacggctggaagagaagcagcgcctcagtcgccgccgtcggctcgaagcatgtggcccagggagttcttgttcttcggaagaagcagagaaggaggccgacgcttacaccccactgtggttcgagaagaggctggatcctctgacaggtgaaatggcatgtgtctacaaagggggttactgggaggccaaggagaaacaggattggcacatgtgtcctaacatcttttag

SEQ ID NO: 127559 - DNA, 1383 bp, synthetic construct
  misc_feature 1..1383: note = Description of Artificial Sequence: Synthetic coding sequence
  source 1..1383: mol_type = other DNA
atggaggatagcacgagttttattaccgtgatcaccgaagcgaaggaagatcgaaaggcagagggaagtactgggacaagctccgtggactggagctccgccgataatgtgctggacggagcctctctggtccccaaaggctcatctaaggtcaaacgccgagtgaggattcccaacaaacctaattactccctcaacttgtggtccattatgaaaaattgcatcggcagggagttatcccgaattccaatgccagtgaattttaatgaaccactatctatgttacagagactgactgaggatctcgagtaccatcaccttctggataaggctgtccattgcacaagctcagttgaacagatgtgtttagtggctgcattctcagtgagcagttactcgacaaccgtgcaccggatagcaaagccattcaaccccatgctgggagagacatttgaactagaccgcctggacgacatgggtctgagaagcctctgcgagcaagtgagccaccatccaccctccgcagcccattacgtgttttcgaagcacggctggtctctatggcaagaaataactatcagctcgaagttcaggggcaaatacatttccatcatgccccttggcgcgatccacctcgaattccaggcatccggtaatcattatgtttggaggaagtctacctccactgtgcataatataatagtcggcaaactgtggatcgatcaatcaggggatatcgaaattgtaaaccataaaaccaatgataggtgtcaactgaaattccttccatacagttacttctccaaagaagctgcccgcaaggtgactggggtggtctcagacagccaaggcaaagcccactatgtgttgagtggaagctgggacgagcagatggaatgcagtaaggtgatgcactcctcaccctcttcccctagctccgatggtaagcaaaaaaccgtatatcagacactctcagctaagcttctgtggaagaagtacccgctgcccgaaaacgctgagaatatgtactacttttcggagttagctctcaccttaaatgagcatgaggaaggggtcgcccctactgacagccgtctgcgcccagaccaaagattgatggagaaagggcgatgggacgaagccaatacggagaagcagagactagaagagaagcagcgcttaagccgtcgcagaaggcttgaagcctgtgggccaggctcttcttgctcctccgaggaagaaaaggaagcagatgcctataccccattatggttcgagaagagactggacccactgacaggcgaaatggcctgtgtgtataaaggcggatactgggaagccaaagagaagcaggattggcacatgtgccctaacatattttag

SEQ ID NO: 127560 - DNA, 2295 bp, synthetic construct
  misc_feature 1..2295: note = Description of Artificial Sequence: Synthetic coding sequence
  source 1..2295: mol_type = other DNA
atggaaagggccgtccaaggtaccgatgggggagggggatcaaactctagctcaagatccagctctcgcgcaacctctgctggctcatcaccttcgtgcagcttggctggacggggagtgtcatctcgaagtgccgcagcaggtctggggggcggcgggtccaggtcatctcccggttctgttgcagcctctccctccggtggaggcggaaggaggcgagaaccggctctggaaggggtgctctccaagtacactaacctcctccagggttggcagaatcgttacttcgtcctagacttcgaagctggcatcctacagtacttcgtcaatgagcagagcaagcatcaaaaacctcggggggttctttccttgagcggagcaatagtttcactgtccgacgaggcccctcatatgctggtcgtttatagcgccaatggagagatgttcaagcttagggcagccgacgccaaggaaaaacagttttgggtgactcaactgagggcctgcgccaaatatcacatggagatgaacagtaaatccgccccttcatctcgcagccgttccctcacccttctccctcacggcactccaaattcggccagcccttgttcacaacgccatttatccgtgggcgctcccggggtggtgaccatcactcaccataagagtccggctgcagccagacgagccaaatcacaatacagcggacaactccatgaggtacgtgagatgatgaaccaagtagaaggacagcagaaaaatttggtgcacgctatcgagtctttgccaggctccgggcctctcactgctctggatcaagacctactcttattaaaagcaacatccgccgccactctttcttgcctgggtgaatgtctcaatttactgcagcagagcgttcaccaagccggccagcccagtcagaagcccggagcctcagaaaatatcctaggctggcatggatcaaagagtcattctaccgagcagcttaagaacgggactttaggctctctaccctcagcctccgctaatataacctgggccatcctgcccaacagcgccgaagacgagcagacttcacaaccggaaccagagccaaactctggcagcgagctcgtgctgtccgaggacgaaaaaagcgataatgaagataaagaggaaaccgagctcggtgtcatggaagatcaaaggtccatcatcctccatctgatctcccagctgaagctcggaatggatctaaccaaggtggtgctgcctacctttattctggagaaacggtccctgctggagatgtacgccgattttatggcccaccctgatctactcctggcgataacagctggcgcaacacctgaagagagggtcatttgctttgtggagtactatctcaccgcctttcacgagggtcgcaagggcgccttggccaaaaagccctacaaccctataatcggtgagaccttccattgttcttgggaggtccctaaagaccgcgtgaagcctaaaaggactgcctcgagatcgcccgcatcttgtcacgagcaccccatggctgatgacccttcaaaatcttacaagcttagatttgtggcggagcaggtgtcccaccacccacccatctcttgcttttactgcgagtgcgaagagaagcggttatgtgtgaatacacatgtgtggactaagtcaaagtttatgggaatgtcagtcggggtctccatgattggagaaggagttttgagactccttgagcacggggaggagtatgtgttcacactgccctccgcatatgctcggagtatcttgaccatcccttgggtggagctggggggtaaagtgtctatcaattgtgcaaaaaccggatatagcgctaccgtgatctttcacacaaagcctttttatggcggtaaggtccaccgagtcactgccgaagtaaagcacaatccaacaaacactatcgtctgcaaggcccatggagaatggaatggtacactggaatttacatataataacggagagaccaaggtcatcgacacaaccactttaccagtgtatcccaagaaaataagaccgctggaaaaacagggacccatggagtcacgtaacctctggagggaggtgacccggtatttgagactgggagatatcgatgcggcaaccgagcagaagcgccatctagaggagaagcagcgagtcgaggagcggaaaagagaaaacttacggaccccctggaagccgaagtacttcatacaggagggtgatggctgggtgtactttaatcctctttggaaagcacactag

SEQ ID NO: 127561 - DNA, 2103 bp, synthetic construct
  misc_feature 1..2103: note = Description of Artificial Sequence: Synthetic coding sequence
  source 1..2103: mol_type = other DNA
atggaaagagctgtccagggaacagacggcggaggcgggagcaattcgtccagtagatcaagtagtcgagcgacatcagcagggagctccccttcttgcagtcttgcagggaggggagtgagcagccgcagcgccgctgctggcctcggcggaggcggtagccgatcaagcccaggcagcgttgcggcaagtccaagcggaggaggtgggcggcgacgggaaccagccctagagggggtgctctcaaaatatactaatttactacagggatggcagaatagatactttgtgctcgatttcgaggccggcattctgcagtactttgtcaacgagcagagcaagcaccagaagccccgcggcgtgctgtctctgagcggagccatcgtttcactgtcagatgaggccccccatatgctggttgtgtactcagctaatggcgagatgttcaagctgcgggctgcagacgccaaagaaaaacagttctgggtcacacaattgagggcttgtgctaagtaccatatggaaatgaattcaaagatgatgaatcaagttgagggacaacagaaaaatctggtgcacgccatagagagccttcccggatccgggcccctgactgcactcgaccaggacctgcttctgttaaaggccacctcagctgcaaccttgtcctgtctgggggaatgtttgaatcttctgcagcagtctgttcaccaggccgggcagcccagccagaagcctggcgccagcgagaatattcttggttggcatggctccaagagtcattctaccgagcaactcaaaaatggaacgcttggctctctacctagcgcatcagctaatataacatgggcaatcctccccaatagtgccgaagatgagcagacttcacaaccagaacccgaacccaacagcggatctgaattggtcctctccgaggacgaaaagagtgacaatgaagacaaggaggaaaccgaactgggtgtcatggaagatcaaagaagcattatattgcaccttataagccagctgaagttgggcatggatctgacaaaagtggtcctcccgactttcatcctggagaaacggtccctgctagaaatgtatgcggattttatggcccacccagacctcctccttgccattactgcgggagcgacacctgaggagcgggtgatctgctttgtggagtactatcttactgcctttcacgagggtcggaaaggtgccctggccaagaagccttacaatcctatcataggagagaccttccactgtagctgggaggtccccaaagaccgcgttaagcctaaacgcaccgcgtcgagatccccagcatcttgccacgaacatcccatggctgatgaccccagcaagtcttataagctgcgctttgttgccgagcaggtgagccaccaccccccaataagctgtttctactgcgagtgtgaggagaagcgactctgtgtcaacacacacgtttggactaagagcaagttcatggggatgagcgtgggcgtgtcaatgataggcgaaggggtcctgcgactgctggaacacggcgaagagtatgtctttactctacctagcgcttacgcccggtctatcctgacgattccgtgggtcgagcttggcggaaaggtcagtattaactgcgcgaaaactggatacagtgcaactgtcattttccacacgaagccgttttatggaggcaaagtgcatcgtgttactgcagaggtgaaacacaatccaactaacaccatcgtgtgtaaagcccacggggagtggaacggaacattagagttcacatacaataacggggaaaccaaggttatcgacacaaccactctgcccgtgtatcctaagaaaatccggcctttggaaaagcaaggtcctatggaaagccgcaatctctggagagaagtcactcggtatcttcgtttgggcgatatagatgcggccacagaacagaagagacacctggaggaaaaacaaagagtggaggagaggaagagagagaatctccgtaccccgtggaaacccaaatacttcattcaggaaggagatggctgggtatattttaaccccttgtggaaagcacactag

SEQ ID NO: 127562 - DNA, 2244 bp, synthetic construct
  misc_feature 1..2244: note = Description of Artificial Sequence: Synthetic coding sequence
  source 1..2244: mol_type = other DNA
atgcagggcggggaaccagtgtctactatgaaggtgagcgaaagcgaaggcaaactcgaaggccaagccacagccgtgacacccaacaagaattcatcctgcggcggtgggatatcctcgagctccagcagcagagggggttccgcgaaaggctggcaatatagtgatcacatggagaacgtctatgggtatctgatgaaatatacgaatttagtcacgggctggcaatatcggttcttcgtcctaaacaatgaggccggtcttctcgaatactttgttaatgagcaatctcgaaatcaaaagccacgcggcaccctccagttagctggagccgtgatatctccatccgacgaagactctcatactttcactgtgaatgccgcgtcaggcgagcagtacaaactgcgcgctactgacgccaaggagcgccagcattgggtctcccggctgcagatatgcacccagcaccatacagaggcgatcggaaagaataacccccctctgaaaagcaggagcttttcactggcatcctcaagtaacagcccaatctctcagaggagaccttcacagaacgccattagtttttttaacgtaggccattcaaagctgcagtctctttccaagaggaccaacttacctcccgaccacctggtggaagtgagagagatgatgagtcacgccgaggggcaacagcgagacctgatacggaggatcgagtgcttgccaactagtggccatctgagcagcctcgaccaagacctgctcatgctgaaagcaacctccatggctacaatgaattgtctcaatgactgcttccacatcctgcaattgcagcacgcttcccatcagaaaggcagtctgccctcaggtaccaccatcgagtggttggagccgaaaatctccctgtccaaccactataaaaacggggccgaccagccatttgcaacagatcagtcaaagcccgtcgcggtgcctgaagagcaaccagttgccgaatctgggctgttggctcgtgaaccggaagagattaacgctgacgatgaaatcgaggacacttgcgaccacaaagaggacgacttaggtgccgtcgaggaacagagaagtgtcattctgcacctgctttcacagttaaagctgggcatggacctgactcgcgtggttctgcctacctttattttggagaaacggagcctcttggaaatgtacgcagattttatgtcacatcccgacctgtttatcgccatcaccaatggagctacggctgaggaccgcatgatccggttcgtggagtattatctcacttccttccacgaaggtaggaaaggagccattgccaagaagccttataatccgataatcggcgagactttccattgctcatggaaaatgccaaaaagcgaggtcgcctcctccgtcttcagctcttcttccacacaaggggttacaaatcacgcacctctgtccggggagagcctcacccaggtcggttccgattgttataccgtgaggttcgtggcagagcaggtaagtcaccatccacccgtgagtgggttctacgcagagtgtacagagcgaaaaatgtgcgtgaatgctcacgtatggacaaaatctaaatttctgggaatgtctatcggcgttaccatggttggcgagggaattctgtcccttctggagcacggagaggaatacaccttttcactcccctgtgcttacgccaggagcattctaactgtgccttgggttgagctgggcggaaaagttagtgtgaactgcgctaaaaccggatattctgcctccataacatttcacacgaaacctttttacggaggaaagttgcaccgagtaaccgcagaggtgaagcacaatatcaccaacacagtcgtctgtcgggtgcagggtgagtggaacagtgtactggagttcacttattcaaatggagaaaccaaatatgttgacttaacgaaactggcagttactaagaaacgtgtccggcctctggaaaagcaggaccccttcgaatctagacggctgtggaagaacgttaccgactctctgcgggaatccgaaattgacaaagcgacagagcacaagcatactctggaggagaggcaaagaacagaggaaaggcacaggaccgagacaggcacaccatggaagacaaagtactttatcaaggagggggatggttgggtgtaccacaagccactgtggaagatcattcccacaacacagcccgccgagtag

SEQ ID NO: 127563 - DNA, 2853 bp, synthetic construct
  misc_feature 1..2853: note = Description of Artificial Sequence: Synthetic coding sequence
  source 1..2853: mol_type = other DNA
atgaatactgaagctgaacagcaactgcttcaccacgcacggaacggcaacgccgaagaagtgcgacagttgctggagaccatggcacgcaatgaagttatcgccgacataaactgcaagggcagatccaagtccaatctgggctggacccccctgcatctcgcgtgttactttggacatcgccaggtagttcaagacctcctgaaagccggcgccgaggtaaatgtgttgaatgacatgggcgatacccccctgcaccgtgctgcctttacaggccggaaagaactcgtaatgctcctactagagtacaacgccgatactacaatagtgaacggttccgggcagacagccaaggaggtgacacatgctgaagaaatccgctcgatgctcgaggcagtagaaagaacacagcagcggaagctcgaggagctcctcctagcggcagctcgggaaggcaaaacgactgagctgaccgccctcctgaatcgccctaacccacctgatgttaattgctctgaccagctgggcaacacgccactgcattgcgctgcctaccgggcccacaagcagtgtgcccttaagttgctgaggtctggggcggaccctaacctaaaaaacaaaaacgaccaaaagccattagacctggcacagggtgcagagatgaagcatatcctggtcgggaataaagtgatctataaagcccttaaacgttacgagggtccactctggaagtcatctaggttctttggatggaggctgttctgggtggttctggaacatggcgtattgtcatggtatcggaagcagccagatgcagttcacaatatatatcgccaaggctgtaagcacctgacccaagccgtgtgcacagtgaaatccaccgatagttgcctgtttttcattaagtgctttgacgatacgatccacgggttccgcgtccccaagaactctctgcaacagagtcgggaggattggctcgaagcgatagaggagcacagcgcctactctacacattactgctctcaggatcagttgaccgacgaagaagaggaggacactgtaagtgccgccgacctgaagaagagtctggagaaggctcagagctgtcaacagcgccttgatcgggagatttcgaacttcttgaaaatgataaaagagtgcgacatggccaaggagatgctgccctccttcttgcagaaggtggaggtagttagcgaggcctcccgtgaaacatgcgtggccctaacagactgtctgaatctgtttaccaagcaagagggcgtcagaaatttcaaactggaacaggaacaagagaagaacaaaatactatctgaagccctcgagaccctggcgaccgagcatcacgaattggaacagagtcttgtgaagggaagccctcccgctagcattctaagcgaagacgagttttatgacgccttgtctgacagtgagtcagaacgcagcctgtctaggctggaagctgtcaccgccaggtcttttgaagaggagggcgaacatctgggcagtagaaaacataggatgtctgaggagaaagactgtggtgggggggacgcgctcagcaacggcattaagaaacaccgcacaagtctgccatccccaatgttctcccgtaacgatttttccatttggagtatccttcggaaatgtatcggaatggagttaagcaagatcactatgcccgtcatcttcaatgagcctctgtcttttctccagcgactcaccgagtacatggaacatacctaccttatccataaggcttcaagcctgtcagatcctgtggagcgcatgcaatgtgtagcagctttcgctgtgagcgcggtcgcctcccagtgggagcgaactgggaaaccctttaatcctctgcttggcgagacatacgagctggtgcgggacgatctcggatttagactgatcagtgagcaggtgtctcaccatccccccatctccgcatttcacgctgagggcttgaataatgactttatcttccacgggagcatctacccgaagttaaagttttggggcaagtcagtcgaagcagagcccaaaggcacaatcacgttggagcttctggaacacaacgaggcctatacgtggacgaatccaacatgttgcgtacataacatcatagtgggtaagctgtggattgagcaatacgggaatgttgagatcattaatcacaagacaggggataaatgtgtattgaattttaagccatgcggcttgttcggcaaggagctgcacaaagtggagggatacatacaggacaagtcaaagaaaaaactttgcgctctctatggtaagtggactgaatgcctgtattccgtggatccggccacattcgacgcatataaaaaaaatgataagaagaataccgaggaaaagaagaatagcaaacagatgagcacctctgaggaactggatgaaatgcctgtgcccgactcagaatctgttttcatcatacccggctctgtgttactttggagaattgctccccgtcctccaaattccgcccaaatgtataactttacgagtttcgcaatggtactcaacgaagttgataaagatatggaatccgtgatccccaagaccgattgccgtctgcgccccgacatccgggcaatggagaacggcgagattgaccaggcctcggaggaaaaaaaaaggctcgaagagaagcagcgagccgctcgtaagaatcggtcaaagtctgaggaggattggaaaacacgttggtttcaccagggacctaacccttataacggggctcaggattggatttatagcggctcttattgggaccggaattatttcaatctgccagatatttattag

SEQ ID NO: 127564 - DNA, 1707 bp, synthetic construct
  misc_feature 1..1707: note = Description of Artificial Sequence: Synthetic coding sequence
  source 1..1707: mol_type = other DNA
atgataaaggaatgcgacatggctaaggagatgctcccaagtttcctccagaaagtcgaagtggtgtccgaggcgagccgagagacctgcgtggcacttaccgactgtctcaacctcttcacgaaacaggagggtgtgcggaatttcaaactcgaacaggagcaggagaagaacaagatcttgtccgaagctctcgaaacattggcgacggaacatcatgagctagaacaaagcctcgtgaaggggagtccgccagcaagcattctgtccgaagatgagttttacgacgctctgtctgatagtgaatccgagcggtccctctccaggctggaggctgtgacggcccggtcattcgaggaggaaggcgagcatctaggctcacgcaaacatagaatgtcagaagagaaggactgcggcggaggagacgccctcagtaatggtattaagaaacacagaacaagcctcccttcccctatgttttctagaaatgacttctcaatatggtcaatattgaggaagtgtatcgggatggagctaagcaagataaccatgccggtgatcttcaacgagcccctgagttttctgcaacggcttaccgagtacatggagcacacctaccttatccacaaagctagcagccttagtgatcctgtcgaaaggatgcagtgcgtggcagctttcgctgtctctgctgttgccagccagtgggagcgcaccggcaaaccgttcaacccactgctgggcgaaacatacgagctggtgcgcgacgatctggggttccggctgatctctgaacaggtttctcaccatccacctattagtgcattccacgccgaaggccttaacaatgacttcatctttcatggtagcatttaccctaaacttaaattctggggcaagagcgtcgaagcggagcctaagggcaccatcaccctggagctgctggaacacaacgaagcatacacctggacgaatccgacctgctgcgtgcataacattattgtgggaaagctttggatcgagcagtacggaaacgtggagattatcaaccataaaactggcgacaagtgtgttctgaactttaagccctgtggactgtttgggaaagagctgcataaagtggaagggtatatccaggacaaaagtaaaaagaaactctgtgccctgtacgggaaatggacagaatgcctctacagcgttgacccagcaacattcgatgcctacaaaaaaaatgacaagaagaatacagaagaaaagaagaatagtaagcagatgtctaccagcgaggaactggatgaaatgcctgtccccgattccgaatccgtgttcattatacctggaagtgtgctactctggcggattgccccaaggcctccgaattccgcacagatgtataatttcacctccttcgctatggtactgaatgaggtggacaaagacatggaatcagtgattccaaaaacagactgccggcttcgcccagacatcagggctatggaaaacggagagatagaccaagccagcgaggagaagaaacggttagaagaaaagcagcgagcggccaggaagaacaggtccaagtccgaggaggactggaaaacaaggtggttccatcaaggacctaacccttataacggagcacaggactggatctattccggttcctactgggacaggaactactttaatctgcctgacatctactag

SEQ ID NO: 127565 - DNA, 303 bp, synthetic construct
  misc_feature 1..303: note = Description of Artificial Sequence: Synthetic coding sequence
  source 1..303: mol_type = other DNA
atgaatacggaagctgaacaacaactccttcaccacgcgcggaacgggaatgccgaggaggtgaggcaattgttagaaacgatggctcgcaatgaagtgattgccgacatcaactgcaagggcagatcaaagtcaaatctgggatggactcctctgcacctggcgtgctacttcggacatcgccaggttgtgcaagacctgctcaaggccggcgctgaagtcaacgtcctgaatgatatgggagacacccctctgcaccgcgccgctttcaccgggcgcaaaatctgttcccaaggcagttag

SEQ ID NO: 127566 - DNA, 1314 bp, synthetic construct
  misc_feature 1..1314: note = Description of Artificial Sequence: Synthetic coding sequence
  source 1..1314: mol_type = other DNA
atgagtgaagagaaagactgcggaggcggcgacgcattgtccaacggcattaaaaagcaccggacatccctgccttcaccaatgttttcacggaacgacttctccatttggagtatccttcgcaagtgcatcggcatggagctgtcaaagataactatgccagtgatctttaacgaacctttgtccttcctgcagcgactcaccgagtacatggagcacacatacctgatccacaaagcttcgtcattgagcgacccggttgagcggatgcagtgcgtcgctgccttcgcggtgagcgctgtggccagtcaatgggaaagaactggtaaaccattcaatccattgctgggggagacatacgaacttgtaagagacgatttagggttcaggcttatatcagagcaggtttcacaccacccgccaatctctgccttccacgccgaaggcttgaacaatgactttattttccacggcagtatttaccctaagttgaaattctgggggaagtcagtggaagcggaacctaaaggaaccataacgctcgagctgctcgagcacaatgaagcctacacatggaccaatccgacctgctgtgtgcacaatatcatcgtcggaaagctgtggattgaacaatatggcaatgtcgaaatcataaaccataagacaggggataaatgtgtgttgaacttcaaaccatgtggcctctttggaaaagagctgcataaagtagagggatacatccaggataagagtaaaaagaaactgtgcgccctgtacggcaagtggacagagtgcctctacagtgtggacccagcaacctttgacgcgtacaaaaagaatgacaagaagaacaccgaagagaaaaagaattctaagcagatgagcacatcagaggagttagacgagatgccagttcccgattccgaatctgtctttatcatacccgggtctgttctcctgtggagaattgctcccagaccaccaaactccgctcagatgtataatttcacatctttcgcaatggtgctgaacgaagttgacaaagacatggaatcagtgatccctaaaactgattgtcggctccgccccgacatccgggctatggaaaacggtgagatagatcaggcgtctgaggaaaagaaacggttggaggaaaaacagcgcgccgcacggaaaaaccgttcaaaatccgaagaggattggaagacacgctggttccaccaagggcctaatccctacaacggcgcacaggattggatctattctggttcttattgggacaggaattacttcaatctcccggatatctattag

SEQ ID NO: 127567 - DNA, 345 bp, synthetic construct
  misc_feature 1..345: note = Description of Artificial Sequence: Synthetic coding sequence
  source 1..345: mol_type = other DNA
atgcagtccgtggccgcattcgcagtgagcgccgtggcatctcagtgggagcggactggcaagccattcaacccccttctgggcgagacctacgagcttatcagggaagacctcggctttagattcatatcggagcaggtgagtcatcacccgcccatctccgcatttcactcagagggcctcaaccacgactttctgtttcacggcagtatctatcctaaactgaagttttggggcaaaagtgtggaggctgagccccggggcacaataacgctggaactcctcaacgtgaaccagaggcatctgagagccaagcacaaaagtccgaccaacgctggaaggtag

SEQ ID NO: 127568 - DNA, 1443 bp, synthetic construct
  misc_feature 1..1443: note = Description of Artificial Sequence: Synthetic coding sequence
  source 1..1443: mol_type = other DNA
atgaacggggaggaggagttctttgacgccgtcacaggcttcgactctgataacagcagcggagaattttccgaagctaatcagaaagtgaccggcatgatcgatctggacacatctaagaacaacaggatcggtaagaccggggagcgccccagccaggaaaatggcatccagaagcaccggacttctctccctgcccctatgttcagccgaagcgacttcagtgtgtggacaatcttgaaaaagtgtgtgggtctggagttgagtaagataaccatgcccatagcttttaacgaacccttaagtttcctgcagaggataacagagtatatggagcacgtctacttgatccatcgggccagctgtcagcctcagcccctggagagaatgcagtccgtcgctgccttcgccgtgtcagccgtggcgtctcagtgggagagaactggtaaacccttcaaccctctgctcggagagacatatgagctcattagggaagatctcggctttcgctttatcagcgaacaggtctctcaccatccaccaatatcagcttttcactctgaaggactgaatcacgatttcttatttcatggctcaatatatccgaagttgaagttctggggaaaatccgttgaggctgagccccgaggcaccataactctggaattgttgaagcacaacgaagcttacacatggacaaaccctacgtgctgtgtccataatgttattatcggcaaactgtggattgaacagtatgggaccgtggaaattcttaaccaccgcactggacataaatgcgttcttcacttcaagccatgtggattattcgggaaagagttacataaagtcgaagggcatatccaagacaaaaataaaaaaaagttgttcatgatttacggcaagtggaccgaatgtctctgggggatcgaccctgtctcatacgagagttttaaaaagcaggaacgtcgaggcgaccaccttcgtaaagccaagctagatgaagactctggaaaggcggatagcgacgtggccgacgatgtgcctgtcgcccaagagaccgtccaggtcattcctggaagcaagctcctgtggcggatcaacactagacccccgaactccgcccagatgtataatttcacgagcttcaccgtctctctcaacgaactggagaccgggatggagaaaacactccctcccactgattgtcggctgcgacctgacataagaggaatggaaaacggtaatatggacctggcttcccaggagaaggaaaggcttgaagaaaagcagagagaagctcggagagaacgtgccaaagaagaagcagagtggcaaaccagatggttctaccccggaaacaatccctataccggcacaccggattggctgtacgccggagactacttcgagcgaaacttttccgactgccctgacatctattag

SEQ ID NO: 127569 - DNA, 1407 bp, synthetic construct
  misc_feature 1..1407: note = Description of Artificial Sequence: Synthetic coding sequence
  source 1..1407: mol_type = other DNA
atgaacggcgaggaggagttctttgacgctgtgacagaggccaatcagaaggtgacggggatgatagacttggataccagcaaaaataatagaatcggcaagactggagagcggccatctcaagagaatggtattcaaaaacacaggactagcctgccggcaccgatgttcagccgttccgattttagcgtgtggactatcttaaaaaagtgtgttggcttagaattaagtaaaattaccatgccaatagctttcaatgagccactctcattcctccagcggatcacagaatacatggaacatgtttatttgatacatcgggccagctgccagccccaaccacttgagaggatgcaatctgtcgctgcattcgcagtctccgccgtggccagccaatgggagcgaaccgggaagccttttaatcccctattaggagagacgtacgagttaattagggaagacctaggtttccgattcatcagcgagcaggtctctcaccacccgcctatctcggcctttcatagcgaaggtctgaatcatgatttcctgttccacggcagcatctatccgaagctcaaattttggggcaagtccgtggaagccgaacccagaggaaccattactctggagctgctgaagcacaatgaggcatacacctggactaaccccacttgctgtgtccataatgttattataggaaaactgtggatcgagcagtacggcaccgtcgagatactgaatcatagaaccgggcacaagtgcgttctccatttcaagccgtgcggactgttcggcaaagagctgcacaaagtggaagggcatatccaggataaaaataagaaaaaactttttatgatttacggcaagtggacagaatgcttgtggggtattgatcctgtcagctacgagagttttaagaagcaggaaagacggggcgaccatctgagaaaggccaagttggacgaggattcaggcaaagcagatagtgatgtggcagatgatgtccctgttgcacaagaaaccgtacaggtgattcccggatctaaactattatggcggataaacacaaggccacccaattccgctcaaatgtacaatttcacaagttttactgtaagcttgaatgagctggagaccggcatggaaaaaacacttcctcctacagactgtcggctacgccccgacatcagggggatggagaatgggaacatggatctcgcctctcaggaaaaggagaggctcgaagagaagcagcgggaggctaggcgcgagagagctaaagaggaagcggagtggcaaacccgttggttttaccccggaaacaacccatacacaggcacgcccgactggctgtatgccggtgactacttcgaacggaatttctccgactgtccggatatctattag

SEQ ID NO: 127570 - DNA, 1113 bp, synthetic construct
  misc_feature 1..1113: note = Description of Artificial Sequence: Synthetic coding sequence
  source 1..1113: mol_type = other DNA
atgcccattgcattcaatgaacccctgagcttcctgcagcgtatcaccgaatacatggagcatgtgtatcttattcatcgcgcttcgtgccagccacagcctcttgagcgcatgcaaagtgtcgccgcattcgccgtcagtgctgtggcttcacagtgggaacgcaccggtaagccctttaacccattactgggagaaacatatgaactgatccgcgaggatctcgggtttcggtttatatccgagcaggtcagccatcatccccccatcagcgcctttcactccgaggggctgaaccacgattttttgtttcatgggtctatatatcccaagctcaaattctgggggaaaagtgtagaggccgagcctcgtggaacgattactctggaactgctgaagcacaacgaggcttatacatggacaaatcccacttgttgcgtccacaatgtcatcatcggcaagctgtggatcgaacagtatggcactgtcgagatcttgaatcacaggaccggccacaagtgcgtgctacacttcaagccttgcggactcttcggtaaggagcttcacaaagttgagggacacattcaagataagaacaagaaaaagctcttcatgatttatggcaaatggaccgagtgtctctggggcatcgatcccgtcagctacgaatctttcaagaagcaggaacgacgcggcgaccacctgcgaaaggcaaagctggatgaggactctggtaaggccgactctgacgtagctgacgacgtgccagtagcccaggagactgtgcaggtaatcccgggatctaaacttctgtggcggataaacaccagaccaccaaatagcgctcagatttggcccgcaaggcgtagaagcggatggaggcgttcacgggaaaagcacggcgggtccggtcctaggcgtagacagtccggtaggcgcggcggatccactcaggccatcacccccactttgggccctcccacagggtgtatgcaggggattaccctcagcggcatctcaccaaccgcccagataagtactgaaggtcttgagggccctggcgctcgggatcgccgtctcacacgcctggacttcctagaatggcctctttag

SEQ ID NO: 127571 - DNA, 339 bp, synthetic construct
  misc_feature 1..339: note = Description of Artificial Sequence: Synthetic coding sequence
  source 1..339: mol_type = other DNA
agcgtagcagcttttgcggtgtccgctgtggcatcacagtgggagcgtaccggtaagccatttaaccccctcctcggagagacctatgagttgatccgcgaggatctgggcttccggtttatctcagagcaggtcagccatcatcctccgatcagcgcgttccatagcgagggtctgaaccacgatttcctgtttcacggcagcatttatcccaaattaaagttctgggggaagagcgtggaggctgagccaaggggtacaatcactttagaacttctgaacgtcaaccaaaggcacttgcgagcgaagcacaagtctccaacgaacgctgggaggtag

SEQ ID NO: 127572 - DNA, 2664 bp, synthetic construct
  misc_feature 1..2664: note = Description of Artificial Sequence: Synthetic coding sequence
  source 1..2664: mol_type = other DNA
atgatgtcagacgagaaaaatctgggtgtgtctcagaagcttgtatctccctccagaagcacttcttcttgttcgagcaaacagggttcaagacaggactcctgggaagtagtggaagggttgaggggagaaatgaactacactcaggagccgcccgtccagaagggatttctgctcaagaagcgcaagtggcctttgaaaggctggcacaagcggttcttttaccttgacaagggaatactgaagtatgccaagtcccagaccgacattgaacgggagaagctgcatggctgtatcgatgttggactgagcgtgatgagcgtgaagaagtcctccaaatgcatcgatcttgacaccgaagaacacatatatcacctgaaagtaaagagcgaagaagtgttcgacgagtgggtgtctaagctcaggcatcacagaatgtataggcagaatgagatagctatgtttccacacgaggtcaatcactttttctcgggttccacaataactgatagtagctcaggggtattcgatagcattagcagtcggaagagatcctccatttctaagcagaatctgtttcagactggctctaacgtgtctttctcttgcggcggagagactcgcgttcctttatggctgcagagctctgaggacatggaaaagtgttccaaggatctggcgcactgtcatgcttaccttgtggagatgtcccagctattgcaaagtatggacgtgctgcatcggacctattcagcccctgctatcaatgcaatacaaggaggttccttcgaaagtcctaagaaggagaagagatcacaccgccggtggcggtcccgtgccattggaaaagatgctaagggcaccctgcaggtgcccaaaccgttttccgggccagtcagactgcatagctcaaatccaaatctctctaccctggactttggcgaggaaaagaattattccgatggaagcgaaacgtcctccgaattctctaaaatgcaggaggatctgtgccacatcgcacataaggtgtacttcacgttaagatcagcattcaatataatgtcagccgaacgcgagaagctgaaacaactgatggaacaagacgcctctagctcaccttcggcccaggtgattggtctgaagaacgctctgagcagcgcactggctcagaacaccgatctgaaggaacggctgcgccgaattcacgctgagagcctgctgctggattccccggccgtcgctaaatcaggtgataacctggccgaggagaactctagggacgagaaccgggccctggtgcatcagctttctaacgagtctcgcttgtcgatcactgactctttaagtgagttttttgatgctcaggaagtgcttctgagtccttcctccagcgagaatgagatttccgacgacgattcatatgtatccgatatctccgacaatctcagtttagacaatctgtcaaatgacctggacaatgagcgccagacattgggacctgtgctggattccgggagggaagctaagagtcggagaagaacctgccttccagccccttgcccgtcaagtagcaatatttcattgtggaatatactgcggaacaacataggcaaggacctaagcaaagtcgcaatgccagtggaactcaacgaaccccttaatacattgcagcgtctctgcgaagaactggagtacagcgaactgctggacaaagcggcccagattccatcgccactggagcggatggtatatgtggctgcctttgcaataagtgcttatgcctcctcttactacagggccgggagtaaaccgttcaacccagtcttgggagaaacctacgaatgtatcagagaagacaaagggtttcagttcttctctgaacaggtgagtcaccaccccccaatctcagcttgtcatgcggagagccggaattttgtgttctggcaagacgtccgttggaagaacaaattttggggtaaaagcatggaaattgtgcccattggaacaactcatgtcaccctgcctgtatttggggatcacttcgaatggaataaggtgacatcttgcatccacaacattcttagcggtcaaaggtggatcgagcactatggcgagatcgtcatcaagaatctgcacgatgattcctgttattgtaaggtgaatttcataaaagctaagtattggtctaccaatgctcacgagattgaaggtactgtgttcgatcggtccggaaaggcagtgcatagattgtttgggaaatggcacgagagcatatactgcggaggcgggtcatcctcagcctgcgtctggagagctaaccctatgcctaaaggctatgagcagtactattcgtttacccagtttgctttggagctaaacgagatggacccctcctctaaaagcctccttccccccacagacacgcggttcagacctgaccagcgctttctagaagaaggaaacctggaggaagccgagattcagaaacagaggatcgaacaactgcagcgcgaacggcgcagagtcctagaagaaaatcacgtcgagcaccagccgcgctttttccgcaaaagcgatgacgacagttgggtgtcaaatggcacttacctggagttgaggaaggacctggggttcagtaaactcgatcatccggtgctgtggtag

SEQ ID NO: 127573 - DNA, 2571 bp, synthetic construct
  misc_feature 1..2571: note = Description of Artificial Sequence: Synthetic coding sequence
  source 1..2571: mol_type = other DNA
atgatgagtgatgaaaaaaacctcggagtgtcccagaagttagtcagcccttccaggtctaccagctcctgttccagtaagcagggtagcaggcaggattcgtgggaagtggtggagggcctgaggggggaaatgaactacactcaagagccaccagtccagaaggggttccttctgaagaagaggaagtggcctctcaaagggtggcataaaagatttttctatctggacaaaggcatactgaagtacgccaaaagccagaccgatatcgagcgcgagaagctccacgggtgtattgatgtagggctgagcgtaatgtctgtcaagaagtcatccaagtgtatcgacctggacacggaggagcatatataccatctgaaagtgaagagcgaggaagtgttcgatgagtgggtgagtaaactgcgtcaccatcggatgtatcgccagaatgagattgctatgttccctcatgaagtgaatcattttttcagcgggtccaccatcaccgactccagcagtggcgtgttcgacagtatctcttctcggaagcgttcaagcatctctaagcagaatctgtttcaaacaggcagtaacgtgtctttttcttgtggtggcgagacgcgggtacccctgtggctgcagtcttcggaagatatggagaagtgcagcaaggatctggcacattgccacgcatacctagtcgagatgtcccagctgctgcagtccatggacgtgttgcacaggacttactcggcccccgccataaatgcaattcaggttcccaagcctttttcaggccctgtgagactgcacagcagtaacccaaatctgtccaccttagactttggtgaggagaaaaactactctgacggttcggagacaagcagcgagttctccaagatgcaggaagacctgtgccatatcgcacacaaagtatacttcacattgagatccgcttttaatatcatgtctgcagagcgggaaaagctcaagcaattgatggaacaggatgctagctcttcaccctccgcccaagtgataggcctgaaaaacgccttaagtagcgctctggctcagaatactgacctgaaagagaggctgaggcggatacatgccgagagcttgctactggacagccccgccgtcgccaagtccggagataatctggctgaagaaaacagtagagatgagaaccgggctttggtgcaccagttgagcaacgaaagtaggctgtctattactgattccctatctgagtttttcgatgcacaggaggtgcttctcagcccctcctcttctgagaacgagatctccgacgacgacagttatgtgtcggatatctccgacaatctgtcactggacaacttgtcaaacgacctcgataatgagagacagactcttggaccagtcctcgatagtggacgagaggccaaatcccgtaggcgcacgtgtctgcccgcaccctgtccctcatcgtccaacatcagtctgtggaacatcctgagaaataacatcggcaaagacttaagtaaggttgcaatgcccgtggaactgaacgaacccctcaacacgctccagagactgtgcgaagaactagagtattctgagctgctggacaaagccgcgcagatcccttcgccccttgagcgtatggtttatgtggccgcttttgccatctctgcctacgccagcagttattatcgcgctggatcgaaaccctttaatcctgtactcggtgagacctacgagtgcataagggaggataagggtttccagtttttctctgagcaagtgagtcaccacccgccgatcagcgcctgccatgccgaatccagaaactttgtattttggcaggatgtacggtggaagaacaagttctggggtaagagtatggagatcgttccaattggaaccactcacgttaccctccccgttttcggggaccatttcgagtggaataaggtgactagctgcatccataacatcctgagtggccagagatggattgaacactacggggagatcgtgatcaagaatctacacgatgactcttgttactgtaaagtgaatttcatcaaggccaagtactggagcacgaacgcacacgagatcgaggggaccgttttcgaccggtctggcaaggccgtccaccgcctctttggcaaatggcacgagtcaatctactgcggggggggctccagctcagcgtgcgtctggcgagctaacccaatgcctaagggctatgagcaatactattcctttacccaattcgctctggagctgaacgagatggatccatcctcaaagagtctcctgccgcccaccgacactaggttcaggccagatcagaggttcctggaagaaggcaacctggaagaagctgaaattcagaagcaacgaattgagcaactgcagagggagagacgacgcgttttagaggaaaaccacgtggagcaccagcccagatttttccgaaagagtgacgacgatagttgggtgagcaatggaacctacttggagctgagaaaagaccttggctttagcaaactcgaccatcctgtcttgtggtag

SEQ ID NO: 127574 - DNA, 2556 bp, synthetic construct
  misc_feature 1..2556: note = Description of Artificial Sequence: Synthetic coding sequence
  source 1..2556: mol_type = other DNA
atgatgtcagacgagaaaaatctgggcgtgagtcagaagctcgtgtcgccaagccggagcactagctcttgctcttctaagcaaggttcccgccaagattcctgggaggtggttgaaggactgcgcggggaaatgaactatactcaggaacctccagtccagaaaggtttcctgctgaagaaacgtaagtggcccttaaaagggtggcacaagcgatttttttacctggacaagggcattttaaaatacgccaaaagccagaccgacattgagagagagaaactgcatggctgcatcgatgtgggcctgagcgttatgtccgttaaaaagtcttccaagtgtattgacctcgataccgaggagcacatttaccatcttaaagtgaaatcggaggaggtctttgacgagtgggtctcaaaactgagacaccaccgtatgtaccgacagaacgagatcgcaatgttccctcacgaagttaaccactttttctctggatcgacaattaccgatagtagcagcggtgtgtttgactcaatctccagtagaaaaagatcaagcatctcaaagcaaaacctatttcagactggaagcaatgtgtccttcagctgcgggggcgaaacccgcgtgcctctatggctgcagagctctgaggacatggagaagtgtagcaaggaccttgcacattgccacgcttatctcgtggaaatgtctcagctgcttcaatctatggatgtgctgcaccgcacctattctgcacccgcgataaacgctatccagggaggttcgtttgaaagtccaaagaaggagaaacgcagtcaccggagatggcggagtcgagcgataggcaaagatgccaaaggtaccttgcaggtgccaaaacctttcagcggccccgtgaggcttcacagttcaaacccaaacttgtcaacgctggattttggagaagaaaagaactattctgacggcagtgaaacttctagtgagttttcaaaaatgcaggaggacctttgtcatatcgcccataaagtgtactttactctgcgctccgccttcaacatcatgtccgccgaaagagagaagctaaaacagttgatggaacaggatgcaagttcttccccgtccgcccaagttattggactgaaaaatgccctaagctctgagaatagccgggacgagaatagggccctggttcaccaacttagtaatgaatcacgactatccattacagatagtctatctgaattctttgatgcccaggaggtactgttgtctccttcaagctccgagaacgaaatttctgatgacgactcatatgtcagcgatatcagcgataaccttagcctggacaatctttcgaacgatttggacaatgagcggcagactttaggtcccgtactggacagcggtagagaggccaagagtcgaagaaggacatgcctgcctgctccatgcccgtcgagctcgaacatcagtctgtggaatattttgaggaacaacataggaaaagacctttctaaggtcgcaatgccggtcgagctgaacgagcctctgaacacattacagagactgtgcgaagagctagagtatagcgagctgttagataaagccgcccagattcccagtcctctggaaaggatggtctatgtggcagcttttgcgatctccgcatatgcctcaagttattacagagccggctccaagccgttcaatcccgtcctgggagaaacatatgagtgtattcgagaggataaagggttccagttcttctccgagcaggttagtcatcaccctcccattagcgcctgccatgctgaatccaggaactttgtgttttggcaggatgtcaggtggaaaaataaattctggggaaagagcatggagattgtgccaatcggaaccacacacgtgactctgccggtcttcggcgaccactttgagtggaataaggttaccagctgcatccacaatatcctgtcagggcagcgttggatagagcattacggcgagattgtaataaagaacctgcatgatgatagctgttattgtaaagtgaacttcatcaaagctaaatactggagcaccaatgcccacgagatcgagggtaccgtttttgataggagtggcaaagccgtgcatcgtctctttggaaaatggcatgaaagtatctactgtgggggtggttcttcatccgcctgtgtctggcgcgcaaatcctatgccaaaggggtacgagcagtactatagcttcacacagtttgcactagagctcaatgagatggatccctcctcaaaaagtctcctccccccaaccgatactagatttaggcctgaccagaggttcctcgaagagggcaatctggaagaggctgagatacaaaagcagcgcattgagcaactgcaacgagagcggcgccgggtcctggaagagaaccatgtcgagcatcagccacgctttttccggaaatccgatgatgactcctgggtgtcaaatggaacctacctcgagctaagaaaggacctcggcttcagtaagttggaccaccccgtgctgtggtag

SEQ ID NO: 127575 - DNA, 2556 bp, synthetic construct
  misc_feature 1..2556: note = Description of Artificial Sequence: Synthetic coding sequence
  source 1..2556: mol_type = other DNA
atgatgtccgatgagaagaaccttggcgtgagccagaaactggttagtcccagccgaagtactagcagttgctcaagtaagcagggttcccgccaagatagctgggaggtggtggaaggcctcaggggagagatgaattacactcaggaaccacccgtccaaaaagggttcctccttaagaaaaggaaatggccactgaaggggtggcataagcggtttttttacttagataaaggcatactgaaatacgctaaatcccaaacagatatcgagcgagaaaaactgcacgggtgcatcgacgtgggtctaagcgtgatgtctgtgaagaagtcctcaaaatgcatagacctagacactgaggaacacatctaccacctgaaagtaaaatctgaggaagtgttcgacgaatgggttagtaaactaaggcatcatcggatgtataggcaaaatgagatagccatgtttccccacgaggttaatcattttttctccggctcaacaattactgattcatccagtggagtgtttgacagcatttcgtcccgcaaaaggtcaagtatctccaaacaaaatttgtttcagacaggctctaacgtgagcttctcctgcggtggtgagacacgggtgccactgtggctgcagtcaagcgaggatatggaaaagtgtagtaaagaccttgcacactgccacgcctatctcgtggaaatgagtcaattactgcaaagtatggacgtgctgcaccgcacatattctgccccggctatcaacgcaattcagggaggaagctttgagtcaccaaagaaggagaaacgcagccaccgcagatggcgatctagagctattgggaaggacgctaagggaacactccaggttcccaagcccttctccggccccgtccgattgcattcaagcaacccaaacttgtctaccctggatttcggtgaggagaagaattatagcgacggctcagagacctcatcagaattctccaagatgcaggaagacctctgtcacattgcacacaaagtgtactttaccttaagaagcgcctttaacatcatgagtgctgaaagggaaaaactcaaacagctgatggagcaggacgcctcttcttcgccttctgcacaagtgatcggtttgaagaatgccttgtcctccgagaacagccgggatgaaaaccgagccctggtacaccagttatctaacgagtctcggctctccatcacagactccttgtccgagtttttcgacgcccaggaggtgctactaagccccagcagctctgaaaacgagattagcgacgatgatagctacgttagtgacatttccgataacctttcacttgacaatctctcgaatgacttagataatgagagacagaccttgggccccgtattagatagcggacgggaggctaagagccggcgacgcacctgcctacccgctccgtgcccaagttcatccaatatctctttgtggaacattttacgaaacaatattggcaaagacctgagtaaggtggcaatgccagtggagctgaatgaaccgctgaatacactccagagactctgcgaggaactggagtattccgagttgcttgataaggctgctcagattcccagccccctggaaagaatggtgtacgtggccgccttcgcaatctccgcatacgccagcagttactacagggcgggttctaaaccgttcaatccagtcctcggcgaaacctatgaatgcattcgtgaggataaaggtttccaattcttctcagagcaggtctcacatcacccccccatctcagcctgccatgccgagtcacgcaacttcgttttctggcaagatgtgagatggaagaacaagttttggggcaagagtatggaaattgtgccaatcggaactactcacgtgacactccctgttttcggcgatcatttcgaatggaacaaagtgacatcatgtattcacaacatactttcagggcagagatggattgagcactacggagagatagtcatcaagaatttacatgacgactcatgctattgcaaagtgaacttcatcaaagcaaaatattggagcaccaacgctcacgaaatcgagggcaccgtttttgacagatctgggaaagccgtacacagactctttggcaagtggcatgaaagcatctattgtggcggagggagctcttctgcatgtgtgtggagagccaatccaatgcccaaagggtatgagcaatattattcattcactcagtttgccctggagcttaacgaaatggacccgtccagtaaatcactgctgcctcctacagatactaggttccgccctgaccagcgattcctggaggagggcaatctcgaagaagctgaaatccagaaacaacggatagagcagctccagcgagagcgaaggagagtactggaggaaaaccacgtcgaacaccaacctcgctttttccggaaaagcgatgacgatagctgggtgagcaacggtacctatctcgagcttaggaaagacctcgggttcagtaaactcgaccacccagtgctctggtag

SEQ ID NO: 127576 - DNA, 2571 bp, synthetic construct
  misc_feature 1..2571: note = Description of Artificial Sequence: Synthetic coding sequence
  source 1..2571: mol_type = other DNA
atgatgtctgacgagaaaaacctgggcgtctctcaaaagttagtctccccgagcagatctacctcttcatgctcttccaagcaaggctctaggcaggattcttgggaggtggtggaaggactccggggggagatgaactacacacaggagcctcctgtgcagaagggattcctgttaaaaaagcggaaatggcctctaaagggctggcacaaacgattcttttacctggataagggcattctgaagtacgccaagtcccaaacggacatcgaaagggaaaagctgcatggatgcatcgatgtgggcctctcggtcatgagcgtgaagaaatcctccaagtgcatcgatctcgataccgaggagcacatttaccatctcaaagtgaaaagcgaagaagtctttgacgagtgggtgagcaagctgaggcaccaccggatgtatcgtcagaatgagattgctatgttccctcacgaggtgaatcatttttttagcggcagcactattaccgactcttccagcggcgtgttcgacagtatttcctctcgaaaaaggagctccattagcaaacagaacctgtttcagaccggatccaatgtgtccttttcatgcggtggcgagacgcgggttcctctgtggctccagtcctcggaagacatggagaagtgttctaaggacctggcccactgccacgcatatctagtggagatgtcacagcttcttcaatctatggatgtcctgcacagaacctatagcgccccagccatcaacgccattcaggtcccaaagcccttcagtggtccagtgagattgcattcttccaacccgaatctaagtacactggatttcggggaggaaaagaactactcagacgggagtgaaacctcgagcgagttcagcaaaatgcaggaggatctttgccatatcgcccacaaggtttactttacccttcgatcagccttcaatatcatgtcagcagagagagagaagctaaaacaactgatggagcaggatgcctccagtagtcccagcgcacaggtcattgggctgaaaaacgctctgagctctgccctggcccagaacaccgatctgaaagaacggcttcggcgcatccatgccgaatctttgctcctggacagcccagcagtggctaagagcggcgataatctggccgaagagaattcacgcgacgaaaatagagcactggtccatcaattatctaacgagagtcgtctctcaattaccgacagcctcagtgaattcttcgacgcccaagaagtattgttgagccccagtagttcagagaacgagatttcagacgatgattcctatgtgtccgatatcagtgataatctttccctcgataacctttccaatgatttggacaacgagcgccaaactcttggtccagtgctggatagcggccgggaagcaaagtccaggcggaggacctgcttgcctgctccatgcccctcatctagcaatattagcctttggaacatcctgcggaataacattggaaaagatctgagtaaagttgccatgcccgtcgaactgaacgaacccctaaacacattacaaagactgtgcgaggagctggaatacagcgaactgcttgataaggcagcacaaattcccagtccattggagcgtatggtgtacgtggccgcttttgccatctccgcatacgcctcttcttactaccgggctggatccaagcctttcaatcccgtcctcggggaaacttatgagtgcatcagagaagataaagggttccaattcttctctgaacaggtgagccatcatccacctattagcgcgtgtcacgcggaatcccgcaacttcgttttctggcaggacgtcaggtggaaaaacaagttctggggcaagtcaatggaaatcgtcccaattggcaccacccatgtgacactccccgtgtttggagaccatttcgagtggaataaagtaacctcttgcattcacaatatattgtctggccagcggtggatcgagcactacggggaaattgtcatcaaaaatttgcatgacgacagttgctattgtaaggtcaactttataaaggccaagtactggagcaccaacgctcatgagattgaggggacggtgttcgatcgctctggtaaagccgtgcataggttgttcgggaaatggcatgaaagcatctattgcgggggcggctcttcttccgcctgcgtttggcgcgccaaccccatgccgaaaggctatgaacaatactacagcttcacccaattcgcccttgaacttaacgaaatggaccccagttccaagtctctgctgcctcccaccgacactaggtttaggccagatcaacgctttctagaagaggggaacttggaagaagctgagattcagaaacaacgcatcgagcagctgcagcgcgaacggcgacgggtcctcgaggaaaaccacgtggagcatcaacccaggttctttaggaagagcgacgatgacagctgggtgtccaacggcacttacctggaattacggaaggacttaggcttttccaagttggaccacccggtgctgtggtag

SEQ ID NO: 127577 - DNA, 2463 bp, synthetic construct
  misc_feature 1..2463: note = Description of Artificial Sequence: Synthetic coding sequence
  source 1..2463: mol_type = other DNA
atgatgtctgatgagaagaacctgggcgtgagtcagaaattggtgagcccctcacggtccacctcttcatgttctagcaaacagggctcaagacaggattcctgggaggtcgtcgagggcctgcggggtgagatgaattatacccaggagccccctgtgcagaagggttttttattgaagaaacggaagtggcctctgaagggctggcataaaagatttttttacctggacaagggaattttaaaatacgccaagtcgcagaccgatattgaaagggaaaaactgcacggctgcatcgacgtggggctgtccgtgatgtcggttaaaaaatcatccaaatgcattgacctggataccgaggaacatatctaccaccttaaagttaagagcgaggaggtgttcgatgagtgggtgagtaaattacgacaccacaggatgtataggcagaatgagatcgccatgtttccacacgaagtgaaccacttcttttccggtagcaccattaccgacagcagttccggagtattcgactctatttcttctcgcaagagaagctccatctctaagcagaatctcttccaaaccggctccaacgtctccttctcatgtgggggcgagaccagagttcctttatggctgcagtcgagtgaagatatggagaaatgctcaaaggatttggcccattgccatgcctacctcgtcgaaatgtcccagcttttgcagtccatggacgttttacaccgtacctattcagcccccgctattaatgctatccaggtccctaagcccttttctggccccgtcaggctgcattcctctaaccccaacttgtctaccctggacttcggcgaggagaagaactacagcgacgggagcgaaacttcaagtgagttctctaaaatgcaagaggatctgtgccacatcgcccacaaagtgtacttcaccctacgctccgcttttaacattatgagcgcagagagagagaaactgaagcagctgatggagcaggatgccagcagcagcccgagtgctcaggtgattggattgaaaaacgccctgagctccgagaacagtcgtgacgagaacagggctctcgtacatcagttgtcaaacgagtctaggctgagtataacggattccctcagcgagttcttcgatgcccaggaggtgttacttagtccatctagttcggagaatgaaattagcgacgacgactcatacgtgagcgatattagtgacaatctgtccctagataatctatccaatgaccttgacaacgaacggcagaccctgggccccgtcctggactccggccgagaagccaaaagccgccgccgaacctgtctgccggcaccttgcccctcctcctcaaacatttccctgtggaacattctgagaaataatattggaaaagatctgtccaaggtcgccatgccagtagaattgaacgagcctctgaacactctacagcgcttgtgtgaggaattagagtattctgagcttttagataaagctgcccagataccctctccccttgagcgcatggtctacgtcgctgctttcgccatctccgcttacgcttcctcctactacagggcaggcagcaaaccctttaaccctgtcctcggcgagacttacgagtgcatcagggaagacaagggcttccaattcttctcagagcaggtttctcaccacccacccatatcagcttgccatgccgaatcacgcaactttgtcttttggcaggacgtgaggtggaagaataagttctgggggaagtcgatggaaatcgttccaatcggaactacacacgtgactctccccgtatttggagatcacttcgaatggaataaggtgaccagttgcatccacaatatcctgtcgggtcaaaggtggatcgagcattatggtgagatagtcatcaagaacttgcatgatgacagttgctattgtaaagtgaactttatcaaagcgaaatactggtctacgaatgcgcatgaaatcgagggtaccgttttcgacagatcgggcaaggccgtccatcgtctcttcgggaagtggcacgaatctatttattgtggaggggggagttctagtgcttgtgtgtggcgggcgaaccctatgccaaaggggtacgagcagtattactctttcacacagttcgccctggaacttaacgaaatggaccccagcagtaagagtctcctcccaccgacggatacaagatttagacccgaccagcgcttcctggaggaaggcaacctggaggaggcggagatccaaaagcagcgcattgaacaactccagagagagaggcggcgggtccttgaggagaatcacgtggagcaccagccccgcttttttcgaaagtccgatgacgatagttgggtgtctaatggcacttacttagagctgaggaaggacttgggcttttccaaactcgaccatcccgttctctggtag

SEQ ID NO: 127578 - DNA, 339 bp, synthetic construct
  misc_feature 1..339: note = Description of Artificial Sequence: Synthetic coding sequence
  source 1..339: mol_type = other DNA
atgatgagtgacgaaaagaatctgggagtgtctcaaaaactggtctctccttctcggtcaacgtccagctgctcatcaaagcagggttcccggcaagacagctgggaggtggttgaaggattacgaggggagatgaattacactcaagagccgcccgtgcaaaaaggatttctcttgaagaaacggaagtggccactcaaagggtggcacaagcggtttttttaccttgataaggggatcctgaaatacgctaaaagccaaaccgacattgaaagagagaaattgcacggctgcatagacgtcggtttgtctgtaatgagcgtgaaaaagtcttcctag

SEQ ID NO: 127579 - DNA, 186 bp, synthetic construct
  misc_feature 1..186: note = Description of Artificial Sequence: Synthetic coding sequence
  source 1..186: mol_type = other DNA
atgatgagcgacgagaaaaatttaggggtgtctcagaagctggtgtcgccgtctcgttcaaccagcagttgcagttccaagcagggaagtcggcaggactcctgggaagtcgtagaggggctgaggggcgaaatgaattacacacaggagccccccgttcagaaaggcttcctgctcaaaaagtag

SEQ ID NO: 127580 - DNA, 2463 bp, synthetic construct
  misc_feature 1..2463: note = Description of Artificial Sequence: Synthetic coding sequence
  source 1..2463: mol_type = other DNA
atgatgagcgatgaaaagaacctcggcgtatcacagaagttagtgtcccctagccggagtacaagctcgtgctccagtaaacagggctcccgccaggatagttgggaggtcgtcgagggtctgagaggtgagatgaattacacgcaggaaccccccgtgcagaagggttttctgttaaaaaagcgtaaatggccacttaaaggatggcacaaacgattcttctaccttgacaagggcatcctgaagtatgccaagtcacagaccgatatagagagggaaaaactacacggatgcattgacgtggggttgtccgtgatgtctgtgaagaagtctagcaaatgtatcgatttagacactgaggagcacatatatcacctgaaagtcaagtccgaggaggtgttcgatgagtgggttagcaagctgcgtcaccataggatgtatcgccaaaacgagattgccatgtttccacacgaagtcaatcatttcttctcaggttctactatcacagatagctcttcaggagtgttcgattctatcagctccaggaagaggtcctctattagcaaacagaatttgtttcagaccggatccaacgtgtcattcagctgcggaggagaaacacgggtgcctttatggttgcagtcatcggaagacatggaaaaatgctccaaggacttggctcactgccacgcatatctggtggagatgtcgcagctgctccagtccatggatgtcttgcatcgtacatactccgcccctgccatcaacgcaattcaggttcctaagcccttcagtggccccgtccggctgcactcaagtaacccaaacctgtctacactggattttggagaagaaaagaattactcagacggatctgaaacatcctcggagttcagtaagatgcaggaggacttgtgccacattgctcacaaagtctattttacactccgcagcgcttttaacatcatgagcgctgaaagggaaaaactcaaacaactcatggagcaagatgcttcatcctcgccatcggcccaggttatcggtctcaagaacgccctctcttccgagaacagccgtgacgaaaaccgcgctctcgttcaccagctgtctaacgaatctagactaagtatcactgacagtttgtccgaatttttcgacgcacaggaagtgctgctttcaccatcatctagcgaaaacgaaatctccgatgatgatagttacgtgtcagatatttccgataacttgagtctggacaatctgtccaacgatctcgataatgagaggcagaccctgggacctgtgctggactccggcagagaggccaagagcagacgacggacatgcctgccggccccgtgtccttcctcaagtaacatcagtctgtggaatatcctacgtaataacatcggcaaagacctaagcaaagtcgctatgcctgttgagctgaacgagcctttgaataccctgcagcggctgtgtgaagagctcgagtacagtgagcttctggataaggctgctcagatcccatctccactggagcgcatggtgtacgtagctgcattcgccatctcagcttatgctagctcctactatcgggccgggagtaagccatttaaccctgtgctgggtgaaacatatgagtgcatccgcgaagataagggctttcagtttttttcggagcaggtatcgcaccacccccctatttcagcctgtcatgccgagagcaggaactttgtattttggcaggatgtcagatggaagaacaagttctgggggaaatctatggagatcgtgcccattggtaccacacatgtgacgctgccagtgtttggggatcactttgagtggaataaggtgacatcttgcatccacaatattctgagcggtcagcgctggatagagcactatggagagatagtcatcaaaaacttgcatgacgactcctgctactgtaaggtgaatttcattaaggccaaatactggtctaccaatgcccatgagatcgagggtacggttttcgacaggtccgggaaggcagtgcataggctatttgggaagtggcacgagtccatctactgtgggggtgggagcagctctgcttgtgtgtggagggctaatccgatgcccaaggggtatgagcagtactattcatttacacagttcgccctagaacttaacgaaatggatccttcaagcaagtctctgttgccaccgactgacaccagattcagacccgaccagcgttttctggaggagggtaacctggaggaagccgagatacaaaaacagcgaatagaacagctccagagggaacgccgaagggtgttggaagagaaccacgtggagcatcagcctaggttctttcgcaaatccgacgacgattcgtgggtgagcaatgggacctacctagagctacgtaaggacctggggttcagcaagctggaccatcccgttttgtggtag

SEQ ID NO: 127581 - DNA, 270 bp, synthetic construct
  misc_feature 1..270: note = Description of Artificial Sequence: Synthetic coding sequence
  source 1..270: mol_type = other DNA
atgatgagcgatgaaaagaatctcggagtgtcacaaaaacttgtctctccctcacggagtacctcatcatgctctagtaaacagggaagccgtcaggattcatgggaggtcgtggaaggtctccggggggagatgaactatactcaggagccacccgtccagaaaggtttcttgctgaagaaaaggaagtggcccctgaaagggtggcacaagcggtttttctatttggacaaagggatccttaagtatgcaaagtcccagacagactag

SEQ ID NO: 127582 - DNA, 2640 bp, synthetic construct
  misc_feature 1..2640: note = Description of Artificial Sequence: Synthetic coding sequence
  source 1..2640: mol_type = other DNA
atgaaggaggaggcgtttctgcgcagacgcttttccctgtgtccaccctccagcacacctcaaaaagtcgaccctcgcaaactgacacgcaatctgctcctatctggcgataacgaactgtacccgctttcccccggcaaggacatggaaccgaatggtccttcacttccacgagatgagggaccacccactccctcatccgccactaaggttcctccagccgaatatcggctgtgcaatggaagtgataaagagtgtgtgtctcctacagctcgcgtgacaaaaaaagaaacgctgaaagctcaaaaagagaactataggcaggagaaaaagcgtgccacccggcagctgttgagcgcactaactgatccttccgtggtgataatggctgactcgctgaagattcgtggtacgctgaaatcctggactaaactgtggtgcgtgcttaaacccggggttttgcttatttacaagacccctaaggtaggacaatgggttggaaccgtcctgctgcactgttgtgaacttattgagaggccatccaagaaagacggcttctgctttaagctcttccaccctctggatcagtctgtctgggctgtgaaaggtcccaagggtgagtcggtggggagcatcacccagccgctgcctagctcttacctcatttttagagcagcttcagaatcggacggccggtgttggctggatgccctagaacttgccctgcggtgctcctcactcctgaggctgggaacatgtaaacctggtagggacggagagcctggcacctcccctgacgcctcgccttccagcttatgcgggttacccgccagtgcaactgtgcaccccgatcaggacctgttcccccttaacggtagctccctcgagaacgacgcctttagtgacaagtctgagagagagaacccggaagagtccgacaccgagacccaggatcattcgagaaaaaccgaatctggtagcgatcagagcgaaacgcccggggctcccgtcaggcgtggtactacatacgtcgaacaagtgcaggaggagcttggtgagctgggcgaagccagtcaggtggaaactgtctccgaggagaataaatccctgatgtggacattactgaaacagcttaggcctggcatggatttgtcaagagtagttctccctacgtttgtgctggaacctcggagctttctcaacaagcttagcgattactattatcacgcagaccttctgtcccgggcagcagtggaggaggatgcatacagccgtatgaagctggtgttgaggtggtacttaagcggcttttataagaagcccaagggcatcaagaaaccatataatccgatactcggtgaaacatttcgatgttgttggttccacccccagaccgattctcggaccttctacattgccgagcaggtttcgcatcatcctcctgttagtgcatttcacgtcagcaatagaaaggacggcttctgcattagcggttctataacagcgaagagccgattttatggcaactcactcagtgccctgcttgatggaaaagcgacactcacattcctgaaccgggctgaggactataccttaaccatgccgtatgcacactgcaagggtatcttgtacggcaccatgactctagagctgggtggaaaagtcactatagaatgcgccaagaataacttccaggctcagctcgaattcaagctgaagccctttttcggcggaagcacatcaattaatcagatttctggaaagataacatctggcgaggaagtactggcttccctcagcggccattgggaccgcgacgtgtttatcaaggaggaggggagcggctccagtgccctgttctggacaccctcgggagaggttcgtcggcagcggctaagacagcatactgtgcccctcgaggaacaaacagagcttgaatctgaacggctctggcagcacgtcactagggctattagcaaaggagatcaacatcgggctacccaagagaaatttgcccttgaggaggcacaacggcagcgagcgagagaaaggcaggagtccctcatgccttggaaacctcagctgttccacttagatcctatcacccaggagtggcattaccgatacgaagatcacagtccctgggatcctctgaaagatatagcccagttcgagcaggacgggatcctccgaactctgcaacaggaagctgtagctaggcagacaaccttcctggggagtccaggccccaggcacgagaggtcaggaccagatcagcggttgcgcaaggcctctgaccagcctagcggacattcccaggccacagagtctagcgggagtactcccgagtcctgtccagaactgtcagatgaggaacaggacggcgacttcgtccccggcggagaaagcccctgtccacgctgtagaaaagaggcccggcgcctgcaagctcttcatgaagccattctgagcattcgagaggctcaacaggaactgcataggcacctgagtgccatgctcagctcaacggctcgtgccgcacaagcgccaaccccagggcttctgcagtctccacgctcatggttcctgttgtgtgtcttcctcgcctgccagctcttcattaaccacattttaaagtag

SEQ ID NO: 127583 - DNA, 2436 bp, synthetic construct
  misc_feature 1..2436: note = Description of Artificial Sequence: Synthetic coding sequence
  source 1..2436: mol_type = other DNA
atgaaggaggaagcatttttaaggagaagattcagtctgtgcccaccctcttccacccctcaaaaggtggatcctcgcaagttaacgagaaaccttctactatccggagacaacgaactgtatccactgtcaccgggaaaggacatggagcccaatggacccagcctgccccgtgatgaaggtccgccaacccccagttccgccactaaggtgccacctgccgaatacagactgtgcaatggttcagataaagagtgcgtgtctcccacagcaagagttactaaaaaggagactctgaaagcacagaaggagaactatcggcaggagaagaaacgggcaactcgccagctcttgtcagccctgaccgatcccagtgtcgtgataatggccgacagtcttaaaggccccaaaggagagtctgttgggtccatcacccagcccctcccatcttcgtatctcatctttagggctgcatccgagagcgatggaagatgctggctcgatgccctggaactagccctccgttgcagctcactcctccggctgggcacttgcaagcccggacgggatggcgagccggggacctcaccagatgctagcccatctagcctgtgcggactgccagcctcggcaactgtgcaccccgaccaagatctgttcccactcaatggttcatcgctggaaaacgacgcattctctgacaagtctgagagggagaatccagaggaatcagataccgagactcaggatcattcaagaaagacagagagtggcagcgatcagtcagaaacaccaggggcacccgttcggcgaggaaccacatatgtcgaacaagtgcaggaagagctgggtgaactcggggaagcctcacaggtcgagacggtttcggaagagaacaagagtcttatgtggacgctgctgaagcagctacggccagggatggatctctctcgggttgtcctgccaacgttcgttctggaaccacggtcctttctaaacaagctcagcgactattattaccacgctgatctcctgagcagagcagcagtcgaggaggatgcttatagtcgcatgaaactcgtactgaggtggtatctgtccgggttctataagaagcccaaaggcattaaaaaaccatacaaccccatcttaggggagacattccgctgctgctggttccacccccaaaccgactccaggaccttctatattgccgagcaggtcagccaccaccctcctgtgagtgccttccatgtgtcaaatagaaaggacgggttctgcatcagcgggtccatcaccgctaaaagccgattctatggcaatagcctcagtgcactgctggatggtaaggccacactcacatttttaaatcgtgctgaggattacaccctgacgatgccttacgcccattgcaaggggatcctctacggaactatgacccttgaactaggggggaaggtgacgatcgaatgtgctaagaacaacttccaggcacagctcgagtttaaactgaagccgttttttggcggctctaccagcattaatcaaatttctgggaagattacctcgggggaggaagtcttggcctccctgagcggacattgggatcgggacgtcttcatcaaagaagaaggatctggaagttcggccctattctggacaccaagcggggaggtgagacgccaaagattacggcagcatacagtgcctttagaggagcagactgagcttgagtcagaacggctctggcagcatgttacccgagctataagcaaaggagaccaacatcgtgcaactcaggaaaaattcgcacttgaggaagcccagcgacagcgagcccgcgaaaggcaggaatcattgatgccctggaagcctcaattattccatctggacccgattacccaagaatggcattaccgatatgaagaccactccccatgggacccactgaaggacatagcccaatttgaacaggacggaatactcagaactcttcagcaggaagccgtggcgcgccagaccacctttcttggatccccagggccgcgacacgaacgttccggacctgatcagagactaagaaaagcgtctgaccagccaagtggccatagccaggccacggaatcttccgggtccacccctgaatcttgtcctgaactgagtgacgaagaacaggatggtgactttgtccccggtggcgaatctccttgtccacggtgcaggaaggaagcccgaaggctgcaagctttacatgaggcaattctttctatccgcgaggcacagcaagaactccaccggcacctctcggccatgctctcatcaacagcccgcgctgctcaagcgccgactccagggctcctccagtcccctcggtcatggtttctactctgtgttttcctggcctgccagctgtttatcaaccatatccttaaatag

SEQ ID NO: 127584 - DNA, 1320 bp, synthetic construct
  misc_feature 1..1320: note = Description of Artificial Sequence: Synthetic coding sequence
  source 1..1320: mol_type = other DNA
atggacttgtctcgcgtggtgctgccaacttttgtgctcgaaccaaggtcattccttaataagctatccgattactattaccacgcggatctactgagtcgagcagcagtggaggaggacgcctattccagaatgaagctcgtcctcagatggtacctgtcaggtttctataaaaagccgaagggcattaaaaaaccctacaatccaattctcggtgagacttttcgatgctgttggttccatccacagacagattccagaaccttttatatcgccgagcaagtgagccaccaccctcccgtctccgcctttcatgtgtctaatcgaaaagatggattctgtatctccggatcgatcactgcgaaatctaggttttacggaaattctctgagcgctctcctcgacggcaaagctaccctgacgtttctgaacagggccgaagactacaccctgacaatgccttatgcccactgcaagggaatcctttacggtactatgactctggagttgggagggaaggtgacaatcgagtgtgccaagaataatttccaggcccagctggagtttaagttgaaaccctttttcggggggtcgacttcaatcaatcagattagcgggaaaatcacaagcggcgaagaagtgctagcatctctgagcggccactgggatcgggacgtgttcattaaggaggaaggttctggctcttcagccctgttctggacgccgtccggggaggtcagaagacaacgcctgcggcagcatacggtcccgctagaggaacaaacagaactggaatctgaaaggttgtggcagcatgtcaccagagctatctccaagggcgatcagcacagggccacccaggaaaagtttgcacttgaagaggctcagcggcaacgcgcgagagagcggcaggaaagtctgatgccttggaagccccagctgttccacctcgaccctattactcaggaatggcactataggtacgaggatcacagcccatgggaccccctgaaggacatcgcccagttcgagcaggacggaatactgcgtactcttcagcaggaggccgtagctcgacaaacaactttcctagggtcgcctggtccaagacatgaaaggagcggaccagatcagcgcctccggaaagccagcgatcagccctcaggccatagccaggccacagagtcttcaggatctacacccgagtcatgccctgagttacacggcacaggcagcacaggaactgacccaaggccccccgccgaaccccctattctcgtgccagctctacgagtccctggggtgagcgcggttcattag

SEQ ID NO: 127585 - DNA, 2436 bp, synthetic construct
  misc_feature 1..2436: note = Description of Artificial Sequence: Synthetic coding sequence
  source 1..2436: mol_type = other DNA
atgaaggaagaggcctttctccgccggcgcttctctctctgcccccccagttctacaccccagaaggtggacccacggaaacttacgcgtaacctgctgctgtctggtgacaatgaactgtacccgttaagccccgggaaggacatggaacctaacgggccctccttgccccgcgatgaggggcctcccaccccatctagtgcgacaaaggtgccacctgctgaatatcgcttatgcaatgggtccgataaggaatgcgttagtcctacagccagggtgactaaaaaagaaacactgaaggcacagaaagagaactacagacaagagaaaaagcgcgctacccgccagctcctgagtgcactgacggacccctccgtggtgatcatggccgatagccttaagggacccaaaggggagtctgtgggctctattacacagccactcccttcctcctatctcattttccgggccgcgagcgaatctgacggacgctgctggctcgacgcgctggagttagccctcaggtgcagcagtctcttgcgacttgggacctgtaagcccggccgggacggcgagcctggaacaagcccagacgccagtcccagttctttatgcggtcttcctgcatctgcaacagtccaccccgaccaagaccttttccctttgaatgggagcagcctggagaatgacgctttttcagacaaaagcgagcgggaaaatccagaggagtcggatacggaaactcaggaccattctcgcaagaccgagtcggggagcgaccagagcgaaacacctggagctcccgtgcgacgcggcactacgtacgttgaacaggtgcaggaggagcttggcgaattgggagaggcgagtcaggtggaaactgtgtccgaggagaataaatccctcatgtggacactactgaaacagctccgaccggggatggacctctctagagtcgtgctacccacgttcgtgctcgagccccgctcattcctgaataagctgagtgactattattaccacgccgatctgctgagcagagccgccgtcgaggaggacgcgtattcacggatgaagctggtgctgagatggtatctgtccggtttttataaaaaaccgaaaggcattaagaaaccctacaaccctatcctaggggaaacatttagatgctgttggtttcaccctcagaccgactcccggacattttacatcgcagagcaggtatctcaccatccacctgtcagtgcgttccacgtgtccaatagaaaggatgggttctgcatctcaggatctatcaccgctaagtctcggttttatgggaacagcctttcagccctcctggacggcaaagcaaccctgacattcctgaacagagccgaggactatactctcactatgccgtatgctcactgcaagggaattctatatggcactatgaccctcgagctgggcgggaaggtgacaattgagtgcgccaagaataattttcaagctcagctagagttcaagctcaagccattttttggtggttcgacatccatcaaccagattagtggtaagattacttctggagaagaagtgctcgcgtctctgagcggccattgggatagagacgtcttcataaaggaggaggggtctgggagtagcgccctattttggacaccaagcggcgaagtgcgcagacaaagactcagacaacacaccgtgcctttggaggaacagaccgagctggagtccgagcggctgtggcagcacgtcaccagagccatctctaaaggagaccagcatagagcgactcaggagaaatttgccctcgaggaggctcagagacagagggcacgggagcggcaagagagcctgatgccttggaagccacagttattccacttggaccctatcacacaagaatggcattaccggtatgaggaccattctccgtgggatcctctaaaggatatcgctcaatttgagcaggacggaattctcaggaccctgcaacaagaggcggttgcacgccaaaccacctttttaggatcccccggccctagacacgagcgcagcggtcccgaccagcgcctgcgaaaggcctcagatcagccatcaggacactcccaggcgactgagagctccggatcaaccccggagagctgcccagagctgagcgacgaagagcaggacggagatttcgtgcctggaggggagagcccctgtccgagatgtcgcaaggaagcacggcggttgcaagctcttcacgaagctatacttagcatccgagaagcccaacaggagctccaccgtcacctgagcgctatgttgagttccaccgctcgggcagctcaagcaccaaccccagggctgctgcagtcaccaagatcatggttcctgttgtgcgtatttctcgcctgtcagctgtttatcaaccacatcctaaagtag

SEQ ID NO: 127586 - DNA, 375 bp, synthetic construct
  misc_feature 1..375: note = Description of Artificial Sequence: Synthetic coding sequence
  source 1..375: mol_type = other DNA
atgaaggaagaggcctttttaagaagacggtttagtctctgcccaccatctagcaccccacagaaggttgacccaaggaagctaacaaggaacttgcttctctctggggacaatgagttgtatcctctttctcctggcaaggatatggagccgaatggcccatccctccccagggacgaaggcccccccactccttcttcagctacaaaggtgccccctgctgaataccgtctgtgtaacggcagtgataaagagtgtgtgagtccgacagcgcgcgtcactaagaaggagaccctaaaagcccagaaagaaaattatcgacaggagaagaagcgcgctacaaggcagctcctgtctgccctgactgatccttag

SEQ ID NO: 127587 - DNA, 297 bp, synthetic construct
  misc_feature 1..297: note = Description of Artificial Sequence: Synthetic coding sequence
  source 1..297: mol_type = other DNA
atgaaagaagaagcgttcctgcggcgaaggttctccctgtgccccccttcatcaacccctcaaaaagtcgacccccgcaagttgacccggaatctgttgctttccggcgataatgagttgtatccactttcaccaggaaaagatatggaacctaatggtcctagcctacctcgggatgaagggccacccacaccatccagtgccaccaaagtccctccagctgagtataggctgtgcaacggttccgataaggagtgtgtctctcccaccgctcgtgtaactaagaaagaaacttag

SEQ ID NO: 127588 - DNA, 420 bp, synthetic construct
  misc_feature 1..420: note = Description of Artificial Sequence: Synthetic coding sequence
  source 1..420: mol_type = other DNA
atgaaagaggaggcttttttgagaagacgcttctccttgtgtccgccaagctctacccctcagaaagtagaccctcgtaagctaacacgcaacttactattgagcggagacaacgagctctaccctctgagcccaggcaaggacatggaacctaatggtccatctctcccacgcgatgaaggccctcccactcccagctccgcgacgaaagtgcctcctgctgagtatcggctctgcaacggatccgacaaggagtgtgtgagtcctacagcaagagtcacaaagaaggaaactttgaaagcccagaaggaaaattatcggcaggagaaaaagagggccacccggcaactgctgagcgcccttacagacccctccgtggtcatcatggctgatagcctcaagattcgaggcacattgtag

SEQ ID NO: 127589 - DNA, 273 bp, synthetic construct
  misc_feature 1..273: note = Description of Artificial Sequence: Synthetic coding sequence
  source 1..273: mol_type = other DNA
atgaaagaggaagcattcttgcggaggcgtttttcgctctgccctccgtcgtccaccccccagaaggtcgaccccagaaaattaactagaaatctgctgctatccggcgataatgaattgtatccattaagtcccggtaaagacatggaaccaaacggtccttccctcccccgggacgaggggccgcctaccccaagctctgcaaccaaggttcctccagctgaatataggctgtgtaacgggtccgataaggaatgtgtgagccccacatag

SEQ ID NO: 127590 - DNA, 210 bp, synthetic construct
  misc_feature 1..210: note = Description of Artificial Sequence: Synthetic coding sequence
  source 1..210: mol_type = other DNA
atgaaggaggaggcatttctgcgtcgccgtttcagcctgtgcccaccgtcctctaccccccagaaagtggatccgaggaagctgaccaggaacttgttgctgtcgggcgacaatgagctgtaccccctgagtccagggaaagacatggaacctaatgggccctcacttcccagggatgagggcccacccaccccctcgtcagccacctag

SEQ ID NO: 127591 - DNA, 1299 bp, synthetic construct
  misc_feature 1..1299: note = Description of Artificial Sequence: Synthetic coding sequence
  source 1..1299: mol_type = other DNA
tataatccaattctgggggagacattcagatgctgctggtttcaccctcagaccgatagcagaaccttctacatcgccgagcaggtgtcccaccacccccccgtatcggctttccacgtgagcaacagaaaagatgggttttgtatttctggcagtataaccgctaaatcacgcttttatgggaattcactgtccgctttgctggatgggaaagccacactgacctttctcaatcgagcagaagactacactctgaccatgccctatgcccactgtaagggtattctgtacggtaccatgaccctggagctgggcggcaaagtgaccatagagtgcgcgaagaacaactttcaggcacagctcgagttcaaacttaagccattctttggtggatcaacaagtattaaccagataagtggaaaaatcacatctggcgaggaagttctggcatcactgtccggtcattgggaccgtgatgtctttattaaggaggagggaagtgggtcatcagctctgttttggaccccaagcggagaggtaagacgccaacgactgaggcagcacactgtgcctctagaggaacagacggagctcgagagcgaacggctgtggcagcacgttacacgggctataagcaagggagatcagcatagggctacgcaggaaaaatttgcccttgaggaggctcagaggcagcgtgctagggagcggcaagaaagcctgatgccttggaaaccacaactgttccacttggatccaatcacccaggagtggcactaccgctatgaagaccacagtccatgggaccctcttaaagacattgcccagtttgaacaggatggcattctgcggactctccaacaggaggctgtggctaggcagactaccttcctcggtagtccgggtcctaggcatgagagaagcgggcccgatcaacgcctgaggaaggcatcggaccaaccaagtggccactcacaggccacagagagttccggcagcacaccagagagctgtccagagctaagcgacgaagagcaggatggcgactttgttccaggaggagagtccccttgtccaagatgcagaaaggaggcccggaggctccaggcattgcacgaggccattttaagcatccgtgaagctcagcaggaactgcacagacatctgtctgctatgctctcttccacagcgagggctgctcaagcccccacaccaggcctcttgcagtcccctcgttcatggttcctgttgtgtgttttccttgcatgccagctgtttatcaaccatatcctcaagtag

SEQ ID NO: 127592 - DNA, 1533 bp, synthetic construct
  misc_feature 1..1533: note = Description of Artificial Sequence: Synthetic coding sequence
  source 1..1533: mol_type = other DNA
atgtgtgtgccccatcgtcagggacaccaggaaggtgatagtcagggtgctgagggcgagctgcctgccggagaggagccgaggtcctttctcaacaagttatccgactactattatcatgcagacttgttgtctcgtgccgcagtggaagaagatgcatactcgagaatgaagttggtgctgcggtggtacctgtcaggcttctacaagaagcccaaagggataaagaaaccctataatccgattttgggcgaaactttccgctgctgttggtttcaccctcagacagactcccgtacgttctatattgccgagcaagtctcccaccacccgccagtctccgcatttcatgtgtctaataggaaggatggattttgtataagcggatctatcactgcgaaatcgcgtttctacggcaatagcttgtccgcgctgctagatgggaaagccaccctcacctttctcaacagagcggaggactacaccctgacaatgccctatgcccactgtaaggggattttgtacggcacaatgactttagaactgggcggtaaggtcacaatcgagtgtgcgaaaaataactttcaagcccagttagagttcaagttgaaacccttttttggcggtagcacgtctataaaccaaatatcaggtaaaatcacgtctggcgaggaagtcttagcgtctctctcgggacactgggacagagacgtgttcattaaggaggaggggtctgggagttcggcactattttggactcctagcggtgaagttaggaggcagcgcttgagacagcacaccgtacccctagaggagcagacagagctggagagtgagaggctgtggcagcatgtgacaagggcaatttcgaaaggcgatcaacatcgggccactcaggaaaagtttgctctagaggaggcccagaggcagagggccagagaaagacaggaatccctgatgccatggaagccacagttgttccacctggacccaatcactcaagaatggcactatagatacgaggatcattctccttgggaccccctgaaggatatcgcacagttcgaacaggatggtatcctgagaacactgcagcaggaggccgtcgcccggcaaaccacgttcctgggaagccccgggcctagacatgagcggtcgggacccgatcagagactgaggaaagccagcgaccagcccagcggccatagccaagccaccgaaagtagcgggtctaccccggaatcgtgccctgagctgtccgatgaggaacaggacggggactttgtgccgggcggcgagtccccttgtcctagatgcagaaaggaggcacggcggctccaggcattacatgaagctattctgagtatacgagaagcacagcaggaattacacagacacctgtcagcaatgttgagttccacagctagggcagctcaggcccccaccccagggctgctccagagccctcgctcttggttcctcctctgtgtgttcctcgcgtgccagctcttcattaatcacatactcaagtag

SEQ ID NO: 127593 - DNA, 2805 bp, synthetic construct
  misc_feature 1..2805: note = Description of Artificial Sequence: Synthetic coding sequence
  source 1..2805: mol_type = other DNA
atgtcctccgatgagaaggggatctccccagctcacaaaactagcacaccaacacatcggtcagccagctcttccacctccagccagcgcgacagtaggcagtctattcatatcctggagcgcactgcctctagttcaactgaaccaagcgttagccgccagcttttggagcctgagccagtacctttgtctaaagaggccgactcttgggagatcatagaggggcttaagatcggccagaccaatgtccagaagcctgacaaacacgagggctttatgttgaagaaaaggaaatggcctctcaagggatggcacaagaggttctttgtgctggacaacggaatgctgaagtatagtaaagcgcctctggacatacagaagggcaaggttcacggatcgattgacgtgggcctgtcggttatgtcgattaaaaaaaaagccaggcggatcgacctagacaccgaggaacacatctatcacttgaaggtcaagagccaagattggttcgacgcgtgggtgagtaagcttaggcaccatcgattgtatcgccagaacgaaattgttcgatcaccccgcgacgcctcgttccatatatttcctagcactagtacagccgagtctagccccgctgccaacgtgagtgttatggacggtaaaatgcaacccaattctttcccatggcagagcccactcccatgtagtaatagcctacctgcaacttgcaccacaggccaaagcaaggtagccgcatggctgcaggattccgaagagatggacagatgcgcagaagatctggcccattgccagtcaaatttggttgaattaagtaaactgctccagaatctggagatcctgcagcgaacacaaagcgctcctaattttaccgacatgcaggcaaattgtgttgatattagcaagaaagacaaaagagtcaccagacgctggcgaacgaaaagcgtgagcaaggacaccaagatacagctgcaggtgccattcagtgccaccatgtcgcctgtcaggttacatagttcaaatcctaacctttgcgcggacatcgaatttcagactcctccttctcaccttaccgaccctctggaatcctccacggattacacaaagctccaagaagagttctgtcttatcgcgcagaaagtgcactcactgcttaagtcggcattcaattcgatagctattgaaaaagagaaacttaagcagatggtgagcgagcaggatcattctaagggtcactctacacagatggcgcgattgagacagtcactgtcccaagcgcttaatcaaaatgccgagctcagaagtagactgaatcgtatccacagtgagtctatcatctgcgatcaagttgtgagcgttaatattattccctccccagacgaagctggagagcaaatacacgtctctctgcctttgagtcaacaggtagccaacgaaagtcggctcagtatgagtgaaagtgtgtccgaatttttcgatgcccaggaggtgcttctgtcagcctcttccagcgaaaatgaggcgagtgacgacgaatcatatatctcagatgtgagcgacaatatcagtgaagacaatacctcagttgccgataatatatcaaggcagattctgaatggcgagctgacgggtggggcctttaggaatggaagaagggcgtgcctcccagccccctgtcccgataccagtaatatcaacctatggaatattttacgcaacaatatcggaaaagacctttctaaggtgtctatgcccgtcgaactcaacgagcctttaaacaccctccagcatctgtgtgaggaaatggagtatagcgagcttctcgataaggcgagcgaaacggatgatccatacgaacgaatggtcttagtggcagcattcgcagtgtctgggtactgttcaacatacttccgggcaggcagtaagccgtttaacccggtgctaggagagacctatgaatgcattcgggaggacaagggattcaggttctttagcgaacaggtgagccaccatccaccaataagcgcatgccactgcgagagcaagaattttgtgttctggcaggatatccgctggaaaaacaaattctggggcaagtctatggagatcctgcctgtgggaacgttgaacgtgatgctacctaagtacggagattattatgtgtggaataaggtgacaacatgcatccataacatcctgagtgggaggaggtggatcgagcactacggcgaggtgaccatcagaaacaccaagtccagtgtttgtatttgtaaactgacctttgtcaaagttaattactggaatagtaatatgaacgaggtccaaggtgttgtgattgaccaggaggggaaggctgtgtaccggcttttcgggaagtggcacgaaggattgtactgtggtgtcgccccctccgccaaatgcatctggaggcctggcagcatgccaactaattacgagttgtactacggatttacccggttcgccattgaattgaacgagctggaccctgtgctgaaagacctgttaccacccaccgatgctcggtttcgccccgatcagaggtttctagaagaaggcaatctggaagccgccgcatccgagaaacagagagtggaagagctacagcggtcacgcagaagatatatggaagagaacaaccttgagcacatcccgaagttctttaagaaggtcattgatgcgaatcagcgcgaggcctgggtgtctaacgacacatactgggagctgaggaaagacccaggattcagtaaggtcgactccccggtcttgtggtag

SEQ ID NO: 127594 - DNA, 2817 bp, synthetic construct
  misc_feature 1..2817: note = Description of Artificial Sequence: Synthetic coding sequence
  source 1..2817: mol_type = other DNA
atgcatcagctttccctcattcgcggcaaccgcgggaggagtatacatattctggaacgcactgcttcatccagtacagaaccgtccgtgtcccggcaactcctggaaccagagcccgtcccactctctaaggaagccgatagttgggagatcatagagggcttgaaaatagggcagacgaacgtgcagaagcctgacaaacatgaagggttcatgctcaagaaaaggaagtggcccctgaagggctggcacaagcggttctttgtgctcgataacgggatgctcaaatatagcaaggctcccttggacatacagaaggggaaggtgcacggttctatcgatgtgggattgagtgtgatgtctataaagaagaaggccagaagaatagacttggacactgaagaacacatctatcatcttaaggtgaagagccaagactggttcgacgcctgggtgtcaaagctgcggcatcaccgcctctataggcaaaacgaaattgttcggtcacccagagacgctagttttcacatttttccatctaccagtacagccgaaagcagcccagccgcgaatgtttcagtcatggatggcaaaatgcagcctaatagtttcccttggcagagccccctgccctgtagtaactccctgccggccacatgcaccacaggccagagcaaggtggcagcctggctgcaagatagcgaggagatggatcggtgcgccgaagacctcgcacattgccagagcaacctggtggagttgagcaagttacttcagaaccttgagattctgcagaggacgcagagtgcccccaattttacagacatgcaagccaactgcgttgacatctccaaaaaagacaagcgagtcactagaaggtggagaaccaaaagcgtgtcgaaggatacaaagatacagcttcaagagggaccgccagccaagggtcagttctccaccactaggaggagacagcgactggccgcagccgtggccacgaccgtcccattctcagccacaatgtcacccgtgcggctgcactccagtaatcctaatctctgtgccgatattgaattccagacacccccatctcatctcacggaccccctggagtctagtacagattataccaaattacaagaagaattctgcttaatcgcgcagaaggtccatagccttctgaaatcggcttttaattccattgcgatcgaaaaagagaaacttaagcaaatggtcagcgagcaggaccacagtaaaggccactccacccagatggcgcggctgcgccagtccctgtctcaagccctcaatcagaatgccgagctgcgatccaggctgaacaggatccacagcgaatccataatttgcgaccaggttgtctccgtcaatatcattccctctccagatgaagctggggaacagatccacgtgagcctcccactctctcagcaggtcgctaacgaatccagactgtccatgtcagagtcagtgtccgagttcttcgacgcccaggaagtgttgttgtccgcttcctcatccgaaaatgaagcaagcgatgacgagtcatacatttcagatgtttctgataacatatccgaggacaatacttcggtggctgacaatatcagtaggcagatcctcaatggtgagttgacaggcggcgccttccgaaatggccggcgtgcctgcctgcccgcaccatgcccagacacaagcaatatcaacttgtggaatattttaaggaacaatataggaaaggacctttctaaggtttctatgcctgtggagctgaacgaaccgctgaacaccctgcaacatctgtgcgaggaaatggaatatagcgagttgttggataaggcgtccgagacagacgacccctacgagagaatggtcctggttgccgccttcgccgtgtctgggtactgcagcacctatttccgagccggttctaaacctttcaatccagttcttggcgagacatacgagtgtattagagaggataagggttttaggtttttctctgagcaggtttcacatcatcccccaatatctgcttgtcattgcgagtccaaaaactttgtgttctggcaggatatacgatggaaaaataagttctggggaaagtctatggagattctgcctgttgggacacttaacgtgatgctgcccaagtacggagactactacgtatggaataaggtgaccacatgtattcataatattctttctggaaggagatggattgagcattacggagaggtcaccattcggaatacgaagagctcggtgtgcatttgtaagcttaccttcgtcaaggtgaattactggaatagtaacatgaacgaggtacagggggtggttattgaccaagagggtaaagcagtctaccggctttttggaaagtggcacgaaggactgtactgcggtgttgcgcccagcgctaaatgtatctggagacctggcagcatgcccactaactacgagctgtattacggcttcacacggtttgctattgagttaaacgaactggaccctgtacttaaggaccttttaccacctactgatgctcggtttcggccagatcaacggtttctggaggaggggaatctggaagctgctgcttctgagaagcagcgggtagaggagcttcagagatcccgacgtcgatacatggaggagaataatctggagcacattccaaagttctttaaaaaagtgattgacgccaatcagagggaagcttgggtctcaaacgatacttattgggagttgaggaaggacccgggtttcagcaaagtggacagccccgttttgtggtag

SEQ ID NO: 127595 - DNA, 2697 bp, synthetic construct
  misc_feature 1..2697: note = Description of Artificial Sequence: Synthetic coding sequence
  source 1..2697: mol_type = other DNA
atgtcctctgatgagaaaggcatttcgcctgctcacaagacatctacgcccacccatcggagtgcgtcctcttctaccagcagtcagcgggactcgagacagtccatccacatcctggagcggaccgcatccagctccacggaaccctccgtcagtagacaactgctcgagccagaacctgtaccactgagtaaggaggcggactcctgggagattatcgaaggactgaagatcggtcaaacgaacgtgcagaagccggacaagcatgaaggtttcatgctcaagaagcggaagtggcccctgaagggttggcataaacggtttttcgtccttgacaacggtatgctcaagtacagtaaagcgccacttgacatccaaaaaggcaaggtccacgggagtattgacgtcggcctgagtgtcatgagtatcaaaaagaaggcgagaagaatcgatttagacaccgaagaacatatttatcatctgaaagtgaaaagccaagattggtttgatgcctgggtgtcaaaattaaggcatcaccgtctgtacaggcagaacgaaatcgtgcgtagtcctagggatgcctcctttcatatctttcctagcacctctacagcagaaagttcacccgccgctaacgtgagtgtcatggacggcaagatgcaacccaatagcttcccttggcagagtcccctgccatgttcgaatagtctccctgctacatgcacaaccggccagtccaaagttgctgcttggttacaagacagcgaagaaatggatcgttgtgctgaagatttggcccattgccagagcaacctcgtcgaactgtcaaagctgctgcagaatctagagattctgcaacggacgcaatccgctcccaatttcactgatatgcaggcgaattgcgtcgatatctcaaaaaaggataaaagagtcacacgacgatggcggaccaagtccgtctctaaggatactaagatacagttgcaggtcccattcagtgctactatgtctccagtaagactgcacagtagcaatccaaacctatgcgcagacatcgagttccagactcctccaagccacctcaccgacccgcttgagtccagcaccgactacaccaagctccaggaagaattttgcctgattgcccagaaagttcactctctcctgaagtctgcattcaatagcatcgctattgagaaagagaaactgaaacaaatggttagtgaacaggatcactctaaaggccactcaacacagatggctcggcttcgccagagtctgtctcaggcaggtgagcagattcacgtgtctctgcctctcagccaacaggttgcaaacgagtccaggctgtctatgagcgaaagtgtgtctgaattcttcgacgctcaggaggtgctgctgagcgctagctctagtgagaatgaggcgtcagatgatgagagttacatctctgacgtgagcgataatatcagtgaggataacacttcagtggctgacaacatctcccggcagatcctgaacggggagctgactggaggagccttccgaaacgggagacgtgcatgtcttcccgctccatgtcccgatactagcaacatcaacctgtggaacatcttgagaaataacattgggaaagacttaagcaaggtctcaatgcctgtggagttaaatgagcctttaaacacattacagcatttatgcgaggagatggagtattccgagctgctagacaaagcttctgagacggacgacccctatgaacgaatggttttggtcgctgccttcgccgtaagtggatactgtagcacctacttcagggctggctcgaaacctttcaacccagtactgggtgagacctacgagtgcatccgtgaggataaaggattccgttttttttccgagcaagtgtctcaccatccgccaatcagcgcttgccactgcgagagtaagaactttgtgttctggcaggacatccgctggaaaaacaaattctggggaaaatcaatggaaattctgccggtcggtacacttaatgttatgctcccaaaatacggcgactactatgtgtggaacaaagtcaccacctgcatccataacattttgtccggtcgcagatggatcgagcactatggcgaagtcacaatccgcaatacgaaaagtagtgtgtgcatctgtaagctgacctttgttaaggtgaattattggaattccaacatgaacgaggtgcagggggttgtcattgatcaggaggggaaggctgtgtaccggttattcggcaaatggcatgaaggcctgtactgcggcgtcgcccccagtgcgaaatgtatttggcggcctgggtcaatgcctaccaactacgaactgtactatggcttcacccgcttcgccatcgagctgaacgaactggatccagttctgaaagacttgctgcctcctacggacgcccggtttagacccgatcagcgtttcctggaagaagggaatcttgaagctgctgccagcgaaaagcagcgagtggaggaactgcaaaggtcacgtcggagatacatggaggagaataatcttgagcacatccccaaatttttcaaaaaagtaattgacgctaatcaacgagaggcatgggtttccaacgacacctactgggaattaagaaaggatccaggctttagtaaagtagactcacctgttctgtggtag

SEQ ID NO: 127596 - DNA, 573 bp, synthetic construct
  misc_feature 1..573: note = Description of Artificial Sequence: Synthetic coding sequence
  source 1..573: mol_type = other DNA
atggacggcaaaatgcaacctaactcttttccttggcagtcaccactcccttgcagtaactccctgccagccacctgcactactgggcagtccaaagttgctgcctggttgcaggactcagaggagatggacaggtgtgctgaagaccttgcacactgtcagagcaatttggtagaactctcgaaactccttcaaaatctggaaatcctacagagaacccagagtgccccgaatttcacagatatgcaggcaaattgtgtggacatctctaagaaagataagagggtgaccagacggtggaggaccaagtccgtctctaaggacactaaaattcagctgcaggtgccatttagcgccaccatgagtcccgtgcggctgcactccagcaatccgaatctttgtgcggatatcgaatttcagacaccaccacctaatcacttcggcatcctgagcgttcttctgcaaccttactctctcaagaaaaagaagaaaaagaagaagaaaagcactccgtcgcttgagagtaggattaagggcgccgaatataagattcaaagcctgacttcactgtag

SEQ ID NO: 127597 - DNA, 2880 bp, synthetic construct
  misc_feature 1..2880: note = Description of Artificial Sequence: Synthetic coding sequence
  source 1..2880: mol_type = other DNA
atgagcagcgatgagaagggaatatctccagctcacaagacctccacacctactcatcggtctgcttcctcttcaacctctagccaaagagattcacgacagtctattcacattctagagaggactgcgtcgtcttctactgagccctctgtgtcaagacagcttttggagccagagccggtgcccctgtcaaaggaagcagattcctgggagatcattgagggcttaaagatcggacaaaccaatgttcagaagcctgataaacatgagggctttatgctcaagaaacgcaagtggccgcttaaaggttggcataaaagattctttgtgctagataatggcatgcttaagtactccaaggcccccctggatatacagaaagggaaagtccatggcagcatcgatgtcggccttagcgtcatgagcattaagaaaaaggcccgacgtattgatctggataccgaagaacatatctaccacctgaaagtcaagagccaggactggttcgacgcatgggttagtaagttaaggcaccacagactgtatagacagaacgaaatcgtgcgctctcctcgcgacgccagcttccacatcttcccttccacctcaacagccgaaagctctcctgccgcgaatgtctctgtcatggatgggaaaatgcagcctaactcattcccttggcagagcccccttccttgcagtaatagcctgcccgccacatgcaccactggtcaaagcaaagtcgctgcctggctacaggactccgaggaaatggatcgatgtgcagaggatttggcccactgtcagtcaaatctcgttgaactctccaagctgctacagaacctggaaatccttcaacgaacacagagtgccccaaactttacagacatgcaggcgaattgtgtcgatatcagtaagaaggacaagagggtcacaagacggtggcgtactaagagtgtaagcaaagatacaaagattcaactccaagaagggccacctgccaaaggacagtttagtaccacccgccgaaggcagcgattggctgctgcagtcgccaccacagttcctttctctgccaccatgtcccctgtgcggctccactctagtaatcccaacctctgcgccgatatcgaatttcagacacctcccagccacctgaccgatccccttgagtccagtacagattacacgaagctccaggaggaattttgcttaatcgctcagaaagtgcacagcttactgaaaagtgcctttaatagtatcgcaatcgagaaggagaagctaaagcaaatggtgtccgagcaagaccactctaaaggccatagtacccagatggctcggctgaggcagtctcttagccaagcactcaatcagaacgccgagcttcgatcccgtcttaatcgaattcattcggagtccattatctgtgatcaggtagttagcgttaatatcataccgtctcctgacgaggccggcgaacagatccacgtaagccttcccttgagccagcaggttgcaaacgagtctagattgtcgatgtccgagagtgtgtcagagttcttcgacgctcaagaggtacttttaagtgcaagctctagcgagaatgaggcatctgacgacgaatcgtacatttccgacgtctccgacaatatctctgaggacaatacctcggtcgccgataatatatcaaggcagattctgaatggcgaactgacagggggggcattccggaacggcaggcgggcctgtctgcctgctccatgccccgataccagcaatattaacctttggaacatcctgaggaacaacatagggaaagacctttcaaaggtttccatgcccgttgagctgaatgaacctcttaacactctccagcacctgtgcgaagagatggaatattcagagctgctggataaagccagcgaaaccgatgatccctacgagcgaatggtgcttgtggctgcgttcgccgtctccggctactgctcaacctattttcgggcaggaagcaaaccatttaaccctgtcctcggagagacatacgagtgcatacgcgaggacaaaggatttagattcttttctgagcaagtatcccaccaccctccgatttctgcatgccactgcgaaagtaagaattttgttttttggcaggacattcggtggaagaataagttctggggtaaaagcatggagatcctcccggttggcaccctcaacgtgatgctcccaaagtatggagactattacgtttggaacaaagttactacttgcattcacaatatactgtcaggaaggcgctggattgagcactatggggaggttacaatacgcaacactaaaagcagcgtttgcatttgtaagctgacctttgtaaaagttaattactggaactcaaacatgaacgaggtccagggagtggtgatcgatcaagagggcaaggctgtgtaccggctgtttggcaagtggcatgagggcctctactgcggggtggcgccctccgccaaatgcatttggaggcccggatccatgccgacaaactacgaattgtattacggcttcacacggtttgccatcgagcttaacgagctggacccagtactgaaggaccttttgccgcctaccgatgccaggttcaggccagaccagaggttccttgaggagggaaacctggaagccgcagcaagtgaaaagcagagggtcgaggaactccagcgctcgcggcggcggtacatggaagaaaacaaccttgaacacatcccaaaattctttaaaaaagtgatagatgccaaccaacgcgaggcctgggtgtctaacgacacatattgggagttgcgcaaggatcctggattctccaaggttgactcgcccgtactgtggtag

SEQ ID NO: 127598 - DNA, 2712 bp, synthetic construct
  misc_feature 1..2712: note = Description of Artificial Sequence: Synthetic coding sequence
  source 1..2712: mol_type = other DNA
atgtcttctgacgaaaagggcatctctcccgcacataagacttccactccaactcaccggagcgcttctagttccacttctagccagcgagacagtcggcaatcaattcacattctggagcgaactgcttcttcctctaccgagccctcagtgtcacgtcagctgttggagccagagccagtgcctctgagcaaagaggccgattcttgggagatcatagaaggtctgaagattggacagacaaatgtccagaaacctgataaacatgagggcttcatgctgaagaagcgcaaatggccactgaaaggttggcacaagcggttcttcgtccttgataatggaatgctcaagtactccaaggcacccctggacatccagaagggtaaggttcatgggtccatcgacgttgggctcagcgttatgagcatcaaaaagaaggctcgccggattgacttggacaccgaagagcacatatatcatttgaaagtcaaaagccaggattggttcgatgcctgggtatccaaattacgtcatcacagattataccggcagaacgagattgttagatctccccgcgacgctagttttcatatattcccttccacgtcaacagcggagtccagccccgcagctaatgtcagtgtaatggacgggaaaatgcagccgaacagttttccatggcagagccccttgccctgttcaaattcccttcccgcgacgtgcaccaccgggcagagtaaggtggcagcctggctgcaggattcggaggagatggatcgctgtgctgaggatttagcgcactgtcagagcaaccttgtggaactgagtaagctactccagaatctggagattcttcagcgaacacagtccgccccaaattttactgacatgcaggtccccttctcagccactatgtccccagtgagattgcactcttccaatccaaacctttgcgccgacatagagttccagacacccccgtctcatcttaccgacccgttggagagctcaacagactacacaaaactgcaggaagaattttgcctaatagcacagaaagtccactctttgctcaagagcgccttcaactccattgccattgagaaggagaagttaaagcagatggtttccgaacaagatcattctaagggtcactccacccagatggccaggctgcgccagtctctgtctcaggctttgaaccagaatgctgaacttcgcagccgtctgaatcgtatccattcagaatccataatctgcgatcaggtggtgagtgtcaatatcattcctagccccgacgaggccggcgagcagatacatgtttccttgcctctgtctcagcaggtcgccaatgagagccggttaagtatgagtgagtcggtgtccgagttcttcgatgcacaagaggtactgttaagtgcatcgtcctctgaaaacgaggccagcgacgatgagtcttatattagcgacgtgtctgacaatattagcgaagacaatacaagcgttgcagacaacatttcccgtcaaatcctgaatggtgagcttaccggaggagcattccgaaacggtcgtcgcgcctgcttgcccgctccctgtcctgacaccagtaacattaatttgtggaacatcctgaggaacaacattggcaaagatcttagtaaagtgagtatgcctgtggagttaaatgaacctttaaacacccttcagcacttatgcgaggagatggaatacagtgagctcttggataaagcgtctgaaacagacgacccttacgaaaggatggtcctcgtggccgccttcgccgtttcagggtattgttccacctatttccgcgctggcagcaaacccttcaacccagtcctgggagagacctatgaatgcattcgggaagataaaggcttcaggttcttcagcgagcaggtgtcccatcaccccccgatctctgcttgtcattgtgaatccaagaacttcgtgttctggcaagatattaggtggaagaataaattttggggaaagagtatggaaatcttgccagtgggcactctcaacgttatgttgcccaagtacggagattattacgtctggaacaaagtaaccacctgtatccataacattttgtctgggaggcggtggatagaacattacggggaggtgactattagaaatacaaaatccagcgtttgtatttgtaaactcacatttgtgaaggtgaactactggaattccaacatgaacgaggtccagggagtcgtaatcgatcaggaggggaaggcggtgtaccggctgtttggaaagtggcacgaggggctttactgtggagttgcacccagcgcaaagtgcatttggcggccaggaagtatgcccacaaactacgagttatattatggattcacccgattcgcaattgagctcaatgaactggacccagttctgaaagatctcctgccacctactgatgcaagatttcgacctgatcagcgcttcctcgaggagggcaatctggaagcagctgctagcgaaaagcaacgagtcgaggaactccagcgctccaggcgaaggtatatggaggaaaacaacctcgagcacatccctaaattttttaaaaaagtcatagacgccaaccaacgcgaggcttgggtcagtaatgacacttattgggaactaaggaaggaccctgggttttccaaagtggactctcccgtgctgtggtag

SEQ ID NO: 127599 - DNA, 2529 bp, synthetic construct
  misc_feature 1..2529: note = Description of Artificial Sequence: Synthetic coding sequence
  source 1..2529: mol_type = other DNA
atggattttcaagagagggatccccccttcctgcccgagtcagcccaaagctccaagccctcttctgcacagcaggcctcagaactgtgggaagttgtcgaggagccgagggtgagactgggcaccgagggtgtcatgcccgagagacaggagggtcacctgctcaaaaaacgaaaatggccactgaaaggttggcacaaacgttacttcgttcttgaggacggcatcctgcattatgctactacacggcaggacatcactaaagggaagcttcacggatcaatcgacgttaggttgagcgtcatgagtattaataaaaaagcccagaggatcgacctagataccgaggacaatatataccacctcaagataaagtcccaggacctcttccaatcttgggtcgctcagctgcgagcacataggctagcccatcgcctggatatgccgcgcgggtccctcccctccaccgcgcatcgaaaagtgccaggagcccagttacctacagcagccactgcaagtgccctgcctggtttagggccacgggaaaaagtgtctagctggttgagagactccgacggactggatcgttgctcgcatgagctgagcgaatgccaggggaaactgcaggaactgcaccgcctgctccagtcacttgagtccctgcaccggatcccttctgctcctgtgatccctacccaccaggcaagtgtgaccacagagcgccccaagaagggcaagaggacgtccaggatgtggtgtacgcagtctttcgccaaagacgacacaataggcagagtcggcaggctccatggctctgtaccaaatctctctaggtatcttgagagccgagattcatctggcactcgaggtcttccacctacagactacgcacacttacagcggtctttctgggcactggcacagaaggtacactctagtctgtctagcgtgcttgctgctttaacgatggagcgggaccaactgcgggacatgcatcaggggtcggagctttcacgcatgggagtctccgaagcttctactggacaacgccgcttgcatagtttatccacctccagcgacaccactgccgactctttctcaagcttaaaccccgaagaacaagaagcactatatatgaagggccgcgagcttacaccgcagctgtctcaaacgtcgattctttcactggcagactcacataccgagttctttgacgcctgcgaagttctcctgtccgcctcttcctcagagaatgagggatctgaggaagaagagtcgtgcaccagcgaaatcaccacgagtctgtccgaggagatgctggacctccggggagctgagaggtgccagaaaggaggctgtgtccctggcaggccgatgggtcctccccggagaagatgtctaccagccgcttccgggccaggagccgacgtgagcctctggaacattctgagaaacaatatcggcaaggacctgtcaaaagtgtcaatgcccgtacaactgaatgagcctttaaataccctgcagaggctttgcgaggaacttgaatattcatcactgctggaccaggctagccgcatcgccgatccttgcgagagaatggtctatatcgctgcctttgcggtgtccgcctattcctccacttatcatcgcgccggctgcaagccattcaatcctgttttaggtgagacttatgagtgcgagcggcccgaccgcggcttcaggtttatctctgaacaggtgtcacaccatcctcccattagcgcctgccatgctgagtcagagaatttcgcattttggcaggacatgaaatggaaaaacaagttttggggcaagtccctggagattgtcccggtcgggactgtgaacgtcagtttgccaagattcggggaccacttcgagtggaacaaggtcaccagctgtatccataatgtgctgagtgggcagcggtggattgagcattacggagaggtcctgattaggaacacgcaagactcctcctgtcactgtaagatcaccttttgcaaagccaagtactggtcaagcaacgttcacgaagtgcagggggctgtactctccagaagtggtcgggtcctccacaggttgttcggaaaatggcacgagggattgtacagaggccctactcccggtgggcagtgcatatggaagcctaactccatgcctcctgaccacgagcgtaacttcggattcacccagtttgccctcgagctgaacgagctgactgcagagctgaagcggtctttgccctctacggacactcggcttagaccggatcaaaggtacctggaggagggcaatatacaggcagccgaagcccagaagcgcaggattgagcaacttcagcgtgatagaaggaaggttatggaggagaataatatcgttcatcaagctcgtttctttagacgacagacagactcatcaggaaaggagtggtgggtaacaaacaatacatactggagacttcgcgccgaaccaggctacgggaatatggatggagcagtcctctggtag

SEQ ID NO: 127600 - DNA, 2529 bp, synthetic construct
  misc_feature 1..2529: note = Description of Artificial Sequence: Synthetic coding sequence
  source 1..2529: mol_type = other DNA
atggactttcaagaacgcgaccctccctttctgcctgaatccgcccagagctcaaagcctagcagcgcgcagcaggcaagtgaactgtgggaggtggtcgaggagcccagggttaggctgggtaccgaaggcgtgatgcccgaacggcaagaggggcacctcctgaagaaacggaagtggcctctgaaaggatggcacaaaaggtactttgtcctggaggacggcatactgcattacgccacgaccagacaggacattacgaagggcaaactccatggatccatcgacgtgcggttgtctgttatgagtatcaataaaaaagcccagaggattgatctagacacagaggataatatataccatctgaagattaagtcccaagacctgttccagagctgggtcgcccagttgagggctcaccgcctggcacatcgtctggatatgcccagaggatccctgccaagtactgcccacagaaaagtccccggggcacagctccctactgcggctacagcctcggccctccccggactgggccctcgagagaaggtgtcatcttggctgcgtgacagtgatggcctggatcggtgctctcacgaactctctgaatgtcagggaaaactccaagaactgcaccgtctgctacagtccttggagtcacttcatagaatacccagtgccccagtaataccgacccatcaggctagcgtcaccaccgaacggccgaaaaaaggtaagcgtacgtccagaatgtggtgcactcaatcattcgccaaagatgatacaattggtagagtcggaaggttgcatgggtccgtcccaaatctgagtcgatatttagagtcccgtgacagctccggaacacgaggcctcccaccaaccgactacgcacacctgcaaaggagcttctgggcactggcacagaaggtgcactcctccctgtcttccgttctggccgcccttacaatggagagggaccagttgcgggacatgcaccagggttccgagctgtctcggatgggagtgtctgaagccagcactggccagaggagactgcattctcttagtacatcctccgatacaacagcagatagcttttcctctttaaatccagaggaacaggaagccttgtatatgaaggggagagagttaacacctcagctgagccagactagcatactgtccctggccgactctcacactgaattctttgacgcttgtgaggtcttgctgagtgcctccagcagtgaaaacgaggggtccgaggaggaggaaagctgtacatcagagatcaccaccagtttgtccgaagaaatgctcgacttgcggggtgccgaacgttgccaaaagggaggttgcgtgccaggacgacctatgggaccaccccggcgtagatgtctgcccgccgcctcgggccccggcgctgacgtgtccttgtggaatatcctccgtaataacattggcaaggacctgtcaaaagtgtcgatgcctgttcagttaaatgagccactgaacacactacagagattatgcgaggaattggagtactcatcattgttggaccaggcctcccggatagcggacccctgcgaacgcatggtgtatatcgctgcatttgccgtcagcgcatattcttctacatatcaccgcgccggctgcaagccttttaaccctgtgctgggggaaacttacgagtgtgagcggccagatagaggctttcgcttcatctctgagcaagtctcacaccacccgcccatttctgcctgtcatgctgaatctgagaacttcgcgttctggcaagacatgaagtggaaaaataagttttggggtaagagcctggagatcgtgcccgtgggaacggtgaacgtcagcctgccaagattcggagaccactttgagtggaataaggtaacctcctgtatccacaacgtcctgtctggccaacgatggatagagcactatggagaggtcctgatcaggaatacgcaggattcctcttgtcactgcaaaatcactttctgtaaggccaagtactggtcaagtaacgtccacgaagtgcaaggcgccgtcctgtccagaagtggaagggtgctgcatcgactcttcggaaagtggcacgaagggctgtacagaggaccgactcccggaggtcagtgtatttggaaaccgaatagcatgccccctgaccatgaacgtaacttcggattcacccaattcgccctcgaacttaacgaactgaccgctgagctgaagcgcagcctgcccagcacagacaccaggttacggcctgaccagaggtacctggaagaaggaaatatccaggcagccgaggcacagaaaaggcggattgagcagcttcagagggataggaggaaggtgatggaggaaaacaatattgtgcatcaagccaggttctttagacgacagaccgactcatccggcaaggaatggtgggtcaccaataacacctactggaggttgagagcggagcccggatacgggaacatggatggcgccgtgctctggtag

SEQ ID NO: 127601 - DNA, 2670 bp, synthetic construct
  misc_feature 1..2670: note = Description of Artificial Sequence: Synthetic coding sequence
  source 1..2670: mol_type = other DNA
atggaggggggcctcgcagacggagagcccgatcgcacctcactgctgggcgacagcaaagacgtcttgggcccgagcaccgtggtcgccaattctgatgaaagccagctgttgactcccggaaagatgtcccagcgtcaaggaaaagaggcttacccgacgcctactaaagaccttcaccaaccttccctgtcccctgcatccccgcacagtcaaggttttgagcgaggtaaggaggatattagccagaacaaggatgagtcctcactctccatgagtaaaagtaaatctgagtctaagctgtataacggaagtgagaaggacagttccacttcaagcaagttaacaaagaaagaaagcctgaaagttcagaaaaaaaattaccgtgaagagaagaagcgcgccactaaagagctgctgtccacaatcacagatccatccgttatcgtaatggccgattggctgaagatccgtggaacgctgaaatcatggactaagttatggtgtgttctgaagcccggggtcctgttgatctataaaacccagaagaacggacaatgggtgggcacagtgctgttgaacgcatgcgaaataatcgaaagaccatcaaaaaaagacggcttttgtttcaagctgtttcatccactcgaacagagtatatgggcagtgaagggccctaagggagaggcagtgggaagcatcacccagccactcccatccagctatttgatcattcgggctacctctgagtcggacgggcgctgttggatggatgctctggagctcgctttgaaatgcagctcattactgaaacgtacgatgattcgagaaggcaaggaacacgacctgtctgtgtcctctgattcaacacacgtaaccttttacggcctgctgagagcaaataatctccattcaggagataacttccagctgaatgactcggagattgagcgccagcattttaaagatcaggacatgtacagcgacaaatcagataaggaaaatgaccaggagcacgatgaatcagacaacgaagtgatgggtaaatcggaggaatctgacactgacacaagcgaaagacaggatgattcctatatcgaaccggaacctgtggaacctctgaaggaaacgacctacacagagcaaagccacgaggaactcggggaggccggcgaagcctcccagacagagaccgtgagcgaggagaacaaaagccttatctggaccctcctcaagcaagtgagaccaggaatggatctgtcaaaggttgtcttacccacatttatcctggagccacgttcgtttctggacaagctgtccgattactactaccacgccgattttttgtccgaagccgcactggaggaaaatccttacttcaggctgaagaaagtcgtgaaatggtatcttagtggcttctacaagaaacctaaggggctgaagaagccatataatccaatcttgggagaaacattcagatgcctgtggatccatcctcgcacaaacagcaaaacgttctatattgccgagcaggtttcacaccatcctcctatcagtgcgttttacgtctccaatcgcaaagatggattttgtcttagcggctctatattagccaaatcaaagttttacggtaactctctttcagcaatactggagggtgaagccagactaacatttctgaacaggggtgaggactatgtaatgacaatgccttatgctcactgcaagggcatcctttacgggacaatgacccttgagctcgggggaaccgtgaatataacctgtcagaaaacaggctatagcgccattttggagtttaagcttaagcctttcctgggatcttctgactgtgttaatcagatttctggcaaattgaagctcggaaaagaagtgctggccaccctggaaggtcattgggatagcgaagtgtttataactgataaaaaaaccgacaactccgaggtcttttggaaccccacgcctgacatcaagcagtggcgcctgatcagacacacggtgaagttcgaagagcagggagacttcgagtccgagaaactgtggcagcgagttacaagagcgatcaatgccaaagaccaaaccgaagccactcaagaaaaatacgtgctggaagaggctcagaggcaggcagctcgggaccgtaaaacaaaaaacgaggagtggtcttgtaagttgtttgaactggacccgctcactggcgaatggcactacaaatttgccgacacccggccctgggacccattgaacgacatgatccagtttgagaaggatggcgtgatacagacaaaggttaaacacagaacaccaatggtgtcagtaccaaagatgaagcacaaaccgactcgccagcaaaagaaggttgccaaaggttattccagccccgaacctgacatacaggactcttcaggaagcgaggcacaaagtgtgaaaccgtcgactaggagaaaaaagggtatcgagttgggggacatacagagttccatcgaatctatcaagcaaacccaggaagagattaagcgaaacataatggccttgcggaaccacctggttagctctactccagccactgactacttcctgcagcaaaaagactacttcattatttttctcctcattctattgcaggtcatcataaatttcatgtttaaatag

SEQ ID NO: 127602 - DNA, 2544 bp, synthetic construct
  misc_feature 1..2544: note = Description of Artificial Sequence: Synthetic coding sequence
  source 1..2544: mol_type = other DNA
atgtcgcagaggcaaggaaaagaggcctaccctacacccaccaaagatctccatcagccatctctgtctcccgccagcccacactcccaaggattcgaacgaggcaaagaagacatttcccagaataaggatgagtcttcgttatctatgagtaagagcaagagcgagagcaaattgtataatggcagcgagaaggacagttcaacatcgtccaagctgaccaagaaagagtctctcaaagtacagaagaagaattaccgggaagaaaaaaagcgagccaccaaggagcttctgtccactattaccgatccttccgtaatcgtgatggcagattggctcaaaatacgaggcaccctgaaaagttggactaagttgtggtgcgtgctcaagcccggcgtgttgctgatctacaaaacccagaagaatggtcagtgggttggaacggttcttctgaacgcttgcgagattattgagcgcccctctaaaaaagacgggttctgtttcaaactcttccatcccctggagcagagcatttgggcagtgaaggggccgaagggggaagccgttgggagtatcacacagccccttccttccagttacctcattatcagagccacctctgaatcggatggtcgctgttggatggatgctctggagctggctctgaaatgcagcagcctgcttaaaagaactatgattagagaaggaaaggaacatgatttgtctgtgtcctcagactccactcacgtaacattctacggcttgctgcgagcgaacaacctacactccggcgacaactttcagctgaacgactcagaaatcgaacgccagcactttaaagaccaggacatgtattctgataagtctgacaaagaaaacgaccaggagcatgacgagtcagacaacgaggtgatgggcaaaagtgaagagtccgacacagacacctcagagagacaggatgatagctacattgagccggagcctgtggagcccctgaaggagactacgtatactgagcagagccatgaggaactgggcgaggctggcgaggcctcacagaccgaaactgtgtcagaagaaaataaatctctgatctggaccctcctaaagcaagtgcggcccggcatggacttgtctaaagtcgtgcttcccacctttatcctcgagccacgctctttcttagataaattgtctgactactactaccacgccgattttctcagtgaagctgcacttgaggagaacccgtacttcagattgaagaaagtagtgaagtggtacctgtccgggttctacaaaaagcccaaaggtctcaaaaagccatacaaccctattttaggagaaactttccggtgtctttggatccacccacgcaccaattccaagacattctatatcgccgaacaggtatcacatcaccctcctatctcagctttctatgtatccaaccgcaaggacggcttctgcttatcagggtcaatcctagctaaatctaagttttacggcaactcactgtcagcgattctggaaggagaggctcgccttacctttcttaaccgaggcgaggactacgttatgaccatgccctacgcccactgtaagggaatcctctatggaacgatgacgctggagttgggcgggactgttaacattacctgtcagaaaaccggctacagtgctatccttgaatttaaactcaagccttttttaggttccagcgactgcgtgaaccagatctccgggaaactcaaactaggcaaagaggtgttggctactctagaagggcactgggactcagaagtgttcatcaccgataagaaaactgacaacagtgaggtcttctggaaccccacaccagatataaagcagtggcgtctcatacgacacacagtgaaatttgaggaacagggtgactttgaatctgaaaagttgtggcaacgagttaccagagctatcaacgccaaagaccagactgaggccacccaggaaaagtacgttctcgaggaagcccagagacaagcggcccgtgatcgcaagacgaagaacgaagagtggagctgcaaactgttcgagctggaccccttaacaggagagtggcactacaagtttgccgatacccggccctgggatccccttaatgatatgatccagttcgagaaagacggagtcatccaaacgaaagtcaagcatcgcacaccaatggtctccgtccccaagatgaagcacaagccaacccggcagcaaaaaaaggtggccaagggttattcctctcccgaacctgacatccaggacagctctggctccgaagctcagtccgttaagccatcaaccagacggaaaaaggggatcgagctcggcgacattcagtcatctattgagagcatcaagcagacccaagaggaaattaagcgcaatataatggcgctgcggaatcacctcgtgagtagcacaccagctacagactacttcctccagcagaaagactacttcatcatattcctgctcatcctgctccaggtcatcatcaatttcatgtttaagtag

SEQ ID NO: 127603 - DNA, 2544 bp, synthetic construct
  misc_feature 1..2544: note = Description of Artificial Sequence: Synthetic coding sequence
  source 1..2544: mol_type = other DNA
atgtcacaaagacagggtaaggaggcgtaccctacacccaccaaagacctccatcagccatccctgagtccggcatcacctcactcccaagggttcgaacggggaaaagaagatatctctcaaaacaaagacgagtcctctctgagcatgagtaagagtaaaagcgaatccaagctgtacaatgggtccgaaaaagattccagcacaagcagcaaactcactaagaaagagtccctgaaggtccagaagaagaattatcgcgaggagaagaaacgggctaccaaggagcttctttcaaccataaccgacccatccgtaatagtaatggccgattggttaaaaatcaggggtacacttaagtcatggacgaaactttggtgcgtgctcaaacctggagtgttactcatctacaaaacccaaaagaacggtcagtgggttggcactgtgctgctgaatgcctgcgaaattatcgaacggccttccaaaaaggacgggttctgcttcaagttgtttcatcccttggagcaaagcatctgggcggttaagggtcccaaaggggaggccgtcgggagcattactcagccgctgcctagctcctatctaattattcgagctaccagcgaaagtgatggaagatgctggatggacgctctggagctggcgcttaagtgcagtagtctcctcaagcggacaatgatccgcgaaggcaaagaacatgatttgagtgtaagctcagactctacccacgttacgttttacggacttctcagagcaaataaccttcattctggagacaattttcagctcaacgacagcgagattgaacgacagcacttcaaggaccaagacatgtacagtgacaaaagcgacaaagagaacgatcaggagcacgatgaaagcgataacgaagtgatggggaagagcgaggagagtgacaccgacacgtccgaaaggcaggacgatagttacatcgaaccggagccagtggagccgctcaaggagacgacatacactgagcaatcgcacgaagagctgggggaagctggggaagctagtcagacagagactgtgtctgaggagaataaatcattgatctggaccctcctaaagcaggtcaggccaggcatggatcttagtaaggtcgtcctgcctacatttattttggaaccgaggagtttcttggacaaactttctgactactattatcacgctgatttcctgtcagaggcagccctagaagaaaacccgtattttcgcttgaagaaagtggtgaaatggtatctgtctgggttctacaagaagcctaagggcctgaagaaaccctacaaccctatcctgggagagacatttcgatgcctatggatccatccgcggaccaacagcaaaaccttttatatcgccgaacaggtctcacaccaccccccaatttcagccttttatgtctctaacaggaaggatggattctgcctttcgggctccatacttgccaagtccaaattctatggcaacagcctttctgccatattggaaggagaagcacgtttgacctttcttaataggggggaagactacgtgatgacaatgccctatgcccattgcaaaggcatcctctatggaaccatgacgctggagttaggagggaccgtgaatatcacgtgtcagaaaaccgggtactccgcgattctggagtttaaacttaaacctttcctcgggagcagcgactgtgtgaaccagatcagtggaaagcttaagttggggaaggaggttctggctactctggaaggacactgggattcagaagtctttatcacagataagaaaaccgacaacagcgaagtattctggaacccaacacctgatataaagcagtggagattaattcgtcatactgtcaagttcgaggagcagggagacttcgaaagcgagaaattatggcagagggtgacccgggcaataaacgcaaaagatcagaccgaagcgacacaagaaaagtacgtgttggaggaggctcaacggcaggccgctcgagaccggaagactaagaacgaagagtggtcttgcaagctgtttgagctcgatcctctgaccggggagtggcactacaagttcgccgacactcgcccatgggatccactcaacgacatgattcagtttgaaaaggatggggtgatccagaccaaggttaaacaccgcaccccaatggtgagcgtcccaaaaatgaaacacaagccaacacgtcagcaaaagaaagtagcgaagggctattccagtcccgaacccgatattcaagattcatctggttcagaggcgcaaagcgtcaaaccatcaactcggagaaaaaaaggtattgagctcggcgatattcagtccagtatcgagtccataaagcaaacacaggaagaaatcaagcgcaatattatggccctgcgaaatcatctggtaagcagtacccccgccaccgactacttcttacagcaaaaggactattttattatttttcttctgatcctgctgcaagtcattattaatttcatgttcaagtag

SEQ ID NO: 127604 - DNA, 2187 bp, synthetic construct
  misc_feature 1..2187: note = Description of Artificial Sequence: Synthetic coding sequence
  source 1..2187: mol_type = other DNA
atggagggaggacttgctgatggcgaacctgataggacctcccttctaggcgacagtaaagacgtcctgggacccagcacagttgtggcgaacagtgatgagtctcagctcctgactcccggtaaaatgtcgcaacggcaaggcaaggaggcctacccaacacccacgaaggatctgcatcagcctagcctttcaccagcctcacctcactctcagggatttgagcgtggcaaggaagacatctcgcaaaataaggatgaatcctcgctgagcatgagtaaatctaaaagtgagagtaagctttataacggctccgagaaggattccagcacatcttctaaactcacaaagaaagagtccctgaaagtgcagaagaagaactacagagaggagaaaaagagggcgacaaaagagttgctctccacgatcacagacccttctgtgatcgtcatggcagactggcttaagattagagggaccctcaagagttggactaaactgtggtgtgttctgaaacctggcgttctcttgatctataaaacacaaaagaacggacagtgggtggggaccgtgttactgaacgcctgtgaaatcattgagcgtccctctaaaaaagacgggttttgtttcaaactcttccacccgttggaacaaagcatttgggccgtcaaaggcccgaagggagaagcagtgggcagcattactcagcccctgccttcatcatacttaatcatccgcgctacttccgaaagcgatgggaggtgttggatggacgccctggaactcgctctgaaatgttcatcattgcttaaaaggacaatgattcgggaggggaaggagcacgatctgagcgtgagtagtgatagcactcacgtaacattctatggactgctcagggcaaacaatttgcacagtggggacaatttccaattgaatgacagcgaaatcgaacggcagcacttcaaggatcaggatatgtactccgacaaatccgacaaagagaacgatcaggaacacgacgagagcgataacgaggttatgggaaagtcagaagaaagtgatacggacacctccgagcgtcaggacgacagctatatcgagcctgaaccggtcgagcctcttaaggaaacgacttacacagaacagtcccatgaggagttgggggaggccggggaggcttcccagactgagaccgtttctgaagaaaacaaatctcttatatggacccttttaaagcaggtccggcccgggatggatctgagcaaggtggttctgccgacttttatcctcgaacctaggtcgttcctggataagctctccgactactactaccacgcggattttctctccgaagcagcccttgaagagaacccttattttcgtttaaaaaaagtcgttaaatggtacctgtccggcttctacaagaaacccaaaggactcaagaaaccctacaacccgatactgggggaaacgtttcgatgcctgtggattcatccgcgcaccaattctaagacgttttacattgccgaacaggtgagccatcacccaccaatctctgcattttacgtctcaaaccggaaggacgggttttgtctgtcgggctccatcctcgcgaagtccaaattttatggaaattcactgtccgccatcctcgaaggggaagccaggctgacctttctcaaccggggcgaggactacgttatgaccatgccatatgcacattgcaaggggatattgtacggcaccatgaccctggaacttggaggaaccgtcaatatcacttgtcaaaaaactggctacagcgccatcctagagtttaagctgaagccttttctcggttcatccgactgtgttaaccaaatatctggaaagctaaaactaggtaaggaagtcctcgccacgctggaaggccactgggattccgaagtgtttattacggacaagaagacagataacagtgaggtgttttggaaccccactccagatatcaagcaatggaggctgattcggcacacagtaaaattcgaagagcagggggactttgagagcgaaaagctatggcagcgagtgacccgcgctattaatgctaaagaccagaccgaagcaactcaggaaaaatacgtccttgaagaggctcagcgacaggccgccagagatcgaaagacaaaaaatgagaagaagaagtag

SEQ ID NO: 127605 - DNA, 2625 bp, synthetic construct
  misc_feature 1..2625: note = Description of Artificial Sequence: Synthetic coding sequence
  source 1..2625: mol_type = other DNA
atggagggagggctggccgatggggaacctgataggacctctgccaactctgacgaaagccagctgctgacaccaggtaaaatgtcccagaggcaaggaaaggaagcgtatcctactcccaccaaggatctccaccagccatccttgagtccggcatctccccactcccagggatttgagcggggcaaggaagacataagccagaataaagacgaatcgagtctctcgatgtctaagtccaagagcgagtcaaagctatataatggatcagaaaaagacagttctaccagctccaagttaaccaaaaaggagagcctgaaggtgcagaaaaaaaattaccgggaggagaaaaaaagagctactaaagaactgctgagcacgattaccgacccgagtgtgatcgttatggcagattggctgaaaattagaggaaccctaaagagctggacaaaactgtggtgcgtgctaaagcctggagttttactgatttataagacccagaaaaacggtcagtgggttgggaccgtgttgcttaacgcttgcgagatcattgaaagaccctctaaaaaggatggattctgtttcaaactgtttcacccattagagcagagtatctgggcagttaaggggcctaagggcgaagcggttggctctattacacagcccttgccttcaagttacctgataatcagggccacaagtgagagtgacggtcgctgttggatggacgccctcgagttagctttaaagtgtagctccctcttgaagcggaccatgatcagagaaggcaaggagcacgacctctctgtgtcctcagattcgacacatgtcactttctatggcttacttcgggctaacaacctccactctggcgataatttccagctgaatgactccgagatagagaggcagcacttcaaggatcaagacatgtactcagataaatccgacaaagaaaatgatcaagaacacgacgagtctgacaatgaggtgatgggtaagagtgaggaatccgacactgacacttccgaaaggcaggatgactcctacatagagccagagcccgtcgagccgttaaaggagaccacatataccgagcagagccacgaggagcttggtgaggctggggaagcgtctcagacagagacggtcagcgaggagaataaatccctcatatggactctgctgaagcaggtgaggccaggtatggacctgtcaaaagtggtgctgccaacattcatcttagaaccccggtccttcctggataaactgtctgattactactatcacgccgacttcctgtctgaggcagccctggaggagaacccatatttcagacttaaaaaggtcgtcaagtggtatttaagcggcttttataagaagccgaagggtctgaaaaaaccgtacaatcctatcctgggggagacatttaggtgtctgtggatccacccgcgaaccaactccaagacgttctacatcgctgaacaggtaagccatcacccaccaatttctgcgttttacgtgagcaaccggaaggacggcttctgtctgtccggctccatcctggcaaagtctaagttctacggaaattctttatcagccatacttgagggcgaagcgaggctgacatttttaaacaggggcgaggattatgtgatgacaatgccctatgcgcactgcaagggaatcctgtacggaaccatgacgctggaacttggggggacagttaacattacatgccaaaagacgggatacagcgccattcttgaattcaaactcaagccattcctgggctcttccgattgcgtgaatcaaatttccggcaagctcaagctcggcaaggaggtccttgccacactggaaggtcactgggatagtgaagtctttatcaccgataaaaaaacggacaattccgaggttttttggaatccaacgcctgacattaagcagtggagactgatacgccatacagtgaagttcgaagaacagggtgatttcgaatccgagaagctttggcaacgggttacgcgcgctattaatgctaaagatcagactgaggctacccaggagaaatacgtgcttgaagaagctcaacgccaagctgcacgggatcgaaaaactaagaatgaagagtggagctgtaagttgttcgagttagatcccctgaccggggagtggcactataagtttgcggacacccggccatgggacccattaaatgacatgatccaatttgaaaaggatggcgtgattcagaccaaagtaaagcatagaaccccaatggtttccgtcccaaagatgaagcacaaacccaccagacagcagaagaaggtggctaagggctactcctcccctgaaccagatatccaggacagctccggctcagaggcccagtccgttaaacctagcacccgacgcaagaagggaattgaactcggcgatatacagtccagtattgaatcgatcaagcaaacgcaggaagagattaaacggaacattatggcactgcgaaatcacctggtgtctagtacgcccgccacagattactttctgcagcagaaagactacttcataatctttctgctcatcttgctacaggtcatcatcaactttatgttcaaatag

SEQ ID NO: 127606 - DNA, 162 bp, synthetic construct
  misc_feature 1..162: note = Description of Artificial Sequence: Synthetic coding sequence
  source 1..162: mol_type = other DNA
atggagggggggctcgcagatggagaacccgaccgcactagtctgctgggcgatagcaaagacgtgctgggaccgagcacaaattctgatgaatcacagctgctcactccgggcaagatgtcccagcgccagggtaaggaggcataccccactcctacctag

SEQ ID NO: 127607 - DNA, 231 bp, synthetic construct
  misc_feature 1..231: note = Description of Artificial Sequence: Synthetic coding sequence
  source 1..231: mol_type = other DNA
atgagccagcgtcagggcaaggaggcgtaccccacccccacaaaggatcttcatcaaccctcactgtcacccgcgtctccacattcacaaggattcgaacgaggaaaggaagacatatcacagaacaaggacgagagtagcctaagtatgtcaaagagcaagagtgagagcaagctgtacaatggatccgagaaggattctagtacctcttctaagctgaccaagaaatag

SEQ ID NO: 127608 - DNA, 177 bp, synthetic construct
  misc_feature 1..177: note = Description of Artificial Sequence: Synthetic coding sequence
  source 1..177: mol_type = other DNA
atggagggaggcctggctgatggggagcccgatagaacgagtttgctgggagatagtaaggacgttctcggcccgagcaccgttgtggcgaattccgacgagagccagcttctaacacctgggaagatgtcccaaaggcagggtaaagaagcctaccctacacccacaaaggactag

SEQ ID NO: 127609 - DNA, 336 bp, synthetic construct
  misc_feature 1..336: note = Description of Artificial Sequence: Synthetic coding sequence
  source 1..336: mol_type = other DNA
atgagccaaaggcaaggcaaggaggcttatcccacccccacaaaagacctccatcagccgtcactgagccccgcatcccctcatagtcaggggtttgagcgggggaaggaggatatttcacagaacaaagacgaatcgagcctgtccatgtcaaaatctaaaagcgagtcaaagttgtacaatggctcagaaaaggactccagcacttcttcaaagctcactaaaaaggaaagcttgaaagttcaaaagaagaactaccgcgaggaaaaaaagagagcaaccaaagagctgctctctactatcaccgatccctcagttatagtcatggcagattag

SEQ ID NO: 127610 - DNA, 2226 bp, synthetic construct
  misc_feature 1..2226: note = Description of Artificial Sequence: Synthetic coding sequence
  source 1..2226: mol_type = other DNA
atgccttaccggcgagttacgtcagggcggttacttagcctcgccgcccccaagatggcttcgattatggaagggcctctcagtaaatggactaacgttatgaaaggttggcagtacaggtggttcgtgcttgactacaatgcagggctactcagctactacacgtcaaaggacaaaatgatgagggggtcacggcggggatgcgtgcggctgcggggggcagtgatcggcattgacgatgaggacgacagcaccttcacaataacggtggaccagaagacatttcacttccaggcccgggacgctgacgagcgtgagaagtggatccacgccctagaggaaactatcctgaggcataccctgcagctccagggtttggactcaggatttgtgccttcagtccaggatttcgacaaaaaattgaccgaggccgacgcttacctacaaatcctgatcgagcagctgaagctatttgatgacaagctgcagaattgcaaagaagatgagcagaggaagaaaatagaaacactgaaagaaaccacaaatagcatggtcgagtccattaaacattgcatcgtgttgctccagatcgcaaagtcaaccattaacccagtggacgctatttatcagccttctcctctagaaccggtgattagcaccatgccatcacaaactgttctgccacctgagccagtacaattgtgcaagtctgagcagcggccctctagcctgcctgttggccccgtgttggccacactaggacaccatcagacaccgacgcctaacagtaccggcagcggacacagtccaccatcatcttctctcacatcccctagccatgtcaatttatccccgaacaccgtgccagagttctcctactcaagctctgaagatgagttttacgacgccgatgagttccaccagagcgggagtagtcctaagaggctgatcgatagtagcgggagcgcatcggtgctgactcatagcagctctggtaattccctgaaaaggcccgatacaaccgaatcgttaaattcgtcactatctaatggaacgtctgacgcagatctgttcgacagccacgacgaccgagacgacgacgccgaagctggctccgtggaagagcataaatcagtcatcatgcatttactatctcaagtccgcctgggcatggacctcactaaggtggtgctccccaccttcattctggagagacgcagcctcctcgagatgtacgcggacttcttcgcgcaccccgacttatttgtaagtatttctgaccagaaagacccaaaggaccgcatggttcaagtcgtcaagtggtatctgtcagcgttccacgctgggcgcaaaggaagtgtagcaaaaaagccctacaacccaatactcggggagattttccagtgccactggaccctgccgaatgatactgaagaaaatacagaacttgtttccgaaggccccgttccttgggtgagtaagaactctgtgacatttgtcgctgagcaggtctcccaccatcctcccatcagtgccttctatgcagagtgcttcaacaaaaagattcagttcaacgcgcacatatggacgaaaagtaagttcctgggcatgagcatcggcgtgcacaatattgggcagggatgtgtgtcatgcctggactacgatgagcactacatcttgactttcccaaatggctatggaagatccattctcactgtgccatgggtagaactgggcggcgagtgcaatattaattgctccaagacaggatacagcgccaatatcatcttccataccaagcccttttatggcggtaagaaacatcggatcacagcagaaatctttagtcccaacgacaaaaagagcttctgtagcatcgagggggagtggaacggggtgatgtacgccaaatacgccaccggggagaacaccgtctttgtagacacaaagaagctgcccatcattaagaaaaaggtacgtaagctggaggatcaaaacgaatacgaaagcagatccctctggaaggatgtcaccttcaatttgaagattagggatattgacgctgctaccgaagcaaaacacagactggaggaacggcagagagccgaggctcgcgaacggaaagagaaagagatccaatgggagacacggctgtttcacgaggacggtgagtgctgggtgtatgacgagcccctgctcaaacgcctgggggcggccaaacactag

SEQ ID NO: 127611 - DNA, 1881 bp, synthetic construct
  misc_feature 1..1881: note = Description of Artificial Sequence: Synthetic coding sequence
  source 1..1881: mol_type = other DNA
atggcatttcttctggcaacttgtggggggttagatagcggtttcgtaccatctgtacaggattttgataagaagctgactgaagctgacgcttaccttcagattctgattgagcagctgaagctgttcgatgacaaactgcaaaattgtaaagaagatgagcagcgaaaaaaaatcgagaccttaaaggaaactacaaattctatggtcgagtccatcaaacactgcatcgtcctcctgcaaattgctaagtcaacgattaaccctgtcgatgcgatttatcagccaagtcctctcgaacccgtcatctccaccatgccttctcaaaccgtactgcctcctgaaccagtgcagctttgcaagtcagagcagaggccctcctcactgccagttgggccggtcttagcgactctcggacatcaccagactccgacaccaaactctaccggatcggggcattcccccccaagcagttcgctcacatccccttctcatgtaaacctgagccccaacacagttccggaattcagctatagcagctccgaggatgaattttacgatgccgatgaattccaccaaagtggcagttcgccaaagcggcttattgactcatctgggagcgcctccgtcctgacacactcaagcagtggcaactccctgaagaggccagatacaacggagtcactgaatagtagcctgtctaacggaactagcgatgcagatctgtttgactctcacgacgaccgggatgacgatgccgaggccggcagtgtggaagaacacaagtccgtcatcatgcacctgctgagccaggtccgcctggggatggacctgacaaaagttgttctcccgacctttatattggaacggaggtctctgctggagatgtatgccgactttttcgcacatcccgatctgttcgtgtctatctccgaccagaaagacccgaaggacaggatggtccaggtcgtgaaatggtatctttcagcttttcatgcagggaggaagggaagcgtggcaaaaaagccttacaatccgatcttgggagaaatattccagtgtcattggactttacctaatgatactgaagaaaacaccgaactcgttagcgaaggccctgtgccctgggtgtctaagaactcggtgacctttgtagccgaacaagtatcacaccaccccccaatttccgcgttttacgcggagtgttttaataagaaaattcagtttaacgcacatatttggaccaaatccaaattcctgggtatgagtatcggagtgcacaacatcggacagggatgcgtaagctgcctggactatgatgagcattacattcttacgttccccaatggatacggtcgctccattctgactgtaccatgggtagagctagggggcgaatgtaatatcaactgtagtaagaccgggtactctgcaaacatcatattccataccaagcccttctatggcggaaagaaacaccggattaccgcagagattttttcgcctaatgacaagaaatctttctgttcgattgagggtgagtggaatggggttatgtacgctaaatacgctactggagaaaacacagtgttcgtcgacaccaaaaagttgccaatcataaagaagaaggttcggaagctggaagaccagaatgaatacgagtcgcgttccctgtggaaggatgtgactttcaatttaaagatacgagacatagacgcagcaacagaagctaaacatcgcctggaagaacggcaaagggcagaggcacgggaacggaaggaaaaggaaattcagtgggaaacccggttgtttcatgaagacggggagtgctgggtttatgacgagcctctcctgaagagactgggcgcagccaagcactag

SEQ ID NO: 127612 - DNA, 2265 bp, synthetic construct
  misc_feature 1..2265: note = Description of Artificial Sequence: Synthetic coding sequence
  source 1..2265: mol_type = other DNA
atgccatatcgccgggtcacttctggccgccttctgtccctggccgcaccgaagatggcatctatcatggaaggcccactgagcaagtggacgaacgtgatgaaaggatggcagtatagatggttcgtcctggattataacgccggcttgttgagttactatactagcaaagataagatgatgcgtggcagcagaaggggatgcgtaagactgcggggggcggtaatcggcattgacgacgaagacgatagcacattcaccatcacagtggatcagaagacattccatttccaagcccgagacgccgacgaaagagaaaaatggatacacgcgttagaggaaacaatattgcggcatacgctgcagttacaaggtctggatagtggctttgtgccctccgtccaggactttgacaagaagttgaccgaggctgatgcatatctgcaaattttgatcgaacagctcaagttgttcgacgataagctccagaactgtaaggaagacgagcagcgaaagaaaattgagaccctcaaagagaccactaactcgatggtggagtccatcaagcattgcatcgtcctgctgcagattgccaaagaccagtcgaacgccgagaagcacgccgatggaatgattagtaccatcaatcccgtcgacgctatctatcagccctccccgctcgaaccagtgatcagtactatgcccagccagactgtgctcccaccagagccagtgcagctatgcaaatctgagcaacgcccttcctcactccctgtgggccccgtgctggccactctcggccatcaccagactcccacaccaaacagcaccggatcaggccattctcccccctcatcttcccttacatcaccctcccatgtcaatctgagtccgaacactgtcccagaattcagctactctagttcagaagatgagttttatgatgccgatgaattccaccagtcaggctcctccccaaaacggttgattgattcctcaggctctgcaagcgtgttgacacactctagctcagggaactctctcaagagaccagataccacagagagtttgaactcttccctgtccaacggtacaagcgacgccgacttgtttgactcccatgatgacagggatgacgacgcagaagccggctcagtagaggaacacaagagtgtgattatgcacctcctgtcacaggtccggctcggaatggatttgaccaaggtggtcttgcccacattcatcttagagagaaggagcctgctcgagatgtacgctgatttctttgctcatcctgatctattcgtgagcatctccgaccagaaggatccaaaagacagaatggtgcaggtggtgaaatggtatctgtccgcctttcatgctgggcgcaagggaagcgtggccaagaaaccgtataatcccatcctcggcgaaatttttcagtgtcactggacacttcctaacgataccgaagagaataccgagcttgtctcagaaggccctgtgccttgggtgtccaagaatagtgtgacattcgttgccgagcaagtgtctcaccatccaccaatttccgccttttatgcggagtgttttaataaaaaaatccagtttaacgctcacatttggaccaagtctaaattcctgggcatgtctatcggcgtccataacattgggcagggctgtgtcagctgcttggattacgacgagcattatattttaacctttccaaatggatatggcagatctattctcactgtaccgtgggtcgagctcggaggagagtgcaatatcaactgcagcaaaacaggctactccgcaaatataatctttcatacaaaaccattttatggcggaaagaagcaccgaatcaccgcagaaatattcagccctaacgacaaaaagagcttctgtagtatagaaggcgaatggaatggcgtgatgtatgccaagtatgcgactggtgagaatactgtcttcgttgacacaaaaaagctgcctatcattaaaaagaaggtacgtaaattagaagaccagaacgagtatgaatctcggtcactgtggaaggatgtaacctttaacctcaaaatacgtgacattgatgcagccaccgaggctaagcatcgccttgaggaaaggcagagagctgaggcaagagagagaaaagaaaaggaaattcagtgggagacacgtctctttcacgaggacggagagtgttgggtctacgacgaacccttattgaagagactaggagcggccaaacactag

SEQ ID NO: 127613 - DNA, 2172 bp, synthetic construct
  misc_feature 1..2172: note = Description of Artificial Sequence: Synthetic coding sequence
  source 1..2172: mol_type = other DNA
atggcctccattatggaaggccccctgtcaaaatggacaaacgttatgaagggatggcagtacaggtggttcgtgttagattacaatgctggtcttctgagttattacacttccaaggacaagatgatgcgcggaagccgaaggggctgcgtgcggctaagaggcgcagtcatcggcattgacgacgaagacgactcgacttttaccatcacagtggatcagaagacctttcattttcaggcacgggacgctgacgaacgagagaaatggatacacgctctggaggagacaattttaagacacaccctgcagctgcaggggctagacagcggattcgtgccctccgtacaggactttgacaaaaagctgactgaggccgacgcctaccttcagattttaatcgagcagctcaagctgtttgacgacaaactgcaaaactgcaaggaggatgagcagcggaagaagatagagaccctcaaggagacgactaatagcatggtggagagcattaagcactgcatcgtgctattgcagatcgcgaagagtacaataaaccctgtagatgccatctatcagccttcaccactagagccagttatctcaactatgcctagccagaccgtgctccctccggagcccgtccagctgtgtaagtctgagcaacgaccgtcctctctgcctgtcggccccgtattagctacacttgggcaccaccaaacccccacccccaactctacaggtagcggccattcgcccccttcctccagccttacaagcccttcacacgttaaccttagtcctaatacagttccagagtttagctattcttctagcgaagatgagttttatgacgcagacgagtttcatcagtctggctcgtccccaaagcgactgatcgactcttccggatctgcatccgtgcttacacattcttcatctggaaactctctcaagcgcccggatactaccgaaagtctgaattcatcactatctaacgggacatctgacgcagatctgttcgacagtcacgacgaccgcgacgacgacgccgaagcaggaagcgtagaagagcacaaaagtgtaatcatgcacctccttagtcaggtaaggctgggaatggacttgactaaagtggtgctgccaacttttatcctcgaacgccggagtttgctggagatgtacgcagatttcttcgcccacccagatctcttcgtgagcatctcagaccaaaaggaccccaaggaccgcatggtgcaggtggtgaagtggtacctgtccgccttccatgcaggtcggaaaggctcagtggcaaagaaaccatacaaccctattctcggagaaatatttcagtgccactggacacttccaaatgatacggaggagaacacagaactggtcagcgaaggacctgtgccatgggtgtcaaagaatagtgttacctttgtggcggaacaggtgtcacatcatcctcctatatccgctttctacgctgaatgttttaataaaaaaattcaattcaacgctcacatatggaccaagagcaaattcctaggcatgagcattggcgtgcataatatcggccaaggctgtgtaagttgcttggattatgatgagcattacattctgacctttcctaatggatacggtcgatcaatccttaccgtgccatgggtggagctaggcggtgaatgcaatatcaactgttctaaaacagggtactcagccaacataattttccacacaaaacctttttatggcggcaaaaagcataggataacagcagagatcttttcccctaatgacaagaagtctttttgtagcatcgagggggagtggaatggggtgatgtacgctaaatatgctaccggggaaaataccgtgttcgtcgatacgaagaagctgcccatcataaagaaaaaggtccgtaaactcgaggatcagaacgagtacgagtccaggtcactatggaaggatgtgacctttaatctcaagattagggacattgatgccgccacggaggccaagcaccggcttgaagagagacaaagggcagaggcacgggagcgtaaagaaaaagaaatccagtgggagaccaggctctttcacgaagatggggagtgctgggtgtacgatgagccactcctgaagaggttgggagccgccaaacactag

SEQ ID NO: 127614 - DNA, 2211 bp, synthetic construct
  misc_feature 1..2211: note = Description of Artificial Sequence: Synthetic coding sequence
  source 1..2211: mol_type = other DNA
atggcctctattatggaagggcccttgtctaaatggacaaacgttatgaagggttggcagtaccgatggttcgtgctcgactataacgctggattactgtcttactacactagcaaggacaagatgatgaggggctctcggcggggatgcgttcggcttcgaggcgcagtgataggtatagacgatgaagacgatagcacatttactatcactgttgaccagaaaaccttccacttccaggcgcgcgatgccgacgagagggagaaatggattcacgctctggaggaaaccatccttcggcacactctgcagcttcagggcctggattctggcttcgtgccttcagtccaggatttcgacaagaaactcaccgaggccgacgcctatctgcaaatcttgatcgagcagctgaagctattcgacgacaagctccagaattgcaaggaggacgagcagaggaagaaaatagagaccctgaaggagacaacgaactcaatggttgagtccatcaaacactgtattgtgctgctgcagatcgccaaggatcagagcaacgctgaaaagcacgccgatggcatgatatcaacaatcaaccctgtcgacgcgatctatcagccctcaccgctggaacccgtgatctccactatgccgtcgcaaacagtgctgccacccgaacctgtgcaactctgtaagagcgaacagagacccagttccttgcccgtcgggcctgtccttgctactctgggacatcaccaaactcctaccccaaactccaccggatcggggcacagccctccatcaagctctctgacatccccttcacatgtcaatctgtccccaaacacagtccccgagttttcctacagttccagcgaggatgagttttacgacgctgacgaattccatcagtcagggtccagtccgaagcgcttgatcgattcctctggatccgcctccgtgctgactcattcatcctccggaaatagcctgaagaggccagacacaaccgagtccctaaacagttccctcagcaatggaacgtcggacgccgacctcttcgactcccacgatgaccgcgacgatgacgcggaagccgggtcagtggaagaacacaaatcagtcatcatgcatctcctgtcccaggtacgtctcggaatggatcttaccaaggtggtgctgccaacattcatactggagcgtagatcactgttagaaatgtatgctgacttttttgcccatcccgacctgttcgtctcaataagtgatcagaaagatcctaaggacagaatggtgcaggttgtaaagtggtatctcagcgcctttcacgctggtagaaagggcagcgtcgctaagaagccatataatccgatcctcggggaaatcttccagtgccactggactcttcccaatgataccgaagagaacaccgaattagtttctgaagggcctgtgccctgggttagtaagaatagcgtgacgtttgttgcagaacaggtgtctcaccatcctccaatctctgctttctacgctgaatgcttcaacaaaaaaatccagttcaacgcccacatttggacaaaaagcaagttcctgggcatgtctatcggggtgcataacattgggcaaggctgtgtgtcttgcctggactatgacgagcactatatacttacctttcccaacgggtatggcaggagtatacttacggtcccttgggtggagctgggaggcgaatgcaacatcaattgctccaaaacgggatatagcgctaacatcatttttcatacaaaaccgttctacggagggaaaaaacatagaatcacggcagagatcttttcacctaacgacaagaagtccttttgcagtatcgagggagaatggaacggagtaatgtatgctaagtatgcaaccggcgaaaataccgtctttgtggacactaagaagctccccatcatcaagaaaaaggtgcgaaagctggaagatcagaacgagtatgaatcccggtcactatggaaggacgttacttttaatctgaagatccgggacatcgatgctgccacagaagccaaacataggcttgaagagcgacagcgggctgaagcaagggagagaaaagagaaagagatccaatgggagacaaggctgttccatgaagatggagaatgctgggtttatgacgagcccctgctgaagcgcctcggcgcagcaaaacactag

SEQ ID NO: 127615 - DNA, 1716 bp, synthetic construct
  misc_feature 1..1716: note = Description of Artificial Sequence: Synthetic coding sequence
  source 1..1716: mol_type = other DNA
atggtcgagtccattaagcactgtattgtgttgctgcagattgcaaaggaccaatccaatgccgaaaagcacgcagacggaatgattagcaccatcaacccagtggatgccatttaccaaccatcacctctcgagccggtgatctctacgatgcccagtcagactgttctccccccggaacccgtgcaactgtgcaagagtgagcagcgcccttctagtcttcccgtcggtccagtactggccacactcggtcatcatcagacccccactcccaacagcactggcagtggacacagtccaccttcaagctcgcttaccagtcccagtcatgtcaacctttcaccaaacactgtgccagaattttcctactctagctctgaagacgagttttacgatgcagatgaatttcaccaatctggatctagtccaaagcgcctaatagactcctcaggaagcgcctcagtccttacacatagctcttcaggcaatagcttaaaacgcccggataccactgagagcctaaactcctctttgagtaatggcacctccgacgccgatctgttcgattcgcacgatgacagggatgacgacgcagaagcgggatcggtagaggaacacaaatctgtcataatgcatcttctgagtcaggttaggcttgggatggacctcacgaaggttgtgttgcctacctttattttggaacgcaggtcactgttggaaatgtatgccgacttctttgcacaccctgatctgtttgtgtctatttcagaccagaaggatcctaaagaccgaatggttcaggttgtaaaatggtatctatccgccttccatgccggccgcaagggaagcgtcgcgaaaaagccttataaccctatcctgggcgaaattttccagtgccactggaccctgccgaatgacaccgaagagaacacagaattagtctccgagggtccagtgccctgggtttcaaaaaacagtgtcacgttcgtggcggagcaggtgtcccatcaccccccaatcagcgccttttatgccgagtgcttcaacaagaagattcagttcaatgctcatatttggaccaaaagcaaattcctaggcatgtccataggcgtgcataatataggacaggggtgtgtctcctgtctggattacgatgagcattatatcctgacttttcccaacggatacgggaggtctattctgactgtcccctgggtcgaactaggaggcgaatgcaatataaactgctccaaaactgggtattcagccaatataatcttccatacaaaaccattttacggaggcaagaagcacaggatcaccgctgagatcttttcccctaatgataagaagtctttttgcagcatcgagggggaatggaacggagtcatgtacgccaagtatgctactggtgaaaatacggtatttgtagacacaaagaaactccccattattaaaaaaaaggtccgaaagctggaggaccagaacgaatacgagagccggagcctttggaaagatgtcacttttaacttaaaaatcagggatattgatgccgctacagaagccaagcatcggctagaggagcgtcagagagcagaagctcgggaacgaaaagagaaagaaatccagtgggaaactcgccttttccacgaagatggcgaatgttgggtatatgatgaacctttactgaagagattgggggccgccaagcattag

SEQ ID NO: 127616 - DNA, 2241 bp, synthetic construct
  misc_feature 1..2241: note = Description of Artificial Sequence: Synthetic coding sequence
  source 1..2241: mol_type = other DNA
atggctagtattatggagggccctctgtctaagtggacaaacgtgatgaaggggtggcaatacagatggttcgtgctggattacaacgcaggattactgagctactacacctccaaggataagatgatgcgtgggtcccggcgcgggtgcgtgcgccttaggggggccgtaattggcatcgacgatgaggatgactccacattcactattactgtagaccaaaagacatttcactttcaggcccgcgacgccgatgagcgggagaagtggatacacgcactggaggagactattctgcgacacaccctccagctgcaaatctcaacgacccttgccttcttccaatcatctggcatctctccagtccttgaattctctaaaattattggcctggattctggctttgtgccgtcagtgcaggattttgataagaaactgactgaggctgatgcatacctgcagattttgattgaacagctcaagctgttcgacgataagctgcaaaattgcaaggaggatgagcagcggaaaaagattgaaacgctgaaagaaacaacaaattcaatggtagagagcatcaagcattgtatcgtcctgcttcagattgctaagagcaccattaatccggttgacgcaatctaccaaccctcccctctggagcccgtgataagtacaatgccatcccagacagtgctgcctcctgaaccagttcaactgtgtaagtcagaacagcgcccgagtagcttacctgtgggacccgttcttgcaactctgggccaccaccagacccccaccccaaacagtactgggtccggtcatagtcctccatccagctcgttaactagcccatcacacgtgaatctcagcccgaacaccgtgccagagttcagctattcctcctccgaagacgagttctacgatgctgacgaattccatcagtctggctcttcacctaagaggctgattgatagctctggcagtgcatcagtgttgacacacagtagctctgggaatagcttgaaacgcccagacacaacggagtctctgaattcttccctcagcaacgggacctccgacgccgatctattcgacagtcatgacgacagggacgatgatgcagaggccggttctgtcgaggaacacaaatccgtaattatgcacctgcttagtcaggtgaggcttggcatggatctaactaaagtggtccttcccacttttattctcgagagacgctcgcttttggagatgtacgcggactttttcgctcacccagacttattcgtcagcatctccgatcagaaggacccaaaagataggatggtacaggttgtcaagtggtacctaagtgccttccatgccggcaggaaaggatctgtcgccaagaaaccttacaacccaattctgggggagatcttccagtgtcactggaccctgccgaacgacaccgaagaaaacacggagcttgtctccgaaggaccagtgccctgggtaagcaaaaactcagtgacgttcgtcgccgagcaggtgtctcatcatcctccaatctcagctttttatgctgaatgtttcaataagaaaatccaattcaacgcgcatatttggaccaagtcaaaattcttgggtatgtccataggtgtgcacaatattgggcaaggctgtgtaagttgtttggactatgatgaacactacattctgaccttcccaaatggttacggaaggtccattctgaccgtcccgtgggtcgagttgggaggagaatgcaacatcaactgttctaaaactggatattccgccaatatcatcttccacactaagcctttttatggggggaaaaaacaccggatcaccgccgaaatcttcagtcctaacgacaagaagtcattttgtagtatcgaaggggaatggaatggagtcatgtacgcaaaatacgctacaggcgagaataccgtcttcgtagataccaaaaaactgcctatcattaagaagaaagtgcggaaattagaagaccagaatgagtatgagtcccggtcactgtggaaggacgtgacatttaatcttaaaattcgggacatcgatgcagccacggaagcaaagcatcggcttgaggagcgccaaagagcggaggcacgggagcgaaaagagaaggagatacagtgggaaacacggttattccacgaagatggggagtgctgggtttacgacgagcccctcctgaaacggctgggcgctgcgaaacattag

SEQ ID NO: 127617 - DNA, 2160 bp, synthetic construct
  misc_feature 1..2160: note = Description of Artificial Sequence: Synthetic coding sequence
  source 1..2160: mol_type = other DNA
atggcgagcatcatggaggggccactgtccaagtggaccaatgtcatgaagggctggcagtaccggtggtttgtgctagattataacgctggcctgctgagctattataccggggccgtaattgggatcgacgatgaagacgattcaacattcaccatcactgtggaccagaaaacattccacttccaggctcgtgatgccgatgaaagggagaagtggattcacgcattagaggagaccatccttaggcacaccctgcaactgcaaggactagattccggatttgtaccctcagtgcaggacttcgataagaaattaacagaggctgatgcctatctgcagatccttattgagcaactgaagctgtttgacgataagttacaaaattgtaaagaagacgaacagcgcaaaaaaatcgagactctgaaagagacaaccaacagtatggtagaaagtatcaagcattgtatcgtcttgctccagatagccaaagaccaatcgaatgctgagaaacacgccgacggcatgatcagcacaatcaacccagttgacgctatctatcagccctcacctctcgagccagttatttccacaatgccgagtcagactgtcctgccgcctgagcccgtgcagttgtgtaagtccgaacaaaggccatcctcccttccagttggccctgtgcttgccactcttggacatcaccagacacctactcccaatagtaccggaagcggtcattcccctccctctagttccttgacatccccctcacacgtgaatctcagtcctaacactgttcccgaattcagctacagtagttctgaggatgagttttacgacgccgatgagtttcaccagtctggctctagtcccaaaagactgatcgactcaagtgggtctgcttcagttctgacacattcatcctccggcaattcacttaagcgccccgatacaaccgagtccctcaactccagcctttctaacgggacttctgatgccgatctcttcgactcccacgatgatagagatgacgacgctgaagctggctcggtagaggagcacaaaagcgtgatcatgcatctgctgagccaggtgcggttaggaatggatctgactaaggttgttctgcctacattcatcctcgagaggaggtccctactcgagatgtatgccgatttcttcgctcacccagatctatttgtctctatctcagaccaaaaggaccctaaggacagaatggtccaagtggtgaagtggtacctgagcgcttttcatgctggccggaaaggatctgtcgctaagaagccctacaatccaattctgggagaaatttttcaatgccactggacccttcccaatgatactgaggaaaataccgagcttgtcagcgagggccccgtgccgtgggtctccaagaactccgtgaccttcgttgccgagcaggtaagtcatcacccacccattagtgctttttacgcagagtgcttcaacaaaaaaatccaattcaatgcccacatatggacaaagtccaagttcttgggcatgtccatcggcgtccacaacattgggcaggggtgcgtgagttgtctggactacgatgaacactacatcctgacattcccaaacggctacgggcgcagcattcttaccgtcccttgggtcgagttaggtggcgagtgcaatattaactgctccaaaaccgggtacagcgcaaatatcatctttcatacaaagccattttatggcggtaaaaaacaccgaatcacagcagaaatattttcgccaaatgacaagaagagcttttgttccatcgaaggagagtggaatggcgtcatgtatgccaagtatgctaccggggagaacacagttttcgtcgacactaaaaagcttccaattattaaaaaaaaagtgagaaagttagaagaccagaatgagtatgaatcgagaagcctgtggaaggacgtgacattcaacctgaagattagagatatcgacgccgccactgaagcaaagcatcgcctggaggagcgtcagcgcgccgaggcccgtgagcggaaggagaaggagatccagtgggaaactcgtcttttccacgaagacggagaatgctgggtctacgatgaacccctactcaagcgcttgggtgccgcgaagcattag

SEQ ID NO: 127618 - DNA, 1677 bp, synthetic construct
  misc_feature 1..1677: note = Description of Artificial Sequence: Synthetic coding sequence
  source 1..1677: mol_type = other DNA
atggtggagagcatcaaacactgcatagtactgttacagatcgctaaatcaacgattaacccagtggatgcaatttatcagccctcgcctctggagccggtgataagtacaatgccatcccagacagtattgcccccagaacccgtacagctttgcaagtccgagcagcgtccaagttccctgcctgtcggacctgtcttggcaacattgggtcaccaccagacccccactccaaattcaacaggctccggtcacagccctccaagtagtagcttgacgtcacccagccacgttaacctgtccccaaataccgtcccagaatttagctacagcagttctgaagatgagttctatgacgccgacgaatttcatcagtctggatccagtcccaagagactgattgattccagcgggagtgcttctgtactgactcattcctcctcaggaaactccctcaagcgccctgacaccacagagagcctgaacagctcattatcgaatggaacatccgacgcagatctattcgatagccacgacgatcgtgatgacgatgcagaggctggcagtgttgaagaacacaaatccgtcatcatgcatctgcttagtcaagtcagactcggcatggaccttacaaaggtggtcctgcccacttttatcctggagcgtcggagcctgctagaaatgtacgccgacttctttgcccaccctgatctattcgtcagtatttctgaccaaaaggacccaaaggatagaatggtccaggtcgtgaagtggtatctgagcgccttccacgccggtcgcaaggggtctgtggcaaagaagccctacaatcccattctgggcgaaattttccaatgccactggacacttcccaacgatacagaagaaaatacagagctcgtgtccgagggccctgtcccctgggttagcaaaaactctgtgacttttgtggccgagcaagtgtcgcaccatccccctatctctgcattctacgctgaatgctttaataaaaagatccagttcaatgctcatatatggactaagagtaagtttctgggaatgtccatcggtgtgcacaacataggtcaaggctgcgtgtcttgtctggactacgacgaacactacatcctcacctttcctaatggatacggtagatcaatcctcacagtgccttgggtcgagcttggtggtgaatgcaacattaattgttccaaaactggatattccgccaacatcatattccacacgaagccattttatgggggcaagaagcaccggatcacggctgaaattttttcccctaacgacaaaaagagcttctgtagtattgagggggagtggaatggggttatgtacgcaaaatacgccactggggagaacaccgtttttgtcgacacaaagaaacttccaatcatcaaaaagaaggtgcgcaaactcgaagaccagaatgagtacgagagcagaagtctctggaaagacgtaaccttcaacctaaaaattcgggatatcgacgccgccacggaggcgaaacacaggctggaggagaggcagagggcagaagccagagagcgcaaggagaaggagattcaatgggagaccaggctttttcacgaggatggtgagtgttgggtctacgacgagcctctactgaagcgactgggcgctgccaaacattag

SEQ ID NO: 127619 - DNA, 99 bp, synthetic construct
  misc_feature 1..99: note = Description of Artificial Sequence: Synthetic coding sequence
  source 1..99: mol_type = other DNA
atggttgagtcaatcaagcattgtatagttctgctccaaatcgcgaaggatcaaagcaacgccgagaagcacgctgatggaatgatcgtatcgctatag

SEQ ID NO: 127620 - DNA, 1677 bp, synthetic construct
  misc_feature 1..1677: note = Description of Artificial Sequence: Synthetic coding sequence
  source 1..1677: mol_type = other DNA
atggtcgaatctatcaaacattgtattgtcctgttgcagatagccaagtctactattaatcccgtagacgcgatttatcagccaagtcccctggagccggtcatctctactatgccctcacaaactgtgctccccccggaacctgtgcagctgtgtaagagcgagcagaggccctcttctctgcctgtggggcctgtcctcgccacactgggccaccatcagacacctaccccaaattctaccggatccggccatagccccccaagctctagtctgacttcccccagccacgtgaacctgtcaccgaatactgtaccagagtttagctactccagcagtgaagacgagttttatgatgcagacgagttccaccaaagtggcagtagtcctaaacgtctcatagactctagcggcagcgcctcagtgttaacacactcctcaagcggcaactccctgaagcgcccggatacgacggagtccctgaattcgtcactgtctaacggaacaagcgatgctgacctgtttgacagccatgatgatagagacgacgatgccgaagctgggagcgtagaagagcacaaatccgtgatcatgcaccttcttagtcaagtgcgcctgggcatggatcttaccaaagtggtgctcccaacttttatattagagaggcgctctctgcttgaaatgtacgctgacttctttgcacacccggatcttttcgtgtcaatctctgaccagaaagacccgaaggacaggatggttcaagtggttaaatggtatctctctgcctttcatgccggccgcaaaggatctgtggccaagaaaccctacaatcccatcctgggggaaatctttcagtgtcattggaccctgcctaatgatacagaagaaaatacagaactagtgtcagagggccccgttccgtgggttagcaagaatagcgtcacgttcgtggctgagcaagtatcacatcaccctcccatctcagctttctatgccgaatgctttaataagaagatacagtttaacgctcacatctggacaaagagcaaatttcttgggatgtcaattggggttcacaacattggccagggatgtgtgagctgtctagactacgatgagcattatattcttactttccccaatggttacggaagatccatccttactgttccttgggtggagctcggcggagagtgcaacattaattgctcaaagaccggttattccgcaaacatcatttttcatacgaaaccattctacgggggcaagaagcatagaatcacagctgagatatttagcccgaacgacaagaagtctttttgttctattgaaggggagtggaatggggtgatgtatgccaagtatgctacaggagagaataccgtgttcgtcgacacaaaaaaactgccaataatcaaaaagaaagtgcgcaagttagaggaccagaatgagtacgaatcacggagtctatggaaggacgtgacatttaatctcaagatacgcgatatagatgcggccactgaggctaagcaccgtttagaggagcgacagcgagctgaggccagggaaagaaaagagaaggaaatccagtgggaaacaaggctgtttcacgaggacggagaatgttgggtatatgacgaaccattactcaaaaggttaggcgctgccaagcattag

SEQ ID NO: 127621 - DNA, 1968 bp, synthetic construct
  misc_feature 1..1968: note = Description of Artificial Sequence: Synthetic coding sequence
  source 1..1968: mol_type = other DNA
atgggttgctgctgctgctggttggttttcactgaggctcgagacgctgacgagcgcgagaaatggatccatgcacttgaggagaccatcctcaggcacaccctgcagctccaggggctggactccgggttcgttccttcggtgcaggacttcgacaagaagctgaccgaggcagacgcctacctgcagatactgatcgaacagcttaagctgtttgatgataaattacagaattgcaaggaagatgagcagcgcaagaaaattgagacactgaaggaaaccactaactcaatggtggaatctattaaacactgcatcgtgttgcttcagattgccaagagtaccatcaaccctgtggacgccatctaccagcctagccccctggagcctgtcatcagcaccatgccatcacagacagtgctgcccccagaacctgtgcagctatgtaagagcgaacagaggccttctagcctgccagtgggacccgttctggctacccttggccatcatcagacacccacccctaactcaactggtagtgggcactctcccccgtcctctagcctgacgagcccctctcacgttaatctttcccccaacacagtacccgagttctcttactcgtcaagcgaggatgagttctacgatgcagacgagttccaccagtctggctcttcccccaagcggcttatcgattcatctggttcagcgtctgttttgacacactccagctccggaaattccttgaaaaggcctgatacaacagagtccttgaactcatccctttcaaacggaaccagcgacgcggatctgtttgatagtcatgatgacagggacgacgatgccgaggcaggctctgtggaggaacacaaatctgtaattatgcacctgctcagtcaggtgagactgggaatggacttaacaaaggttgtactcccaacattcatcttagagcggcgctcactgctcgaaatgtatgcagactttttcgcccatcctgatctgttcgtaagcatctctgatcaaaaggatccaaaggaccgtatggtgcaggtggtgaagtggtatctcagtgccttccacgccggacgcaaaggctcagtcgccaagaagccatataatcctatcctgggtgagattttccaatgccactggaccctccctaacgacacagaggaaaatactgaattggtgagcgagggtccagtaccttgggtgagtaagaattccgtcacatttgtcgccgagcaggtcagccatcacccacctatttctgcattctacgctgaatgcttcaacaaaaaaattcaatttaacgctcacatatggaccaagtccaaattccttgggatgtccattggagttcacaacataggacaaggctgcgtgtcgtgtctggactacgatgagcattatattctcacatttcccaatggatacggcaggtctattcttaccgtgccctgggttgagctcggaggagagtgcaatatcaattgttccaaaacaggctatagcgctaacatcatctttcatacaaagcccttctatgggggcaagaaacaccggataacagctgagattttttctcccaacgacaagaagtctttttgctcaatagagggggaatggaacggtgtcatgtacgccaaatatgctactggtgaaaataccgtctttgttgacactaagaagctgcccattattaagaagaaagtaaggaagctggaagaccagaacgaatatgagtctaggagcttgtggaaagacgtcacttttaacttaaaaattcgtgatatcgatgccgcaaccgaggcaaagcatcgattggaggagagacagcgcgcagaagcaagggagcggaaggagaaagagattcagtgggagacacgcctattccacgaggatggcgagtgttgggtctatgacgaacctctcctcaaacggctgggggctgctaaacactag

SEQ ID NO: 127622 - DNA, 330 bp, synthetic construct
  misc_feature 1..330: note = Description of Artificial Sequence: Synthetic coding sequence
  source 1..330: mol_type = other DNA
atggtggagagcattaaacactgcatcgtcctgctgcagattgctaaatccacaattaatccggtggatgctatctatcagcctagtccactggagcccgttatcagtacaatgccttcccagactgtcctgcctcccgagcccgtgcaattgtgtaagagcgagcagcgcccgtccagcctaccagtgggccctgtgctagccacactgggccaccaccagacacctacaccaaactccactggatccggccacagccccccatcttcctctctgacttccccctcccacgtgaacctcagtcctaacactgtccccgagttcagctag

SEQ ID NO: 127623 - DNA, 1170 bp, synthetic construct
  misc_feature 1..1170: note = Description of Artificial Sequence: Synthetic coding sequence
  source 1..1170: mol_type = other DNA
atggagggagccctggccgccaactggtcagctgaagctgccaatgcaagcgcggccccccctggagccgaaggcaaccgaacggcgggcccaccacggaggaacgaggctctggccagggtggaggtggcggttttatgtcttatcctgctgctggccctgagtggcaatgcctgcgtgttgctagctctgaggacaacacgtcagaagcactccagactgttttttttcatgaaacacctgagcatcgcagacctcgttgtggccgtcttccaggtactaccacaactcctgtgggacatcacctttcgcttttacggaccagacctgctttgcaggcttgtcaaatacctccaggtggtaggcatgtttgcatctacttatctactgctgctgatgtccctggaccggtgtttggcaatttgtcagccactgaggagtctgaggcgccggaccgatagattggctgtactggctacctggctggggtgtctggtggctagcgcaccccaggtgcatatcttcagcctgcgggaggttgctgacggcgtcttcgactgttgggccgtgtttattcagccctgggggcccaaggcctatatcacatggatcacacttgccgtgtatatcgttcccgtgattgtactcgccgcttgttacgggcttatctcctttaagatatggcaaaatctgcgcctcaaaacggcagcagctgcggcagcagaggcgccagagggcgcggctgcgggagatggggggcgcgtggcactcgcccgcgtgtcttccgttaaacttatttccaaggccaagatccgtactgttaagatgacgttcatcatcgtgctggctttcatcgtgtgctggacgcccttcttttttgtccagatgtggtccgtttgggatgctaatgctccaaaagaagcttctgctttcataatcgtaatgctgctggcgagcctgaacagttgttgcaacccatggatttatatgttatttaccggacaccttttccatgagctggtgcagcgatttctctgttgtagcgcctcatacttaaaaggtagaagactcggagaaacaagcgcgtccaaaaagtcaaatagctcctcttttgtgttaagccatagatcatcatctcagcgaagctgttcccaaccctccactgcctag

SEQ ID NO: 127624 - DNA, 132 bp, synthetic construct
  misc_feature 1..132: note = Description of Artificial Sequence: Synthetic coding sequence
  source 1..132: mol_type = other DNA
atggagggagccctcgctgctaattggtcagccgaggcagcaaacgcaagtgccgcacccccaggtgccgagggcaacagaaccgccgggcccccacgcaggaatgaagccctggcccgggtcgaagtttag

SEQ ID NO: 127625 - DNA, 279 bp, synthetic construct
  misc_feature 1..279: note = Description of Artificial Sequence: Synthetic coding sequence
  source 1..279: mol_type = other DNA
atggaaggggccctggccgccaactggtctgcagaagcagccaatgcctcagcggccccacctggagcggaaggcaaccggactgccgggcccccaagacggaacgaggctctcgcccgagttgaggtagcagtcctctgcttgattctccttctggcacttagcggcaacgcctgtgtccttctggccctgcggacaactagacagaagcattctagactgttttttttcatgaaacatctgagcatagcagacctggtcgtcgcagtgtttcagtag

SEQ ID NO: 127626 - DNA, 1518 bp, synthetic construct
  misc_feature 1..1518: note = Description of Artificial Sequence: Synthetic coding sequence
  source 1..1518: mol_type = other DNA
atggcttcaggacggagggcccctcgtacagggttgttagagctgcgggctggggccggatcaggcgctggcggagaacgttggcaacgagtcctcctgtccctagctgaagacgtgttaaccgtatctcccgctgatggggatcctgggcctgaacccggtgcccctagggagcaggagcctgcacagctcaacggggccgctgagcccggcgcaggcccaccgcagcttccagaggcacttctgctccagagacgccgagtcaccgttcggaaagctgacgctggcgggctagggatttccattaagggaggtcgggagaataaaatgccgattctcatttctaagatctttaaaggcctcgccgcggaccagaccgaggcgctttttgttggggatgcaattctctctgtaaacggtgaggacctgtcaagtgccacacacgatgaagctgtgcaggtactgaaaaaaaccggaaaagaggtggttctggaggtcaagtacatgaaggacgtctccccatactttaagaactccaccggcggcactagcgtgggctgggattctccacccgctagtcctctccagagacaaccctcctctcccgggccaactccaagaaacttctctgaggcaaagcacatgagtctcaagatggcctacgttagtaagcgatgcactcccaacgacccagagccaaggtacctcgagatctgttcagccgacggacaagataccctgttcctgagagcaaaggatgaagcctctgcgaggagctgggctacagccattcaggcacaggtgaacaccctcaccccacgcgtgaaggatgagttacaggccttgctcgcggcaacctcgaccgccggctctcaggacatcaagcaaataggctggctgaccgagcagttgccaagtggcggaacggctcccaccctcgccctgctcactgagaaggagttgcttctctacttgtccttaccggagacgcgagaggctctgagccgcccagcccgcactgcacctctaatagcaactcgactcgtccacagtggaccctccaaggggtctgtgccctacgatgctgagctatcttttgcgctgcggactgggactcggcatggagtcgatactcatctctttagcgtggagagccctcaagagttagctgcatggactcgccaactggtggacggctgtcaccgtgcggcggagggagtgcaggaagtgtccaccgcctgtacttggaacggcagaccgtgttcactgtccgttcacattgacaaggggtttactctctgggcggcagaaccgggggccgcacgggctgtgctacttcgacaacccttcgaaaaactacagatgtccagtgatgacggggccagcctactctttctggacttcggcggcgcggaaggcgagatccaactggacctgcacagctgccctaagacaatcgttttcattattcactctttcctgagtgccaaggtgactaggttgggactgctcgcctag

SEQ ID NO: 127627 - DNA, 441 bp, synthetic construct
  misc_feature 1..441: note = Description of Artificial Sequence: Synthetic coding sequence
  source 1..441: mol_type = other DNA
atgggctttctccgcaggctgatctatcgaagacgtcccatgatatacgtggagtctagcgaagaaagcagcgacgagcagccagacgaggtggagagtcccactcagtctcaggattcaactcccgctgaagaacgggaggatgaaggagcgtcagccgctcagggacaggagcccgaagctgactcacaagagctcgtccagccaaagaccggctgtgagttaggtgacggcccggatactaagcgggtgtgccttaggaatgaggagcagatgaagttgccagcagaagggcctgaaccggaggccgattcccaggagcaggtacatcctaagactggctgtgagcgcggggatgggcccgatgtgcaagaactgggacttccaaaccccgaagaggttaagaccccagaagaggacgagggacaaagtcaaccgtag

SEQ ID NO: 127628 - DNA, 336 bp, synthetic construct
  misc_feature 1..336: note = Description of Artificial Sequence: Synthetic coding sequence
  source 1..336: mol_type = other DNA
atgagtgagctgcttcgggccaggtctcagagcagcgagcggggaaatgaccaggagagtagtcagcccgtgggttcagtgatcgtacaggagcctaccgaggaaaaacgccaggaggaggaacctccgaccgacaatcaggggatagctcccagcggcgagattgagaatcaggctgtacctgcctttcagggtccggacatggaagcattccagcaagaactggccctgctgaaaattgaggacgagccgggtgacgggcctgatgtgagggaagggattatgcctacatttgacctgaccaaggtgctggaggcaggggacgctcagccatag

SEQ ID NO: 127629 - DNA, 195 bp, synthetic construct
  misc_feature 1..195: note = Description of Artificial Sequence: Synthetic coding sequence
  source 1..195: mol_type = other DNA
atgtcagagctgctgcgagccagatctcagtcttcagaacgcggaaatgatcaggagagcagccagcccgttggttctgtgatcgttcaggaacccacagaagagaagagacaggaagaagaaccccccactgataatcaaggtatcgccccgagcggagagattgaaaaccaagccgtgcctgcttttcaatag

SEQ ID NO: 127630 - DNA, 342 bp, synthetic construct
  misc_feature 1..342: note = Description of Artificial Sequence: Synthetic coding sequence
  source 1..342: mol_type = other DNA
atgtctggccatcagaggaccaggtccagaagccgtgaaaggagagacgatcaagactctaatcaccctgtaggagccgtggtcgcccaagagctgcccagtaacgaccagcttcagcaggaggagccccctattgaatcccaggactatactccaggtcaggagagggacgagggagctttggatttccaggttctgggcctggccgcctatctttgggagctcacccgcagtaagacaggaggggagcgtggggatgggcccaatgtgaaaggtgagttcctgcctaatttagagcctgtcaagattcctgaggcaggagaaggccagccatctgtgtag

SEQ ID NO: 127631 - DNA, 342 bp, synthetic construct
  misc_feature 1..342: note = Description of Artificial Sequence: Synthetic coding sequence
  source 1..342: mol_type = other DNA
atgtctggacaccagaggactcgaagtcggtcccgggaacgcagggacgatcaggattcaaatcatccggtcggggccgtagtcgctcaggagctcccatctaacgatcagctacagcaggaagaaccgcctattgagtctcaggactacacccctggacaggagagggatgaaggggcgctcgattttcaagtgctgggtctagcagcctatctgtgggagctaacaagaagcaaaactggaggcgagagaggagacggccccaatgttaaaggggagttcctgcccaatcttgagccagtcaagatacctgaggccggagaaggacagccttctgtgtag

SEQ ID NO: 127632 - DNA, 1458 bp, synthetic construct
  misc_feature 1..1458: note = Description of Artificial Sequence: Synthetic coding sequence
  source 1..1458: mol_type = other DNA
atggctgctgtgtggcagcaggtgcttgccgtagatgcacgatataatgcctacagaacacctacattcccccagttcagaactcagtatattcggagaagaagccaactgctgcgggagaacgcgaaggctggtcacccgcccgccctgaggcggcagtacctgcgcctgcggggccagctgctgggacagaggtatgggcctctgagtgaacccggttccgcccgggcttactcaaattcaattgtcagatcctcccgcactactttggatagaatggaggacttcgaggatgacccacgcgccctaggcgcgagaggacaccggcggagcgtgtcccggggatcataccagctgcaagcgcagatgaaccgggctgtgtacgaagatcgccccccagggagcgtcgttcctacaagtgctgcggaagcatccagggcaatggccggcgatacaagcctctcagagaactatgcctttgcaggcatgtaccacgtgtttgatcagcacgtcgatgaagctgtaccaagagtccgcttcgccaatgacgatcgacatcgactcgcctgctgctctttagacggatctattagtctgtgccaactcgtacctgccccacctacagtgctccgggtgctgcgcggacacaccagaggtgtgagtgactttgcttggagtcttagcaatgacatcttggtgtccacatcactcgacgccaccatgcggatctgggctagtgaggacggacggtgtattcgtgaaattcctgatccagattccgcagagctgctatgctgcactttccagcctgttaacaataacctgactgtggtggggaatgctaaacataatgttcacgtcatgaatatctccacgggaaagaaagtcaagggaggctccagcaaactcaccggtcgcgtgttggccctgtcctttgacgcgcctggccgattgttgtgggcaggcgatgatcatgggtctgtgttttccttcctgtttgacatggctactggtaaattgacaaaagccaaacgcctagtggttcacgagggctcccctgtaacctctatctctgcgaggtcatgggtcagtagagaagctcgggacccgtctctgctgatcaatgcttgtctcaacaaactgctgttataccgggttgttgataacgaaggaacactgcaactcaaacgtagcttccccatcgagcagagcagtcacccagtgaggtccatcttctgtcccctcatgtcattcagacagggagcctgcgttgtaactggaagtgaggatatgtgtgtgcacttttttgatgtggagcgcgcggccaaggctgcagtgaataagctccagggccatagcgcccccgttcttgatgtgtcttttaattgcgatgaatctctactggcctcctcagacgcctccggaatggttattgtgtggagacgcgaacagaaatag

SEQ ID NO: 127633 - DNA, 309 bp, synthetic construct
  misc_feature 1..309: note = Description of Artificial Sequence: Synthetic coding sequence
  source 1..309: mol_type = other DNA
atgtctgctagggtacgctcccggagcaggggaagaggagacggtcaggaagccccggatgtggtggcgtttgtggcaccaggtgagagtcagcaggaggagcccccgacggacaaccaagatattgagcccggacaggaacgggaaggcactccgcccatagaagaaaggaaggtcgagggggattgccaagaaatggacctggaaaagactaggagcgaacgcggcgacgggagtgatgtgaaggaaaagacaccaccaaacccgaagcatgccaagaccaaggaggcaggcgatggtcagccttag

SEQ ID NO: 127634 - DNA, 1575 bp, synthetic construct
  misc_feature 1..1575: note = Description of Artificial Sequence: Synthetic coding sequence
  source 1..1575: mol_type = other DNA
atgagcgataacggcgagcttgaggataagccgccagcaccacccgtccgaatgagtagcacaatcttctcaactggcggtaaagaccctctgtccgccaatcactccctgaaacccttgccctcagtgcccgaagagaaaaagcctcggcacaaaattatcagtatcttcagcggaaccgaaaagggctcgaaaaaaaaggagaaagagagacccgagatctcacccccctcggacttcgagcacacgatccacgtgggcttcgacgctgtgaccggcgagttcaccggaatgcccgaacagtgggctcgcttactgcagacaagcaatataactaagctcgagcagaagaaaaaccctcaggctgtcctcgacgtgctcaaattttacgacagtaataccgtaaaacagaaataccttagttttaccccaccagagaaagacgggttcccatccgggacccctgctctgaacgccaagggaacagaggccccagctgtggtcacggaggaggaggatgacgacgaggaaaccgcccctcccgtaattgcgccccgtcccgatcacacaaaatccatatatacccgatcagttattgatccagtgcctgctccagtcggcgactcacacgtagacggtgcagctaaaagtctggacaagcagaaaaaaaagacgaaaatgacagatgaggaaatcatggagaagctaagaactatcgtgagcattggcgatccaaagaaaaaatacacacgatatgagaaaatcgggcagggcgcttccggcacagtgttcaccgctactgatgtagccctcgggcaggaggtcgccatcaaacagatcaacctccagaaacagcctaagaaggagcttatcatcaatgagattcttgtgatgaaggagctgaaaaaccccaacattgtgaatttcctagattcttatcttgtaggcgatgagctgttcgtggtcatggagtatctggcaggcgggtccctgaccgacgtggtcaccgaaacctgcatggacgaggcccagatcgctgctgtatgccgggagtgtctgcaagcacttgaattcctgcatgccaatcaggttatccacagggatataaaatccgacaacgtgcttctggggatggagggcagcgtgaaattgacggatttcggattttgcgcgcaaatcaccccagaacagtcaaaacgtagcaccatggtgggaacaccgtactggatggcaccagaggtcgttactaggaaggcttacgggcctaaggtggacatctggtccctcgggatcatggccattgagatggtggaaggggagcccccttaccttaacgaaaacccactgcgggctctgtacttgatagccaccaacggcacccctgaactgcaaaaccctgaaaaactgagccctattttcagagactttttgaatagatgcctcgagatggacgtggaaaaacgagggtccgctaaagagctactgcagcaccctttccttaagctggcaaaaccattgagtagtctcacaccccttatcatggccgccaaggaggcaatgaagtcgaatagatag

SEQ ID NO: 127635 - DNA, 1680 bp, synthetic construct
  misc_feature 1..1680: note = Description of Artificial Sequence: Synthetic coding sequence
  source 1..1680: mol_type = other DNA
atgtcagatggcctggacaacgaggaaaagccccccgcccccccccttcgaatgaacagtaacaatcgcgattccagcgccttgaatcactccagcaagcctctccctatggcgccggaggagaaaaataaaaaggcaagattgcgtagtatttttcctggtggcggggataagaccaacaagaagaaagagaaggagagaccggagatctcgctccccagcgactttgagcacacaatccatgtggggttcgacgccgtgacaggcgagttcacccccgatctgtatggctcccagatgtgccccggcaagctgccggagggcatccccgagcagtgggctaggttacttcagaccagcaacatcactaaactggaacaaaaaaaaaatccacaagccgtactggacgtcctcaaattctatgatagtaaagagaccgtgaacaaccagaagtacatgagttttacaagcggcgataagtccgctcacggatatatagcggcacacccttctagtaccaaaaccgcatctgaaccaccactggcccctcccgtctctgaagaagaagatgaggaggaggaggaggaggaggatgaaaatgaacctcctccagtcattgcccccagacctgaacacacgaagtctatttatactcgaagcgtggtcgagagcatcgcgtcccccgccgtccctaataaggaagtcaccccaccctccgctgaaaacgccaactcttccacactgtataggaacactgaccggcaacggaagaagtcgaagatgaccgatgaggagatcctcgagaagcttaggtcaatcgtgagcgtaggcgacccaaagaagaagtacaccagatttgaaaaaattggacagggagcttcaggcactgtctatacagcactggacatcgctactggtcaagaggtggctattaagcagatgaaccttcagcagcaacctaagaaggagttgattatcaacgagattttggtcatgagagagaataaaaacccaaacatcgtgaattatctggactcatacttagtgggggacgagctgtgggtcgtaatggagtacctcgctgggggctccctgaccgacgtggtaacagaaacttgcatggacgaggggcaaatagccgctgtttgtcgagagtgcctacaggctttggactttctccattccaatcaggtcatccacagagatattaagagtgataacatcctcctggggatggacggttctgtgaaactcaccgactttgggttctgcgcacagattacccccgagcagagtaagcgcagtactatggtgggcacaccatactggatggccccagaagttgtcacgcggaaagcctatggtccgaaggtggatatctggtcgttggggattatggccattgagatggtggaaggagagcccccttatctgaacgagaatcctctcagggcgttgtatctgatcgccactaacgggacgcctgaattgcagaatccagaacgcctgtccgctgtattccgtgatttcttaaatcggtgcctggagatggatgtggataggagggggagcgccaaagagttgcttcagcatcccttcctcaaattggccaagccactgagttcattaacccctcttattatcgcagccaaagaggcaattaaaaatagcagccggtag

SEQ ID NO: 127636 - DNA, 1743 bp, synthetic construct
  misc_feature 1..1743: note = Description of Artificial Sequence: Synthetic coding sequence
  source 1..1743: mol_type = other DNA
atgtccgatggcctcgacaacgaggaaaaaccgcccgccccacctctcagaatgaactctaataatcgggattccagcgccctgaaccactcatcaaagccgctgccaatggcccctgaggaaaaaaataagaaagcgagactgagatctattttccccggcgggggcgacaagaccaacaagaagaaggaaaaagaacggccagaaatatccttgccttctgactttgagcacactatacatgtcgggttcgatgccgttacaggggagtttacaaacagtccctttcagacctctcgtccagtcaccgtggccagcagtcaatccgagggcaagatgccggacctatatggcagccagatgtgtcccggaaagctcccagaagggattccggagcagtgggccagacttctccaaacaagtaatattacgaagctggagcaaaagaagaacccacaagccgtgctagatgtgcttaagttttatgactctaaagagactgttaacaaccagaaatacatgtctttcacctctggagacaagagtgcgcacggctacattgccgctcatccaagttccacaaaaacggcgtcagagcctcccctcgcaccacctgtgtcagaggaggaggatgaagaggaggaggaggaggaggacgaaaacgagccgcctcccgtgattgcccctcggccggagcatacgaaatccatttatacgagatccgtggtagagtccatcgcctctcccgccgtgcccaataaggaagtcactccccctagtgcagagaacgccaactccagcaccctgtacagaaatacagatagacaaaggaaaaagtccaagatgacagacgaagaaatcctggagaagctgaggtctattgtgtcagttggcgatccaaaaaaaaaatataccagattcgagaaaattgggcagggcgcctccggcaccgtatataccgcccttgatatcgcaactgggcaggaggttgccatcaagcaaatgaatcttcaacaacagcctaaaaaggagcttattataaatgagattttggtcatgcgcgaaaataagaatcctaatatcgtaaattatctggatagctacctcgttggggacgagttgtgggtcgtcatggaatacctcgcgggcgggtcccttaccgatgtggtgacggagacctgcatggacgagggccagatcgcagctgtctgtcgggaatgtctgcaagccctggactttcttcattcaaatcaagtgattcaccgggacattaagagcgataacattctcctgggtatggatggcagcgtgaagttgaccgactttggcttctgtgctcagatcaccccagagcagagcaaacggagcactatggtgggtaccccttattggatggcacctgaggtggtcactcggaaggcttacgggcctaaggtggacatctggtcattgggcatcatggccatcgaaatggtcgagggagaacccccgtacttaaacgagaatcccctgcgcgctctatacctgatcgccaccaatggaaccccagagcttcaaaatccagagaggctgtccgcggtctttagggacttcctgaacagatgcttggaaatggacgtcgatagacgcggaagtgcaaaggagctactgcagcacccttttctcaagcttgccaaacctctctccagcctgaccccgctcataatcgccgccaaggaggccataaaaaactctagcagatag

SEQ ID NO: 127637 - DNA, 1635 bp, synthetic construct
  misc_feature 1..1635: note = Description of Artificial Sequence: Synthetic coding sequence
  source 1..1635: mol_type = other DNA
atgtctgatggacttgataatgaagagaaacctccagcaccgcctctcagaatgaattcaaacaacagagactcctctgccttgaaccactcttccaagccactgccaatggcccccgaagagaagaataagaaggcccggttgcggtcaattttccccggaggaggagataagaccaataaaaaaaaggagaaagagcgcccggagatctctctgccctcagattttgagcatactatccatgtcgggtttgatgctgtgactggggaatttactgggataccagaacagtgggccaggttgctgcagaccagtaacattactaagctggagcagaaaaaaaatccacaggcggttttagacgtgctcaagttttatgactctaaagaaacagttaacaaccagaaatacatgtcattcacttcaggagacaagagcgcacacgggtacatagccgctcacccttcctccaccaaaacagcatccgagccacctctggcaccaccagtatctgaagaagaagatgaagaggaggaggaggaggaagacgagaacgagccccccccagttatagccccacgtccagaacatactaagagcatctacacccgctctgtggtggagagtattgcgtccccagcagttccaaacaaggaggtgaccccgccctcagctgaaaacgccaacagcagtaccctataccgaaataccgatcggcagcgcaaaaaatccaagatgacagatgaagaaatactggaaaagctgcgtagcatcgtcagtgtgggagacccaaaaaaaaaatatacccggttcgagaagatcgggcagggtgctagtggtacagtgtacaccgctctcgatattgcaaccggacaggaggtggccatcaaacagatgaatctccaacagcagcccaaaaaagagttaattattaacgaaatcctcgtcatgagagagaataagaacccgaatatcgtcaattatttggacagttatctggtcggggatgaattgtgggtggtcatggagtatctagccggcgggagccttacagacgtggtaactgaaacgtgtatggacgaggggcaaattgccgcagtgtgtcgggaatgtctgcaggccctggatttcctgcacagcaatcaggtgatacaccgcgatataaagagcgataatatccttctcggtatggacggatctgtgaaactaactgatttcggcttctgcgcacagattactcccgaacagtccaaacggtcgactatggttggcacaccctattggatggcccctgaagttgttacgcggaaggcatacggaccgaaggtcgatatctggtccttaggcatcatggcaatcgagatggttgagggggagcctccctacctcaacgaaaaccctctgagggccctgtacctgatagcgacaaacggaacccctgagctgcaaaaccctgaaagattgagcgctgtgttcagggatttcctgaaccgatgtttggaaatggacgtagaccgtagaggctcagccaaagagcttcttcaacaccctttcctcaagctggcaaagcccctgtcctctctcaccccactcatcatcgccgccaaagaagctatcaagaattcttcgagatag

SEQ ID NO: 127638 - DNA, 1680 bp, synthetic construct
  misc_feature 1..1680: note = Description of Artificial Sequence: Synthetic coding sequence
  source 1..1680: mol_type = other DNA
atgagcgacgggcttgacaacgaggaaaagcctcccgctccacctcttcgcatgaattccaataacagagattcatcagcccttaatcattcttctaagcccctccccatggcccccgaagagaagaacaagaaggctcggctgcggagcattttcccaggcggcggtgataaaaccaacaagaaaaaagagaaagaacgccctgagattagcctgcctagcgacttcgagcataccatccatgtgggatttgacgctgtcaccggagaatttaccccggatctctatgggagtcaaatgtgccccggtaaattgcccgaggggatccctgaacagtgggcacgcctgctccagacctctaacataactaaactcgagcagaagaagaacccccaggcggtcctggacgtgctcaaattttacgacagtaaggaaaccgttaacaatcagaaatacatgagcttcaccagcggcgacaagagtgcccatggctatatcgctgcacacccgagttcaacgaaaactgcatccgagccccctttggctccgccggtttctgaggaggaggatgaggaagaggaagaagaggaagatgaaaacgaaccaccccccgtaatagctcctcgacccgagcacacaaaaagtatttatactagatcagtggtggaaagtatcgctagtccagctgttccaaacaaagaggtcactccaccaagtgccgaaaacgccaactcctctacgctgtatcgaaatactgatagacaaagaaaaaagtccaaaatgaccgacgaggaaattctggaaaaactcagatccattgtgtctgtgggcgacccaaagaaaaaatatacccgctttgagaagatcggacagggtgcctccgggaccgtgtatacagccctggatatcgctaccggccaggaggtcgcgattaaacagatgaatctccagcagcagcctaagaaggaactaattattaacgaaatcctggttatgcgtgaaaataagaatccaaatatcgttaactacctggacagctacctcgtcggcgacgagttatgggtggtcatggagtatctggccgggggctctctgacggacgttgtcaccgagacctgcatggatgaaggtcagatagccgctgtgtgtagggagtgtttgcaagcgctggactttctacactccaaccaggtgatccaccgtgatattaagtccgacaatatcctgctgggtatggatgggtctgtaaagttaactgatttcgggttttgcgcccagataactccggaacagtccaaaagatctactatggtcggcacgccttattggatggcgccagaggtcgtgactcgcaaagcttacggaccaaaagtggatatttggagtctgggtatcatggctattgaaatggttgagggggaacccccctacttgaacgaaaatccacttagggcgctgtacctgattgctactaacggcacccctgaactgcaaaaccccgaacggctgagcgccgtttttcgggattttctgaaccgttgcctggaaatggacgtggataggcggggaagcgccaaagagcttttacagcacccatttctgaagctggccaagcccctgtcttcactgacccccctgattattgccgcaaaggaggccataaaaaatagcagtcgctag

SEQ ID NO: 127639 - DNA, 1698 bp, synthetic construct
  misc_feature 1..1698: note = Description of Artificial Sequence: Synthetic coding sequence
  source 1..1698: mol_type = other DNA
atgagcgatgggttagacaatgaagagaagcccccagctcccccattgcgaatgaacagtaataatcgggacagcagcgcacttaatcacagctccaaacctctgcctatggcccctgaggagaagaacaaaaaagcccgcctcagatccattttcccagggggcggagataaaaccaacaagaaaaaggagaaagagcgtccagagatctccctgccctcagattttgaacatactatccatgtaggattcgatgctgtcacgggggaattcacgaactcaccctttcaaacttcacgccccgtgaccgtggcaagctctcaatcagaggggaaaatggggattcctgagcagtgggcacggctactgcagacttcgaacattacaaaattggaacaaaagaaaaatccccaggccgtgttggatgtcctgaagttctacgatagcaaagaaacagtgaataaccagaaatacatgtcattcacttcaggagacaaatcagcacacggatatatcgccgcccatccaagcagcactaaaaccgcctccgagcctcctctagcacccccagtgtctgaagaggaggatgaggaagaggaggaagaggaagacgaaaacgaacctccacccgtcatcgcaccgcggccagaacacaccaagtctatttacactagatccgtcgtggaatctatcgcctccccagctgtgcccaataaggaggtgacacccccttccgcagagaatgccaatagtagcaccctctaccggaacaccgaccgtcagcgcaaaaaatcgaagatgactgacgaggaaatcctagaaaagcttcgctcgatcgtctctgtcggggatcccaaaaagaagtatacaaggttcgagaaaattggtcagggggcctcaggaactgtatataccgcacttgatatcgccaccgggcaagaagttgccatcaagcagatgaatctccagcagcagccaaagaaggagctgatcataaatgagatcttggtgatgcgagagaataaaaaccctaacattgtcaattatctcgacagctacctggtaggcgacgaactgtgggtggttatggagtatctcgccggcggcagtctgactgacgtggttacggagacctgcatggatgaaggccaaatcgcagccgtttgccgagagtgtctgcaggctctggactttttgcactcaaatcaggtgatccatagggacataaaatctgacaatattctgctgggaatggacggtagtgtgaagctgaccgacttcggcttttgcgcccaaatcacccctgaacaatctaagagatcaaccatggtcggtactccctactggatggctcccgaagtcgtgactaggaaggcctacgggcctaaggttgacatttggagcctggggattatggcaatagagatggttgagggggaacctccgtacctgaatgagaaccccctacgggctctctacctgatcgctacaaatggcacccccgaacttcagaacccggaacgcctcagcgctgtattccgcgactttttaaatagatgtctggagatggacgtggatcgtagaggaagcgccaaggaactcctgcagcacccatttttaaagttagcgaagccgctgtcaagcttaacccccttgataatcgccgcaaaggaagcgatcaaaaactcctcccgctag

SEQ ID NO: 127640 - DNA, 1635 bp, synthetic construct
  misc_feature 1..1635: note = Description of Artificial Sequence: Synthetic coding sequence
  source 1..1635: mol_type = other DNA
atgtccgacggtctggacaacgaagaaaagcctcctgcccctccactcagaatgaactcaaataatcgggactcaagcgccctcaatcattcctctaagcccttacccatggcacctgaagaaaagaacaaaaaagctcgtctgaggtcgattttccccggagggggcgataagactaacaagaaaaaagagaaggaacggcccgaaatctccctgccgtctgatttcgagcataccatccatgtcggattcgatgccgtaaccggggagttcacaggtatcccagagcaatgggcccgcctgcttcagacgtcgaacattaccaaactggagcagaagaaaaacccacaggctgtccttgatgtgcttaaattctacgattcgaaagagactgtaaacaaccagaagtacatgagttttacttcaggagacaagagtgcccacgggtatatcgctgcccacccttcatctacgaaaaccgccagcgagcctcctctggcaccccccgtgagtgaggaggaggatgaagaggaggaagaagaagaggatgaaaatgagccccctcccgtgatcgcacctcggccggaacacacaaagtcaatatacacccgcagcgttgtcgagagcattgcctcacccgcagtcccaaataaagaggtaacccctcctagcgctgaaaatgctaactcaagtactttatatcgcaatacagaccgccagaggaaaaagtcaaagatgaccgacgaggaaatactggagaaactgaggtctatcgtgtccgttggggatcccaagaaaaagtacactagatttgagaagattggacaaggagcttctggcacagtgtacacagccctcgacatcgccaccgggcaggaagtggcaatcaaacagatgaatcttcagcaacagcccaagaaggagctgataatcaacgaaatactggtcatgagggagaataagaatcctaacatcgtgaactaccttgattcatacctcgtaggtgacgagctgtgggtagttatggagtatttagccggcgggtcgttgactgacgtcgtgaccgagacatgtatggatgaggggcaaattgcagccgtttgcagagaatgcctccaagcactggatttcctgcacagcaaccaagtaattcacagggacattaagtctgataatattttacttggaatggacgggtccgtcaaactcaccgacttcggattctgcgctcagatcacccctgaacagtcaaagagatccactatggtaggcacaccatactggatggccccggaagtggtgaccaggaaggcttatggtccaaaggtagacatatggtcactgggtataatggcgatcgaaatggtcgagggtgaaccaccatacctgaatgagaacccactgcgggcattatatctcattgctaccaacggaactcccgagctgcagaacccagaacgactctccgctgtctttagggacttcctcaaccgctgtctcgagatggacgtggaccggcgcgggtctgccaaagaattactccagcatccgtttctgaagttggcaaagcctctctcgagcttaacccctctgattatagccgctaaggaggctatcaaaaacagcagtcggtag

SEQ ID NO: 127641 - DNA, 546 bp, synthetic construct
  misc_feature 1..546: note = Description of Artificial Sequence: Synthetic coding sequence
  source 1..546: mol_type = other DNA
atgtcagatggcttagacaatgaagagaaaccacccgccccaccgttaagaatgaactccaataatcgagactccagcgccctaaaccatagcagtaaacctctaccaatggcacccgaggaaaaaaacaaaaaggccagattacgaagcattttccccggcggaggtgataaaacaaacaagaagaaggaaaaggaaagacctgagatcagcctacctagtgattttgagcacaccatccatgtaggcttcgatgcggtcactggggagttcaccaactctccatttcagaccagtaggccggtcacagtcgcctcaagccagagtgagggaaaaatgccagacctgtacggctcccagatgtgccctggcaagctacctgaaggtatccccgagcagtgggctagactgctgcagacttcaaacatcaccaagctggaacaaaaaaagaacccccaggccgtgctcgacgtgttaaaattttatgacagtaaggagaccgtgaacaatcagaagtatatgtccttcacctcaggggacaaatag

SEQ ID NO: 127642 - DNA, 1635 bp, synthetic construct
  misc_feature 1..1635: note = Description of Artificial Sequence: Synthetic coding sequence
  source 1..1635: mol_type = other DNA
atgagcgatgggctggacaatgaggaaaagcctcccgcccccccacttcgcatgaacagcaataaccgggattctagcgccttgaatcattccagcaagccactgccaatggctccggaagagaagaacaagaaggcccgcctgcgatcaatctttcccgggggcggggataaaaccaataaaaaaaaagaaaaggaaagacctgaaattagcttgcccagcgattttgaacacaccatacatgtgggctttgacgccgtgacaggcgaattcacagggatccccgaacaatgggcacggcttctgcagacctcaaatattactaaactggagcagaagaaaaacccccaggctgttctcgatgtgcttaagttctacgactcaaaggagaccgtcaacaatcagaagtatatgagcttcacgagcggggacaagagcgcgcatggctacatcgcagctcatccaagctccactaaaactgcctccgagcctcccctggctcctcctgtgtcggaagaggaggacgaggaggaggaagaggaggaggatgagaacgagccaccacctgtgatcgccccccgtccagagcacaccaagtctatttatactagaagcgttgtggagagtatcgcttcgccggcggttcccaataaggaggtgactccaccctccgcagagaacgccaactccagtactctgtataggaacacagatcgccaacgcaagaagagcaaaatgaccgatgaggaaatcctggagaagctgaggagcatcgtgtctgtgggagatcctaagaagaagtatacccggttcgagaaaatcggacagggggcctctggcacagtgtacactgccttggacatcgccacggggcaggaggtggccataaagcagatgaacctccaacagcagccaaagaaggaactcatcattaatgagatcctggtgatgagggagaacaagaaccccaatattgttaactatctagactcctacctggtcggagacgagctttgggtggtcatggagtatttggccggaggatccctgactgatgtggtaacggaaacgtgtatggacgaggggcagattgcggctgtgtgtcgcgagtgtctccaggccttggattttctgcactccaatcaagtgatccatcgcgatataaagagcgacaacattctcctgggcatggacggaagcgttaaactgacggattttggcttctgcgcacagattacccctgagcaatccaaaagatctacaatggtaggtacgccctattggatggctccagaagtcgtgactcggaaagcctacggaccgaaagtagatatctggtctctaggtatcatggcaatcgagatggttgagggcgaaccaccgtacttgaacgaaaatcctctaagggctctgtacctcatcgctactaacggaaccccggagctccaaaaccccgagcgactcagtgcagtgtttcgtgacttcctgaatcggtgcctagagatggatgtggaccgcaggggatcagcgaaggaactactgcaacacccattcttgaaattggcgaaacctctgagtagtctaacccctttaatcatcgccgcaaaggaggccataaaaaattccagtagatag

SEQ ID NO: 127643 - DNA, 1743 bp, synthetic construct
  misc_feature 1..1743: note = Description of Artificial Sequence: Synthetic coding sequence
  source 1..1743: mol_type = other DNA
atgagcgacgggctcgataacgaagagaagcctccagccccgcctctgcgtatgaactcaaataatagggacagtagcgcattgaaccactcatctaagcccctccccatggcaccggaagaaaagaataagaaagccagactacgctctatcttcccgggagggggggataagactaacaaaaagaaggaaaaagagcggccggagatcagcctgccaagcgacttcgagcatacaattcatgttgggttcgacgctgtgactggcgaattcactaattctccatttcagacatctagacctgttaccgtcgccagctctcagtcggaagggaagatgcccgacctgtatggaagccaaatgtgcccgggtaagctgcctgaaggtatacccgaacagtgggctagactgttacaaacgtctaacataaccaagttagagcagaaaaagaatcctcaggccgtccttgacgtgctgaagttttatgactctaaagaaaccgttaataatcagaagtatatgtcatttacctcaggtgataaaagtgcgcacggctacatagctgctcacccttcctcgacaaaaactgcgtccgagcctccattagcacctcctgtttccgaagaagaggacgaggaggaggaagaagaggaggacgagaacgagcccccacctgttattgcaccgagacccgagcatacaaaatctatttatacccgtagtgttgttgagtccatagcgagccccgcggttccgaacaaggaggtgacgcccccttcggcagagaatgcgaattcgtcgactctctaccgcaacactgatcgccagcgaaaaaaaagtaaaatgaccgacgaggaaatcttggaaaagctacgaagtatcgtgagcgtcggtgaccctaaaaaaaaatacacccgctttgagaaaatcgggcagggggcctctggaaccgtttatacggctctggatatagccaccgggcaggaagtggctatcaagcagatgaacctacagcagcagccaaagaaggagctgatcataaacgagatccttgtcatgcgcgaaaataaaaaccctaatatcgtaaactacctcgatagttacctggtgggcgatgaactctgggtggtgatggaatatctcgccggcgggagcttgaccgacgttgtgacagaaacatgcatggacgagggccagatcgccgcggtctgtagagagtgcctccaggctctggacttcttacactcaaaccaggtgatccacagggatattaagtccgataacatcctcctggggatggatggcagcgtaaagttgacagattttggtttctgtgcccagattacccccgagcagagcaaacggagtacaatggtggggaccccatattggatggccccggaggtcgtgactcgcaaagcctatgggccaaaggttgacatctggtccctagggatcatggccatagaaatggtcgagggggaaccaccatatttgaacgaaaatcctctgcgggcactgtatttgatcgctaccaacggtacgccagaactacagaatcctgagcgtctaagcgctgtctttagggacttcctgaaccgctgcttagagatggacgtggatcggagggggtctgcaaaggagcttctacagcacccctttctaaagctggcaaagccccttagctctctgacaccactgatcattgccgccaaagaggccatcaagaacagcagcagatag

SEQ ID NO: 127644 - DNA, 1698 bp, synthetic construct
  misc_feature 1..1698: note = Description of Artificial Sequence: Synthetic coding sequence
  source 1..1698: mol_type = other DNA
atgagcgatggcctggataacgaggagaaacctccagcccccccattacgcatgaactctaataacagggactcctccgcacttaaccactcctcgaaaccgcttcctatggctcccgaggagaagaataagaaggcaagattgcggagcattttccctggggggggagataagacaaataagaaaaaagagaaagagcgcccagagatctcgttaccatccgatttcgagcataccatccacgtgggatttgatgcagtgacaggggaatttacgaactcacctttccagacatcccgtcccgtgacggtggcgtcgtctcagagtgagggtaaaatgggaatccccgaacaatgggcaagactgttgcagacttccaacattacaaagcttgaacagaagaaaaatccccaggccgtgctggacgtgctcaaattttatgatagcaaggagactgtaaacaatcaaaaatacatgagctttacatcgggggataagtcagcccacggatacatcgctgcccatccgtcaagcactaaaaccgcatcagagcctcctctcgcacctccggtgagcgaggaggaggatgaagaggaagaagaagaggaggacgaaaacgagcctcccccagttatcgctcctcgtccagagcataccaagagcatttacaccaggagcgtagtcgaaagtatcgcatctcccgccgtgccaaataaagaggttacacctccttccgccgaaaacgccaacagtagcaccttgtaccgcaatacggatagacagaggaagaagtccaaaatgaccgacgaagagattcttgagaaactacggagtatcgtgtctgtgggcgacccgaaaaaaaaatatacacgtttcgaaaagatcggacaaggtgcctctgggaccgtctacacggcactcgacatcgcaaccggccaagaggtggcaatcaagcagatgaatttgcaacagcagcctaagaaggagctcattattaatgagatcctggtgatgagagagaacaaaaatcctaacattgtgaattatctggattcatatctggtcggcgacgagctctgggtggttatggaatacctagccgggggtagtctaaccgatgtcgtgaccgaaacgtgtatggacgaggggcagattgctgcagtgtgccgagaatgcctgcaggcccttgacttcctgcactctaatcaagtgatccatagagacatcaagagtgataatattctgctcggcatggatggcagtgtgaaactgactgacttcgggttttgcgcacaaattactccagagcaatcgaaacggagcactatggttggcacaccatattggatggcccctgaagtggtcacccgcaaggcgtatggccctaaggtggatatctggtctcttggaataatggctatagagatggtcgagggagagccgccatacctgaacgaaaatcctctccgcgctttgtatctgatcgctacgaatggcaccccagagctgcagaatcctgagcgtttgagtgctgtatttcgtgatttcctgaacaggtgtttggaaatggacgtggatagacggggcagcgctaaagaacttctccaacatcctttcctgaagcttgccaagccattgtcaagccttactcctttgatcattgcagccaaggaagccattaaaaactcgagcagatag

SEQ ID NO: 127645 - DNA, 2046 bp, synthetic construct
  misc_feature 1..2046: note = Description of Artificial Sequence: Synthetic coding sequence
  source 1..2046: mol_type = other DNA
atgttcagaaagaaaaaaaaaaaacgcccagaaatcagcgccccacagaattttcaacaccgtgtacataccagctttgacccaaaagaagggaagttcgtgggcttgccaccccaatggcagaatatactggataccctccgcagacccaaacctgtggtagatccgtcacggataactagagttcagttgcagcctatgaagacagttgtgcggggatctgctatgccagttgatgggtatatcagcggcttattaaacgatattcaaaagctgtccgttatctccagcaacaccttacggggcagaagcccaactagccggcggcgtgcacagtctcttggcctgctgggcgacgagcactgggctaccgaccctgacatgtacctgcagtccccacaatcggagaggactgacccgcacggcctgtatctgtcttgcaacggaggaaccccagctggccacaagcagatgccttggcccgagccacagagccccagagtgctccctaatggcttggccgcaaaagcccagtcactggggcccgctgagtttcaaggcgcctctcagcgctgtcttcagctgggcgcatgtttacagtcttcaccgccgggagccagcccacccaccggcacaaacagacacggcatgaaagctgccaagcacggctcagaagaggcaagacctcaatcttgtttagtgggctccgctactggtaggccagggggggagggcagtccctcacccaagactagggagagttccctcaaacgaaggttgtttcgttccatgttcctgtctacagccgctactgctccccctagcagtagcaagcccggtccaccgcctcagtctaagcctaactcaagctttcggccccctcagaaggacaatccccccagtctggtcgctaaagctcaaagtctgcccagcgaccagcccgtgggcacattcagccctttgactacttccgacacaagcagcccccaaaagtccttgcgcaccgcccctgccactggccagctgccgggaaggtcaagtcctgccggttcccctcgtacgtggcacgcacaaatctctacctccaacctgtatctgccacaggaccctactgtggccaagggagccttagccggcgaagacactggcgttgtaacacacgagcagtttaaagctgcattgagaatggttgtggaccagggcgaccctcggttgctcctggattcctatgtgaaaattggcgaaggttccactggcattgtttgtctcgctcgcgagaaacattccggtaggcaggtggctgtgaaaatgatggatctgcgcaaacagcagcgaagagaattactatttaatgaagtcgtgattatgcgcgattaccagcatttcaatgtggtggagatgtataagtcttatctggttggtgaagaattgtgggtgctgatggagttcctgcaaggcggtgccctaacagacattgtgtcacaggtgaggctgaacgaagaacagatcgcaacagtatgcgaggccgtgcttcaggccctggcttacttacatgcccaaggcgttattcacagagatattaaatccgactccatcctcctcaccttagatggccgggtgaagcttagcgactttgggttctgcgcccagattagtaaggacgtgccaaagaggaaatcccttgttgggaccccgtactggatggcgcccgaggtcatttcccgatctctgtacgcaactgaggtcgatatctggagcctgggcatcatggtcatagaaatggtggacggggagcccccttactttagtgacagccctgttcaagcaatgaaaaggctgcgcgacagtcccccgccaaagctgaagaattcccataaggtgagcccagtcctcagggacttcctggagcgcatgctggtgcgggacccacaagagcgagcaacggctcaggagcttctggaccaccctttcctccttcaaaccggtctgcccgaatgcctggtccccttgatacagctgtatcgcaagcagaccagtacctgctag

SEQ ID NO: 127646 - DNA, 2046 bp, synthetic construct
  misc_feature 1..2046: note = Description of Artificial Sequence: Synthetic coding sequence
  source 1..2046: mol_type = other DNA
atgtttagaaaaaagaaaaagaaacgccccgaaatttcagctcctcagaactttcagcaccgagtgcacactagctttgaccctaaagaggggaagtttgtgggcttgccgccccaatggcagaatatactggatacactccggcggccaaaacctgtcgtggatccctctaggatcactcgcgtacagcttcagccgatgaaaaccgtggtcagaggatctgcaatgcccgtggacgggtatattagcggactgttgaacgacatccaaaaactcagtgtgatctcaagcaacaccctgcgggggaggagccctaccagccgccgccgtgcccaatctctcggcctcttgggtgatgaacattgggctactgatcccgacatgtacctacagtcaccacagtcagagaggactgatcctcatggactatacctttcttgcaatggtggcacccccgcagggcacaagcagatgccttggcccgagccacaaagccctcgtgtcctccccaacggcttggcagcaaaagctcagtccctggggccggcagagttccagggagcatcccaacgatgcctacagctgggagcctgtctgcagtcctcccctccaggagccagtccacctacggggacaaaccgccatgggatgaaagcggcgaagcacgggtcggaagaggcacggccacagtcatgcttggtaggctctgccacagggcgaccagggggagagggctcccccagtcctaaaaccagagagtcctctctgaagagacgcttgttccggtccatgtttctcagtactgctgccactgcccccccaagcagttctaaacctggacctccaccacagtccaaacctaactcgtcttttaggccaccccagaaggataacccaccatcgctggtggctaaggcgcagagtctgccctcggatcagcccgttgggaccttttcaccccttacaactagcgacacctcatccccacaaaagagccttcgcactgcccctgctaccggacagttgccaggcaggtccagcccagcaggaagcccccggacttggcacgcacagatcagcacctcaaatctgtatcttccccaggaccccactgtcgcaaaaggagccctcgccggtgaagacacgggagtcgtcacacatgaacagtttaaggctgcccttcgcatggtggtggatcagggggacccacgccttctgctggactcctatgtgaaaataggcgaggggtccaccggcattgtctgtctggcaagggagaagcattcaggccgacaagtggccgtgaaaatgatggatctaaggaaacagcagcgccgagagctgctcttcaatgaggttgtgatcatgagagactatcagcacttcaacgtggttgaaatgtacaagtcttatctcgtgggcgaggagttgtgggtcctgatggagttcctgcaagggggagcacttacagacatcgtctctcaggtacgactgaatgaggagcagatcgctaccgtgtgcgaggctgtgctacaggccctggcttacctgcatgcccaaggcgtcatccaccgcgacattaaaagtgattctatacttctgacactggacggacgggtcaagctgtccgattttggcttttgcgctcagatctccaaggacgttccaaagcggaaatctctggtgggaaccccatactggatggcccctgaagtgataagtcggtccttatacgccacagaagtagatatctggagccttggcataatggtaattgagatggtcgacggagagcctccgtacttcagcgattccccagtgcaggccatgaagaggctgcgcgactcccctcctcccaagctgaagaattcccacaaagtgtctcctgtgctgagagatttcctggaacgtatgctggtgcgagatccacaagagcgggccacggcccaggaactgttagatcaccccttcctcttacagactggtctccccgaatgtctggtacctttgattcaactgtatcgcaagcaaacctcaacatgctag

SEQ ID NO: 127647 - DNA, 2046 bp, synthetic construct
  misc_feature 1..2046: note = Description of Artificial Sequence: Synthetic coding sequence
  source 1..2046: mol_type = other DNA
atgtttagaaaaaaaaaaaaaaagcgacccgagatcagtgcccctcagaattttcagcaccgggtgcatacatcattcgatcccaaggagggcaaattcgtgggtctgccccctcaatggcagaacatactggacactttacgaaggcccaagcccgtggtggatccttcgaggatcacacgggtgcaactccagcccatgaagaccgtcgtccgaggctccgctatgcccgttgacggctacatttccggcctgctgaacgacatccagaaactaagcgttatctcttcaaacacactacgtgggcggagcccgactagccgaaggcgagcccagtctctgggactgcttggtgacgagcactgggccaccgatcctgacatgtatctacagtcccctcagtccgaacggacggatccgcacggactgtacctgtcttgtaatggcggcacacctgccggccataaacaaatgccgtggccagaaccgcagtcacctcgggtgctgccaaacgggttggcggccaaagcccagtcactggggcctgcagaattccagggcgctagtcagagatgtctccagctcggcgcatgcttgcagtcatcaccccccggggcctcgccaccaacagggacaaatcggcatggaatgaaggctgcaaagcacggcagtgaagaggccagaccccagtcttgcctggttgggagtgcaactggtaggccaggaggggaaggaagccccagcccaaaaactcgtgaatcctccctgaaaagacgactgttccgtagcatgtttttaagcacagccgcgacagccccaccttcctcatccaaacctggacctcctcctcaaagcaagccaaacagctcatttagacccccccaaaaggacaaccctcccagcctggttgctaaggcacagagcctgccatccgaccagcccgttgggacatttagcccccttacaaccagtgacacgagcagtccacagaagagtctcagaacggcgcccgccaccggacaattgcccgggcggtcgtcaccagccggtagtcctagaacgtggcacgctcagatttccacatcgaatctatatctgccccaggatcccaccgtggccaagggtgcgctcgcgggagaggacaccggtgtcgtcactcatgaacagttcaaggcggcattgagaatggtagttgatcagggcgatcccaggctgctgttagattcctatgtgaagatcggggagggttccaccggtatcgtttgtctggcacgtgagaaacattccggaaggcaggtagctgtcaaaatgatggacctgcgtaagcagcaacgccgagagctactctttaatgaagtggttatcatgcgcgactatcagcatttcaacgtggtcgagatgtacaagtcttacttggtcggcgaggagctctgggtccttatggagtttctgcagggaggggcactgactgatattgtgagtcaggtcagacttaatgaagagcagatcgctacagtgtgcgaggctgtattgcaggctcttgcatacctgcacgcacagggcgtgatacatagggacataaagtctgactctatcctgctgacgttggacggaagggtgaaactgagcgattttggtttttgcgctcaaatttctaaagacgtgcctaaacgcaagtctttggtcggaacgccatattggatggcgcccgaagtgatctcccgcagcctttatgccactgaggttgacatatggagcctcggtataatggtgatagaaatggttgacggggaaccaccctattttagtgatagccccgtccaggcaatgaaacgcctccgggattctccgccacctaaactgaagaactcccataaggtcagtccagtgctgcgagacttccttgagagaatgctggtgagagaccctcaggagcgggctaccgcacaagagctcctggaccacccatttctacttcaaaccggattgccagagtgtctggtgcctttaatccagctgtaccggaagcagaccagcacttgctag

SEQ ID NO: 127648 - DNA, 369 bp, synthetic construct
  misc_feature 1..369: note = Description of Artificial Sequence: Synthetic coding sequence
  source 1..369: mol_type = other DNA
atgtttaggaagaaaaagaagaaaagacctgagatttccgccccgcaaaacttccagcaccgggttcacactagtttcgatccaaaagaggggaagttcgtcggcctaccccctcagtggcagaatatattggacactctgagacgccctaagcccgtcgtggatccttctaggatcactagagtgcaacttcagccaatgaagaccgtagtgcgcggaagcgcaatgcccgtggacgggtacatctctgggctgttaaacgatatccaaaagttgagtgtgattagctcaaacacgctcagaggcaggtctcctactagcagaaggcgggcccaatccctggggcttcttggagacgagcactggtag

SEQ ID NO: 127649 - DNA, 372 bp, synthetic construct
  misc_feature 1..372: note = Description of Artificial Sequence: Synthetic coding sequence
  source 1..372: mol_type = other DNA
atgttccggaagaaaaaaaaaaaaagacccgagatctcagcacctcagaattttcagcaccgagtccacacctctttcgacccgaaagaaggaaaatttgtgggcctgccacctcagtggcagaatatcctggacactttgcgccgcccgaagcccgtggtcgacccttctcgcataaccagggtgcagctccaacccatgaagactgtggtgagaggcagtgcaatgccggtagatggatacattagcggattgcttaacgacattcagaagctctcggtgatctctagcaacacattgcgcgggcggtccccaactagtcgacggcgggcacagagcttaggattactgggggacgaacattgggcctag

SEQ ID NO: 127650 - DNA, 330 bp, synthetic construct
  misc_feature 1..330: note = Description of Artificial Sequence: Synthetic coding sequence
  source 1..330: mol_type = other DNA
atgtttagaaagaagaagaaaaaaagacccgagatttctgccccccaaaactttcaacatagggtccatacttcctttgacccaaaagagggcaaatttgtcggactccccccgcaatggcagaacattcttgatacccttcgtcggccaaaacctgtggtcgatcctagccgaattacaagggtacaacttcagccgatgaaaacagttgtgagggggtccgcaatgcctgtggacggctacatttccgggctgttgaatgatatccagaagctgtccgtgatctcatccaatactctccgagggcgcagtccaacgagccggcgttag

SEQ ID NO: 127651 - DNA, 339 bp, synthetic construct
  misc_feature 1..339: note = Description of Artificial Sequence: Synthetic coding sequence
  source 1..339: mol_type = other DNA
atgtttcgtaaaaaaaagaagaagcggccggaaatttcggccccccagaacttccagcatcgagtccacacgtcctttgacccaaaggagggcaagtttgtaggcctgcccccccagtggcagaacatccttgacactctgcggcggcctaagccagttgtggatccctcaagaattacccgcgtccagctgcagcccatgaagacggtagtgcgggggtccgcaatgcccgtggacggctatatctctggcctgctgaacgatattcagaaactgtctgttatcagttccaacaccctccgcgggcgctccccaacatcaaggcgcagggcccagtag

SEQ ID NO: 127652 - DNA, 2046 bp, synthetic construct
  misc_feature 1..2046: note = Description of Artificial Sequence: Synthetic coding sequence
  source 1..2046: mol_type = other DNA
atgttccgaaagaaaaaaaaaaaacggcctgagataagcgccccacagaattttcagcatcgcgtgcacacgtctttcgatccaaaggaaggtaaatttgtcggcttgcctcctcagtggcagaatatactggacacccttcggcggcctaaacccgtagtcgatccatccagaattacaagggtacagctgcagcccatgaaaaccgttgtgcgcggctccgccatgccagtcgacgggtacatatcgggattgctcaacgacattcagaaacttagcgtcataagttctaacacactccgggggcgatcacctacgtcacggcgccgggcccaatcccttggactacttggtgacgaacactgggctaccgatcccgatatgtacctgcagtcaccccaatccgagcgtacagaccctcacggcctgtacctctcctgcaacgggggcacacccgcggggcacaaacagatgccttggccagagcctcaaagtccaagagtcctacccaacgggcttgcagcaaaagctcaaagtctcggcccggctgagtttcagggcgcgagtcagcgctgtttacagcttggtgcatgcctgcagtcatccccgccaggtgcttccccccccacgggcacaaacagacacggcatgaaagcagcaaagcacggaagcgaagaggcccggccccagagttgtctagttggctcagccactgggaggcccggtggagaaggatcacccagtcctaagactcgcgagtcaagtcttaagcgtaggctgttccgaagcatgttcctgtccaccgctgcaactgcccctcctagtagctccaagcctggccctcccccacagtctaagcccaacagctccttcaggcctcctcagaaggataaccccccctcactggttgcgaaggcgcagtccctcccatcagaccagcctgtcggaaccttctctcctctaaccactagtgatacctccagcccccagaagtccctgaggacagcgcccgcgacgggacaactcccagggcggtccagccctgcaggatccccaagaacctggcatgcccagatctcgacgagcaatttgtaccttcctcaagatccgaccgtggctaagggagccctcgctggcgaagatactggcgtagttacccacgagcagttcaaagccgccctgaggatggtggtggatcagggcgatccccgattgctcctggatagctacgtgaagatcggagaaggatcaacaggcatcgtctgcctggcgagagaaaaacatagcggacgccaggtggctgttaaaatgatggatctgaggaagcagcagcgccgtgaactactctttaatgaagttgtaattatgcgcgactaccagcacttcaacgtggtggagatgtacaagtcatacctagtgggcgaagagctttgggtgctaatggaattccttcagggtggggccttaaccgacatcgtgtcacaggtgcgccttaacgaagagcagattgccaccgtctgcgaagccgttctgcaggctctggcttacctccatgcccagggggtcatacatagggatatcaagagcgactctattctgctgaccctggatggtcgcgtaaaacttagtgatttcggtttctgtgcccagataagcaaggatgtcccaaaaagaaagtccctcgtgggaacaccttattggatggccccggaggtgatttccagaagtctgtacgcaaccgaggtggatatatggtctttgggcattatggttatcgagatggtagacggcgaacctccatacttcagcgattcacccgttcaggccatgaagaggctgcgggattctcccccccccaagttgaagaactcccacaaggtgagccctgttcttcgagactttcttgaaagaatgctggtgcgtgatccgcaagaaagagccacagctcaagagttgcttgaccacccgtttcttctccagaccggactccccgaatgcttggtgccacttatccagctctaccgcaaacagacgtccacctgttag

SEQ ID NO: 127653 - DNA, 855 bp, synthetic construct
  misc_feature 1..855: note = Description of Artificial Sequence: Synthetic coding sequence
  source 1..855: mol_type = other DNA
atgtttaggaaaaagaaaaaaaaaaggccggaaatctcagcgcctcaaaattttcagcaccgtgtgcatacctcttttgatcccaaagaagggaaattcgtaggactgccaccccagtggcaaaacatactggataccctgcggagacccaaaccagtcgtcgatccaagccggataacgcgggttcagctacaaccaatgaagactgtggtgaggggtagtgccatgccagtggatggctacatctccggcctgctgaacgacattcagaaactttccgtcatctcatcaaataccctgcgcggtcggtccccgacctcccgccgaagagcccagagcctcggcctcctgggagacgagcactgggccactgacccggatatgtatttgcaatccccccaatccgagcgcactgacccacatggactgtatttgagttgcaatgggggcacgcctgcggggcacaaacaaatgccctggcctgagccacagtcaccgagggtcctacctaacgggctggccgccaaagcccagagtcttgggcctgccgaatttcaaggggcatcgcagcggtgtttgcagctgggagcttgcttacagtcttcccctcccggggcttcacctcccactggtacaaaccggcacggtatgaaagccgccaaacacgggtctgaagaggctcgaccgcaatcatgcctggttggtagcgccacaggaagacccggaggcgaaggcagcccttccccgaagactcgagaatccagcctgaagagacgattgttccggtcaatgtttctgtccacagcggccactgcacccccgtcctccagcaaacctggaccccccccgcaatag

SEQ ID NO: 127654 - DNA, 318 bp, synthetic construct
  misc_feature 1..318: note = Description of Artificial Sequence: Synthetic coding sequence
  source 1..318: mol_type = other DNA
atgttccgtaagaagaagaagaagcggcccgaaattagcgccccgcagaactttcaacatcgcgtgcacaccagcttcgatcccaaggagggaaaattcgtcggattgccccctcagtggcaaaacatcttggatactctacggcgcccgaagccggttgtggacccgagcagaatcacccgcgtgcagctgcagcccatgaagactgtggtgcgcggatctgccatgcccgtggatgggtatatatcaggccttctcaatgatatacagaaactgtctgtcatctcttccaatacgctccgcggaaggagtccatag

SEQ ID NO: 127655 - DNA, 441 bp, synthetic construct
  misc_feature 1..441: note = Description of Artificial Sequence: Synthetic coding sequence
  source 1..441: mol_type = other DNA
atgatcaatatgggcgactcacatgtcgatacgtcatcgactgtttcagaagctgtggctgaagaggtaagtctctttagtatgaccgatatgattttgttcagtctgatcgtgggattactcacttactggtttctcttcaggaagaaaaaggaggaggtgcctgagttcacgaaaatacaaaccttgacctcttcagtgcgggaaagctcctttgtggagaagatgaagaagactgggagaaatattatagtgttttacgggagccaaaccgggactgctgaggagtttgccaataggctgtcaaaagacgcccatcgctacggcatgagaggtatgtctgcagatcctgaggaatatgatctggccgatttgtcatccttaccagagatcgacaacgctttagtcgttttttgtatggccacatacggagagggctag

SEQ ID NO: 127656 - DNA, 519 bp, synthetic construct
  misc_feature 1..519: note = Description of Artificial Sequence: Synthetic coding sequence
  source 1..519: mol_type = other DNA
atgataaatatgggcgattcccatgtggacacttctagcacagtgtccgaagcagtcgccgaggaggtctcactgttctcaatgacggatatgatcttgtttagccttatcgtcggactgctgacatactggttcctgtttagaaagaaaaaagaggaggtgcccgaattcacaaagatccagacacttacatcctcagttcgcgagagctcctttgtcgagaagatgaagaagacagggcggaatatcatcgtcttctatggctcccagacgggtaccgccgaggagtttgccaatcgcctcagcaaggacgctcaccggtacgggatgcgtggcatgagtgccgatcctgaggagtatgacctcgccgatctcagttctctgccagagatagataacgccctcgtcgttttctgtatggcaacctacggtgagggtgaccctactgacaatgctcaggacttctacgattggctgcaagagacagatgtggacctctctggcgtaaaatttgcttag

SEQ ID NO: 127657 - DNA, 189 bp, synthetic construct
  misc_feature 1..189: note = Description of Artificial Sequence: Synthetic coding sequence
  source 1..189: mol_type = other DNA
atgattaacatgggtgattcccatgttgataccagcagcaccgttagcgaagcggtggccgaggaagtgagtctcttcagtatgacagacatgattctgtttagcctgattgtggggctgttaacttactggtttctcttccgcaaaaagaaagaggaagtgccagaatttacgaagattcagacatag

SEQ ID NO: 127658 - DNA, 1107 bp, synthetic construct
  misc_feature 1..1107: note = Description of Artificial Sequence: Synthetic coding sequence
  source 1..1107: mol_type = other DNA
atgggcaagtatgtcgacaaacgcttagagcagcttggggcacagagaatttttgagttaggtctcggagacgatgatggaaacctggaggaagatttcatcacatggcgtgagcagttttggccagcagtgtgcgagcacttcggcgtagaagcaacgggcgaggaatctagtatacgtcagtacgaactggtcgttcataccgatatcgatgcggccaaggtgtacatgggcgagatgggccggctcaagtcctacgaaaaccagaaacctccttttgacgccaaaaatccattcctggcagccgttactacaaataggaagctcaaccaggggacagaaagacatctcatgcatcttgagctggacatctcagacagcaagatcagatatgagagtggcgaccacgtggctgtctacccggctaatgatagtgctctagtgaaccaactgggcaaaatcctcggggccgatttggacgtggttatgtcactgaataatctggacgaggagtccaacaaaaagcaccccttcccctgtcccacatcttatagaacagcactgacttactacctggacatcactaatccaccccgtactaacgtgctgtacgaattggcacaatatgcctcagagcccagcgaacaagaactacttagaaagatggcttctagctctggtgagggaaaggagctttatttgagctgggtggttgaagctaggaggcacatccttgccatactgcaggactgcccgtcactacggccaccaatagatcacttgtgcgaactcctgccaagactgcaggcccgttattattcaatagccagctcttcaaaggtccacccaaattctgttcatatctgtgccgtcgtggtggagtatgagacaaaggccggccgaatcaacaagggtgtggctacaaattggctgagagctaaagagccagctggggagaacggaggaagagcgctcgctgtgcccacctcaacaagtgttggcatgcacggaacttggcccggtatgtgtcgcacgccctcaacaacttcttggctgtcaagcggcccatggtcaaccagaaggcgctggaccaccagtcgcaactag

SEQ ID NO: 127659 - DNA, 120 bp, synthetic construct
  misc_feature 1..120: note = Description of Artificial Sequence: Synthetic coding sequence
  source 1..120: mol_type = other DNA
atgattaacatgggagattcacatgtggatacatcatcaactgtatcagaggccgttgctgaagaggtgtccctctttagtatgacggacatgatcttgttctccctgatcgtaggatag

SEQ ID NO: 127660 - DNA, 501 bp, synthetic construct
  misc_feature 1..501: note = Description of Artificial Sequence: Synthetic coding sequence
  source 1..501: mol_type = other DNA
atgatcaacatgggcgactcccacgtggacacttcctccaccgtgtcagaagccgtcgctgaagaggtcagtcttttcagcatgactgatatgattttattcagcctgattgtaggcttgctcacttactggttcctgttccgaaagaagaaagaggaagtgccagaatttacaaagattcagactttaacatccagtgtcagagagagtagctttgtggaaaaaatgaagaaaacgggccgcaatatcattgtgttctatggatctcaaacaggcactgcagaagaattcgccaacaggttatctaaggacgctcatagatacgggatgcggggtatgtctgcggatccagaggagtatgatctggccgatctgtcttccctgccggaaattgataatgcactggtggtgttttgcatggcaacctacggtgagggagatccaaccgacaacgcgcaggacttctatgactggctacaggagacagatgtagatctgtag

SEQ ID NO: 127661 - DNA, 567 bp, synthetic construct
  misc_feature 1..567: note = Description of Artificial Sequence: Synthetic coding sequence
  source 1..567: mol_type = other DNA
atgattaacatgggggatagccacgtggatacgtcttcgacggtctcagaagcagttgccgaagaagtttcccttttttccatgaccgacatgattcttttttccctcattgtcggactgctgacatactggttcttattcagaaagaagaaagaggaggttcctgaatttaccaagatccagaccctcacatccagcgtcagagaaagttcctttgtggaaaaaatgaaaaaaaccggcaggaatatcatagtgttttatggttctcagacgggcaccgccgaggagttcgctaaccgtctgtcaaaagacgctcacagatatggtatgcggggtatgtcagcggatcctgaggagtatgacctggccgatctgtccagtctgccagaaatcgacaatgccctcgtcgtgttttgtatggccacctatggtgagggcgatccaacagacaacgcgcaggatttttatgactggctgcaagaaacagatgtcgacttaagcggagtgaaatttgctgtgtttggtctgggcaacaagacatatgagcactttaatgccatggggtag

SEQ ID NO: 127662 - DNA, 189 bp, synthetic construct
  misc_feature 1..189: note = Description of Artificial Sequence: Synthetic coding sequence
  source 1..189: mol_type = other DNA
atgattaacatgggggatagccacgtcgacacatcttccactgtgtcagaggctgtagccgaagaggtcagcctgtttagtatgaccgacatgatcctgttcagcctgattgtgggcctgctgacctactggtttctgttcagaaaaaaaaaagaggaagtacccgaatttacaaaaattcagacatag

SEQ ID NO: 127663 - DNA, 1722 bp, synthetic construct
  misc_feature 1..1722: note = Description of Artificial Sequence: Synthetic coding sequence
  source 1..1722: mol_type = other DNA
atgggtagcagatggcccgctgtgcccccttggggattgcaaatccacgtgtccgaacgccagccgtcaaggcctccaccatgtccccaacagccagggcaggccacctgtgagaccctcagcagcgcccccgaccctagcaccactagaatgtctcctccgtgcccgcagccacagtccgcacccgggggaatcggatgctggcgattgaaggtattcggactggggaacaaaacatacgaacatttcaacgcaatgggtaagtatgtagacaagcgcttggaacagttaggcgcacaacgcatcttcgagttaggattgggagacgatgacggaaatctggaggaagatttcattacctggagagagcagttttggcccgcggtctgcgaacactttggcgtcgaagcaacaggggaggagtctagcatacggcagtacgagctggtcgttcacacagatatcgacgcggcaaaggtgtatatgggtgagatgggccggctaaagtcctacgagaaccagaaaccgcccttcgatgctaagaatcctttcctggcagctgtgaccaccaatcgcaagcttaaccagggaacagaaaggcacctgatgcacctggaactggacatatcagactccaagattagatacgagagcggtgaccacgtagcagtctaccctgcaaatgattcggctctggtgaaccagcttggcaagatattgggggccgacctggatgtggtgatgtcgctgaacaacctggacgaggaatctaacaagaagcaccccttcccttgcccaacctcatatcgtacggccctcacttattacctggatattacgaaccccccaagaactaacgtgctgtacgaactggcacagtatgcatccgaaccctccgagcaggaactgctgcggaaaatggcatccagctccggagagggaaaggaactatacctgtcttgggtcgttgaagcccgaagacacatcttggccattcttcaggactgtccatcacttcgaccccctatcgaccacctctgtgaattgttgcccagactgcaagctcgatactacagcatcgcgtcaagcagcaaagtgcatcccaattctgtccacatctgcgctgtggtggtggaatatgaaaccaaggccggtcgaattaacaagggcgtggccacaaactggctgcgagcgaaggagcctgcgggcgagaatggcgggagagccctggtcccaatgtttgtgcggaaaagtcagttccggttgccttttaaagcgactacaccagttattatggtcggcccaggcactggcgtggctcccttcatcgggtttattcaggagagggcctggctgcggcagcagggcaaagaggtaggcgaaacactgctgtactatgggtgtagaaggtctgacgaggactacctgtaccgggaggaactggctcagttccatcgggacggtgccctgacccagctgaatgtggcattctcaagagaacagtctcataaggtgtatgtccagcacctgttaaagcaggatagagagcacctgtggaagttaattgaggggggtgcgcatatttacgtatgtgggactccctcttcctgtccaggcatgcatggcacttggcccgggatgtgtcgcactccatccactacttcatggctgagttcaggaccttggtctacccggcggcggtggactacaagccggaattag

SEQ ID NO: 127664 - DNA, 423 bp, synthetic construct
  misc_feature 1..423: note = Description of Artificial Sequence: Synthetic coding sequence
  source 1..423: mol_type = other DNA
atgattaatatgggtgatagccacgtggacacctcctcaacagtatctgaagcagtggctgaggaagtgtcactgtttagcatgaccgacatgattctcttctcacttatcgtaggtctgctgacctattggttcctcttccgcaaaaaaaaggaggaggtgcccgaattcactaagatacaaaccctgaccagcagtgtgcgagagtcttcctttgtagaaaaaatgaagaagacggggcgaaacatcatcgttttttatgggtcacagacggggactgcggaagagttcgcaaacagactctccaaggatgcacatcggtacggaatgcggggcatgtcagcagacccagaagaatatgacctggccgatctctcttcgctgcctgaaattgataatgcccttgtagtgttttgtatgtag

SEQ ID NO: 127665 - DNA, 2043 bp, synthetic construct
  misc_feature 1..2043: note = Description of Artificial Sequence: Synthetic coding sequence
  source 1..2043: mol_type = other DNA
atgatcaacatgggggactcacacgttgacactagctctaccgtcagcgaagctgtggccgaggaagtttcactgttttcaatgactgatatgatcctgttctcccttattgtgggactccttacctattggttcctgtttcgcaagaaaaaagaagaggtccctgagtttacgaagattcagaccctgacgtctagcgtcagagagtctagtttcgttgaaaagatgaaaaaaacgggccgcaacatcatagtattctacggcagccaaactgggaccgctgaagagttcgccaataggttgagcaaagacgcacaccggtacggcatgcggggtatgagcgccgacccggaggagtacgaccttgctgacctttcctcactgcccgaaatcgataacgccttagtcgtgttctgcatggcaacctacggggaaggcgaccccacagacaatgcccaagacttctatgactggcttcaagaaaccgatgtcgatctgagtggcgtcaaattcgcagtttttggcttgggaaacaagacctacgagcatttcaatgcgatgggaaagtatgttgacaagaggctagaacagcttggagcccagcgtatctttgagcttggactgggcgacgacgacggaaatctggaggaggacttcataacatggcgggagcagttctggccggcagtgtgtgagcacttcggcgtcgaggctaccggcgaagagtcatctattaggcagtatgagttagttgtgcacaccgatatcgatgccgccaaagtctacatgggagagatggggcgcttaaagtcatatgaaaatcagaagcctccttttgacgctaaaaatcccttcctcgccgccgtaacgacgaatagaaagctgaaccagggaaccgaaaggcatctgatgcatcttgaactagatataagcgactcgaagataaggtatgagtcgggcgaccatgtggccgtctacccggcgaatgattcagcactcgtgaatcagcttgggaaaattttgggggcggatctcgatgtcgttatgtccctcaacaatttagatgaggagagcaataagaagcaccccttcccttgtcccactagctataggaccgccctaacctactatctggacataaccaaccccccaagaacaaacgtgctctacgagttggcccagtatgcgtctgagcccagtgaacaggagcttctacgtaagatggcctcatctagtggagaaggaaaagaactctatttgtcctgggttgtcgaggccaggagacacatcttagccatcctccaggattgcccttcccttaggcccccgatcgatcatctgtgtgagctcctgccccgtctacaagctcggtattactcaatcgccagcagctcaaaggtgcacccaaattctgtacacatttgcgcggttgtcgtggaatacgaaactaaggccggaagaatcaacaagggcgtcgctacaaattggctgagagccaaagagcctgcgggagagaacggtggtcgggcgctcgtgcctatgtttgttcggaaaagccagtttcgcctgccttttaaggcaactacgccagtcatcatggttggacctggtaccggggtcgccccttttattgggttcattcaggagagagcctggctgagacaacaagggaaggaagtgggggaaaccctgctgtactacggctgtcgtagatccgacgaggattacctataccgcgaggaactggcacaatttcatcgggatggggcgctaactcagctgaacgtggcgttcagtcgtgaacagtcccacaaggtgtatgtgcagcacctattgaaacaggaccgggaacacctgtggaaattaattgagggaggcgcacacatttatgtctgcggggacgcacgtaacatggcccgggacgttcagaatacattctacgatatcgtggcggaactcggggccatggagcacgcccaagcagtggactatatcaagaagctcatgacaaaaggaaggtattcactggacgtgtggtcttag

SEQ ID NO: 127666 - DNA, 1467 bp, synthetic construct
  misc_feature 1..1467: note = Description of Artificial Sequence: Synthetic coding sequence
  source 1..1467: mol_type = other DNA
atgccacgtacgagtaccacaggatgcaggaggcagacgtggatctcactgggtagctcctcgaggctagaggaagactttataacttggcgtgagcaattctggcctgctgtgtgcgagcattttggggtcgaggccaccggagaggagtcttccatccgccaatatgagttagtggtgcacactgacatcgacgcggccaaagtgtacatgggcgagatgggtagactgaaaagctacgaaaatcagaagccaccctttgacgccaaaaatcccttcttggccgcagtgaccactaataggaagctaaaccaagggacagaacgccatctgatgcacctcgaactcgatatttctgattctaagatacggtatgagtcaggggaccatgtagctgtttatcctgcaaacgatagtgccctggtcaatcagttgggtaaaatcctcggtgccgacctggacgtggtaatgagcttgaacaacttagacgaagagtccaataagaagcacccatttccctgccccacatcctatagaacagccctgacctactacttggatatcacgaacccccccagaaccaatgtgctgtatgagctggcccagtacgcctccgaaccctccgagcaggagctcctgcggaaaatggcatcaagttcaggtgaagggaaagaactttacttaagctgggtcgtggaggctagacggcacattctggctatcctccaggactgccctagcttgcggccgcccattgaccatctgtgcgagttgctgccaagactgcaggccaggtactactctattgccagttcatctaaagtgcaccccaactcagtgcatatctgtgccgtggtggtagagtacgagaccaaagctgggaggatcaacaagggggtggccacaaattggcttagagccaaagagcctgcaggcgagaacggcggccgagctctcgtgcctatgtttgtgaggaagagtcagtttagacttccttttaaggccactaccccggttatcatggtagggcctgggaccggagttgctcccttcatcggcttcatccaggaacgcgcctggctacgccagcaggggaaagaagtcggggaaactttattgtactatggctgccggaggagtgacgaggattacttgtaccgtgaagagttggctcagtttcacagggacggcgccctcacacagctgaacgttgctttctcacgggagcagtcccacaaggtgtacgtgcagcacctactcaagcaagacagggaacatctgtggaagttgattgaaggaggcgcccacatatacgtctgtggcgacgcaagaaacatggctcgtgatgtgcaaaatacgttctacgatatcgtggccgaactcggagctatggagcatgcacaggcggtggactatatcaaaaaattgatgacaaaggggcggtacagccttgacgtgtggagctag

SEQ ID NO: 127667 - DNA, 402 bp, synthetic construct
  misc_feature 1..402: note = Description of Artificial Sequence: Synthetic coding sequence
  source 1..402: mol_type = other DNA
atgcttagtcccgaggctgaaagggtgctacggtacctggtggaggtcgaagagttggcagaagaggtcctcgcggataagagacagattgtggatctggataccaagcgtaaccagaatagggaaggcctcagggcattgcagaaagacctaagtctttctgaggatgttatggtatgcttcggcaacatgttcattaagatgccacaccccgaaactaaggagatgatcgaaaaggatcaggatcatctggacaaggagatagagaagctgaggaagcagctcaaagtaaaagtgaatagactctttgaggcccagggcaaaccagaactgaaaggctttaatctcaaccctctgaatcaggatgagctaaaggccctcaaagtgatactgaagggttag

SEQ ID NO: 127668 - DNA, 1605 bp, synthetic construct
  misc_feature 1..1605: note = Description of Artificial Sequence: Synthetic coding sequence
  source 1..1605: mol_type = other DNA
atgaagttcaccctgggccttgggtccagggcgtggagagtgtcatgggagggagccgcagccgccgctgctgggcctggcgccggcgggtcagctttaagatgtcgagcccagagggtaagcagccctaggctgggccgccggggcagtaggctgtctggggccctcccattatgcctgagccgtggaggtggtggcgctcaggcactccctgattgcgcaggccctagtccgggtcaccctggacaccctggggcacgccagctggcaggccctttggccatggaacaaacctatggtgaggttaaccagctgggtggagtgtttgttaacgggcgtccacttcccaacgcaattcgtctgcggattgtggagttagcacagctgggaatacgcccatgcgacatcagtaggcagctaagagtctcacatgggtgcgtcagtaagattcttgctcggtataatgaaaccgggagtatcctgccaggggctattggaggctctaaaccccgcgtcacaacacctaacgtagtcaagcatatacgggactacaaacagggcgatcccggcatttttgcctgggaaatccgcgacaggctgctggccgacggggtctgtgacaagtacaacgtgcctagcgtgagctctatctcaaggattttgcgcaataagattgggtctctggctcagcccggcccctacgaggctagtaagcagcccccttcgcagcccacacttccttacaatcacatctatcagtacccatatcccagtcccgtgagcccgactggagctaagatgggatcccaccccggagtaccaggtaccgccgggcatgtgtcaatacctcgtagctggccttctgctcacagtgtatccaatatcctcggaatccgcacattcatggaacaaacgggcgcactggctgggagcgagggcaccgcttactcccccaaaatggaggactgggcgggcgtgaatcgtacagccttccctgccacacccgccgtaaatggccttgaaaaaccggcccttgaggctgacataaaatacacacaatcagctagtaccctgagcgcagtgggcggcttcctgccagcctgtgcatatcctgcttcaaatcagcatggagtttattccgcacctgggggcggctacctcgctcctggcccgccatggcctccagcccagggccctcctcttgctccccctggagcaggggttgcggtccacggcggcgaactcgcagcagcaatgacattcaagcacccctccagggagggaagtttgccagctcccgctgcacgacctcgaactccctctgtcgcctatacagactgtcctagccgtccccgcccgcccaggggaagtagccctcggacgcgggcgcgaagagagagacaggcggaccccggcgcccaagtgtgcgctgctgcccctgccatagggacaggaaggatcggaggattggcagaggaggaagcctcggccgggccgcggggtgcccgcccggcttctccccaggcccagccctgtctgtggcccgatccccctcactttttgtattggtcaggatttttggggttctcagagttgggattttag

SEQ ID NO: 127669 - DNA, 1185 bp, synthetic construct
  misc_feature 1..1185: note = Description of Artificial Sequence: Synthetic coding sequence
  source 1..1185: mol_type = other DNA
atggacatgcattgcaaggccgatcccttctcagcaatgcatcctgggcacggtggagtcaaccagctaggaggagtgttcgtgaacggcaggcctctccccgatgttgtaaggcagcgtatcgtggagctggcgcaccaaggagtgagaccctgcgacatcagcaggcagcttagagtgagtcacggatgcgtctctaaaattcttggcagatactatgagactggatctattaaacctggagtcataggcggctctaagcctaaagtagcaactcccaaagtggtggacaaaatcgccgagtataagcggcaaaatcccaccatgtttgcttgggaaatcagggaccgactgctcgctgaaggcatctgcgataacgatacagtgccatctgtatcttccattaaccgcatcatccgcaccaaagttcagcagccatttcatcctactcccgacggcgccggcaccggtgtaactgcccccgggcacacgatcgtcccgagtaccgcctctcccccggtgagttccgcctccaatgaccctgtgggtagttacagcatcaatgggatcctgggaatcccacgaagtaatggagaaaaaagaaaaagggacgaggacgtgtcggaggggagcgtgccgaatggcgattcacagtctggggtggattccttgcggaagcatttgagggctgacacttttactcagcagcagttggaggcactggacagggtcttcgagcgtccctcatacccagacgtttttcaagcctccgagcacataaaatctgagcaagggaacgagtactccttgcccgctctcacacccggcctggatgaggtgaaaagctcccttagcgcttccactaacccagaattagggagcaacgtctctggtacacagacctaccccgtcgtgacaggcagggatatggcttcaacgacccttccgggatatccgcctcacgtaccccctaccggacagggctcctacccaacttcaacactcgccggaatggtgcctggcagcgagtttagcggcaacccatacagccaccctcagtacaccgcctacaacgaagcctggagattcagcaaccccgcccttctgtcatcaccttactactactcagcagccccccggggaagcgccccagccgctgccgccgcagcctacgacagacactag

SEQ ID NO: 127670 - DNA, 1191 bp, synthetic construct
  misc_feature 1..1191: note = Description of Artificial Sequence: Synthetic coding sequence
  source 1..1191: mol_type = other DNA
atggacatgcattgcaaggcagatcccttcagtgctatgcaccccgggcacgggggagtgaaccagctcggtggagtgttcgttaatggacgtccactccctgacgtcgtgagacaacgcatcgtggaattggcccaccagggcgtcagaccttgtgacatttcccgacagctacgagtgtcccacggctgcgtgtcaaagattcttgggaggtattacgagacggggtccataaaaccaggagtcatagggggttctaagcctaaagttgccaccccaaaagtggtcgataaaatcgctgagtacaaacgacagaaccctacaatgttcgcctgggaaatacgagataggttactggctgaaggcatatgcgacaacgataccgtgcccagcgtgagttctatcaaccggattattaggacgaaggtccagcagccatttcacccaaccccagatggggctggaaccggtgtcacagctcctggacacacaatcgtaccctctacagcatcacctccagtttcaagtgcatcaaatgatccggtgggcagttacagtatcaatggcatcctggggatcccaaggagcaatggcgaaaaaaggaagcgcgatgaggacgtgtccgaggggagtgtcccgaatggagactctcagtctggcgtggacagtctccggaagcaccttagagcagacaccttcacacagcagcagctggaggctcttgaccgcgtgttcgagaggccctcataccccgacgtgtttcaggcctcagagcacatcaagtctgaacaggggaacgaatactccctgccagccctgaccccaggactggatgaggtcaaaagttcactgagcgcctccaccaaccccgaactcggatccaatgtcagcgggactcagacttaccccgtggtgactggccgcgatatggcctcgactaccctgccggggtatccaccacatgtacccccaaccggccagggctcatatccgaccagtacactggcaggaatggtccccgaggccgcggttggcccatccagttctctgatgtctaagcccggacggaagctggctgaagttccaccttgcgttcagccaacaggtgccagctcaccagccacccgcactgccaccccatcgactagacccaccactcgcctgggagactctgctacccccccttactag

SEQ ID NO: 127671 - DNA, 990 bp, synthetic construct
  misc_feature 1..990: note = Description of Artificial Sequence: Synthetic coding sequence
  source 1..990: mol_type = other DNA
atgttcgcctgggaaatcagggatcgtctcttagccgagggaatatgcgacaatgatacagtgccatcagtgtcttcaatcaatcggatcattcgcacaaaggtgcagcagccttttcacccgacccccgatggggcggggacgggcgtgaccgctcccggccacactattgtgccctccactgcatccccccccgtgagctccgcctcaaatgaccccgtcgggtcatacagcataaacggcattctgggcatcccaagaagcaacggtgaaaagagaaagagggacgaggtagaggtgtacactgaccctgcccatataaggggtggggggggactgcacctggtctggacccttagggacgtatctgaagggtccgtccccaacggcgattctcaaagcggggttgattccttgaggaagcacctgagggccgatacctttacgcagcagcaactggaagcccttgatcgggtcttcgaaaggccttcatacccggacgtgtttcaggcaagcgagcatatcaagtcagagcagggtaacgaatacagcctgcctgcacttacacccggcctggacgaggttaaaagcagcttaagcgcctctactaatcccgagttaggatccaatgtgagcggcacccagacctacccagtggtgaccggtagggacatggcctccacaactctgccaggctaccccccccacgtgcctccaaccgggcagggtagctaccctacctccactctggccggaatggtccccggctctgagttctctgggaatccttactcacacccccagtatactgcgtacaacgaggcgtggcggttctcgaatcctgctctgctgagtagtccctattattattccgctgccccgcgcggatcgctgccactcctccccttacccatgaccgccacttcatatagaggagaccacatcaaactgcaagctgacagtttcggcctgcacatagtgcccgtttag

SEQ ID NO: 127672 - DNA, 1260 bp, synthetic construct
  misc_feature 1..1260: note = Description of Artificial Sequence: Synthetic coding sequence
  source 1..1260: mol_type = other DNA
atggacatgcactgcaaggccgatcccttcagcgccatgcatccaggacacggcggcgtgaaccagctgggtggcgttttcgtcaacgggcggccactgccggacgtcgtacggcaacgtatcgttgaattggcacaccagggggtgcgcccttgcgacataagccggcagctgagggtaagccacggctgcgtctcaaagattctcggacgctactacgaaaccggatctatcaagcctggggtgataggagggagtaaacccaaagtggctactcccaaagtggtggataaaatcgctgaatacaagcgccaaaaccctacgatgttcgcatgggagatcagagaccgccttctcgccgaggggatctgtgacaacgatacagtgccatcggtctcgtctattaaccgcatcattaggaccaaagtgcagcagccatttcatcctactccggatggcgcgggaacaggagtcaccgctcccggccatacaattgtgccaagcactgcatctccccctgtgagctctgcgtcgaacgatccagtgggatcttactctatcaatgggattctgggaatccctcgctcaaatggggagaagcgcaagcgagacgaggtggaagtctacactgatccagcacacattcgaggcggcggcggcttacatcttgtgtggaccctgagagacgttagcgaggggagtgtgccaaatggggactctcagtcaggcgttgacagtctgagaaagcatctgagggcagacacctttacacaacagcagttagaagctctggatcgggtgttcgaaaggcccagttacccagatgttttccaagcgtctgaacacattaagtctgagcagggcaatgagtattccctaccggctctcacaccaggtttggacgaggttaaatcctcattatctgcctctaccaatcccgaactcggcagtaacgtctcagggactcagacttatcccgttgttacaggtcgggatatggcttccacaaccttgcccgggtatcctccgcacgtcccccccacgggtcaagggtcgtacccaacttctaccctggccggcatggttcccgaggccgccgtggggccgtcttcgagcctgatgtcaaaaccaggaagaaagctggccgaagttcccccatgcgtgcagccaaccggtgcgtccagtccagccacaagaactgccacgccttccactcggccaactacccggctgggcgactcggcgactccaccctactag

SEQ ID NO: 127673 - DNA, 645 bp, synthetic construct
  misc_feature 1..645: note = Description of Artificial Sequence: Synthetic coding sequence
  source 1..645: mol_type = other DNA
atggatatgcactgcaaggccgaccctttttccgccatgcaccctggccatggaggagtaaaccaacttggaggcgtatttgtcaacgggagacccttacctgatgtggtcaggcagcgcatcgttgagcttgcccatcagggcgtacggccctgtgacatctctaggcagctgagggtcagtcacgggtgcgtaagcaagatcctcggcaggtattacgaaaccggcagtattaagcctggagtgatcgggggaagtaaacccaaagtggctactccaaaggtggtcgacaagatcgcagagtacaaacgccagaatccgaccatgtttgcctgggagatcagagaccgccttctggctgagggcatctgtgacaatgataccgtaccttcggtgtctagcatcaatcggatcataaggaccaaggtgcaacaaccttttcatcccactcccgatggcgcaggcaccggagtcaccgcacctggtcataccattgtcccaagcacagcctcccctcccgtgagctccgctagcaacgacccggttggatcatattctatcaatggcatccttggaattcctaggtctaacggcgagaagcggaaacgagacgaggtagaagtttacaccgatcctgcgcattag

SEQ ID NO: 127674 - DNA, 1254 bp, synthetic construct
  misc_feature 1..1254: note = Description of Artificial Sequence: Synthetic coding sequence
  source 1..1254: mol_type = other DNA
atggatatgcactgcaaggccgacccattctccgcaatgcaccccgggcatggcggagtgaatcagctcggaggggtgttcgtgaacgggaggcccctcccggacgtcgtccggcaacgaatcgtggagcttgcccaccagggcgtgcggccatgcgacattagtaggcagctgcgggtttcccacggatgtgtgagcaagatcctgggtcgctattatgagacaggcagtattaagccaggagttatcggaggaagtaagccaaaagttgccacccccaaggttgttgacaagatcgctgagtacaagcgacagaaccctactatgtttgcgtgggaaatccgggaccgcctgcttgcagaggggatctgcgataatgatactgttcctagcgtgagtagtatcaatagaattattagaacaaaggtgcagcagccctttcacccgacgccggacggggccggcacaggcgttacagccccgggacacacaatcgttcctagtacagcttcacctcctgtttcctccgctagcaacgacccagtcggttcgtactccattaatggcatccttggcattccaaggtctaatggcgagaagagaaaaagggacgaggtcgaagtctatactgatcccgctcacattcggggtggcgggggcttgcatctggtctggaccctcagagatgtgtccgagggcagcgtccctaacggtgattcacagtccggtgtcgacagcctccgcaagcacctgcgagctgatacgtttacgcagcaacagctggaggctttggacagagtgtttgagagaccctcttaccccgatgtcttccaggctagtgagcatatcaagtccgagcaaggcaacgagtacagcctacccgccctcaccccaggcttggatgaggtcaaaagctctctcagcgccagcactaatccggagctcggaagcaatgtatccggcactcagacatatccagtagtaaccggaagggacatggcttctacaactcttcctgggtaccctccccatgtacctcccacagggcaggggtcctatcccacgagtaccctggctggcatggttccaggtagcgagttctccggaaatccctattcgcatccccagtatacggcttataacgaagcttggaggttttcgaatcccgcgctgctaagctctccttattattactcagccgcaccccgcgggtccgcacctgccgcagcagctgccgcttacgatcgacactag

SEQ ID NO: 127675 - DNA, 621 bp, synthetic construct
  misc_feature 1..621: note = Description of Artificial Sequence: Synthetic coding sequence
  source 1..621: mol_type = other DNA
atgacaaccctggctggagccgtcccacgaatgatgcggcctgggcccggacagaattatcctcgctcaggctttcctcttgaggtcagcacaccactaggacagggaagagtgaatcagctcggcggcgtctttatcaatggtcggccactgcccaaccacatccgtcataaaattgttgaaatggctcatcacggcatcagaccctgcgttataagtcgccagctcagagtcagccatggttgcgtctcaaaaatactttgtcgatatcaagagacaggttcaatcagaccaggcgctatcggcggctcgaagccgaaacaggtgactacacccgatgttgagaagaaaatagaggaatacaagcgggaaaaccccgggatgttttcatgggagatacgcgacaagttgctgaaggacgcagtgtgcgataggaacaccgtgccatccgtaagcagcatatctcgtatcctgaggagcaaatttggaaagggcgaggaggaagaagccgacctcgagaggaaagaggctgaggaatctgagaaaaaggctaaacattcgatcgatggaatcctgtccgaaaggggtaaggctttggtgagcggagtatcatctcactag

SEQ ID NO: 127676 - DNA, 1224 bp, synthetic construct
  misc_feature 1..1224: note = Description of Artificial Sequence: Synthetic coding sequence
  source 1..1224: mol_type = other DNA
atgaccaccctggcaggtgccgttcccagaatgatgcgccccggacctggccaaaactacccccgctcaggttttcccctggaggtgtctaccccccttggtcaggggagggtcaaccagcttggcggggtgtttatcaacggtcgacctcttccaaaccacattcgccacaagattgtcgaaatggcacatcacgggattcgcccatgtgtaatcagtcggcagctacgcgtgagccatggatgcgtctctaaaatactgtgcaggtatcaagaaaccgggagcattaggcccggagccattgggggctccaaacccaaacaagtgaccacaccagacgtagaaaaaaagatagaggagtataagcgtgagaatcccggtatgttttcttgggagatccgagacaaactgttgaaggatgccgtgtgcgatcgcaataccgtgccttccgtaagctcgatcagcagaatactgagatccaaattcggaaaaggggaggaagaagaagccgatttagagcggaaggaggcagaggaatctgagaagaaggctaaacattcaattgatgggatcctgagcgaaagggcgagcgcacctcagtccgacgaggggagcgatattgattctgaaccagatctgcctctcaagcgcaagcagcggcgaagtagaacaacgtttacagcagaacagctggaggagctggagagagcgttcgaacggactcattatccagacatatacacgcgggaggaactagcgcagagggctaaactcacggaagcgagagtgcaagtttggttttcaaaccgtagggcccggtggcgcaaacaagcgggagctaatcagctgatggcgtttaatcaccttatccccgggggtttccctccaactgccatgcctaccctacctacgtaccagctgtctgaaactagctaccagcctacgagtattccacaggcagtctctgaccccagttccacagtgcaccgcccacagcccctgccaccctccacagtgcatcagagtaccatcccttcgaatcctgattccagctcagcttactgcctgccctctaccagacatgggtttagctcctacacagatagcttcgtgccaccctcaggaccatcaaatccaatgaaccccaccatcggcaatgggcttagtccgcaggtgccattcattatctcatctcagataagcctcggtttcaaatccttctag

SEQ ID NO: 127677 - DNA, 1212 bp, synthetic construct
  misc_feature 1..1212: note = Description of Artificial Sequence: Synthetic coding sequence
  source 1..1212: mol_type = other DNA
atgactaccttagccggcgccgtccctcgcatgatgcgacccggacccggtcagaactatcctaggagtggtttcccacttgaggtgagcacccccttgggccaggggcgggtcaaccaactgggcggggtgttcatcaatggtcgccctttgcccaatcatattcggcataagattgtcgagatggcacaccacggaatccgaccttgcgtcatctcgcggcagctaagagtgagccacgggtgtgtttctaagattctgtgccgctaccaggagacaggcagcatcagacctggtgccattggtggctccaaacccaaacaggtgactacaccagatgtggaaaagaaaatcgaagagtataagagggaaaatccgggaatgttttcgtgggagattagggacaaactgctgaaagatgctgtctgcgaccggaataccgtcccatccgtcagctccatctcccgcatcctgaggagcaaatttgggaaaggtgaggaagaagaagctgacctggagcgaaaggaggccgaagaaagcgagaaaaaggctaaacattccattgacgggatcttgagcgagcgggcatcggccccccagtcagatgaaggaagtgacattgactctgaacccgatctgcccttaaaacggaaacagcgcaggtcccgtaccacattcaccgctgagcaactggaggaattggagcgagcttttgagaggactcactaccctgatatttatacccgcgaggaactggcccagagagcgaagctaaccgaagcccgcgtgcaggtctggttctctaataggcgggctagatggcgtaagcaggccggcgccaaccagctgatggccttcaaccacctcatcccaggcgggttccctccgacagctatgccaactctccctacttaccaactcagtgagacgtcctaccaacctacatcgatcccccaagccgtatccgacccctcttccaccgttcaccggccccaacctctccctccatccacggtgcaccagagcacgattccaagcaatcccgattcttcctccgcatattgtctgcctagtacgaggcacggcttttcaagttacacggacagcttcgtgccccccagtggcccgtcgaaccccatgaacccaaccattggcaatgggctgtcaccgcaggtacccttcattatatcatcacagatcagccggaagtag

SEQ ID NO: 127678 - DNA, 1440 bp, synthetic construct
  misc_feature 1..1440: note = Description of Artificial Sequence: Synthetic coding sequence
  source 1..1440: mol_type = other DNA
atgactactctcgccggggccgtgccccggatgatgcgaccgggccctgggcagaattatccaaggtctgggtttccactagaggtttcaaccccgctggggcaaggacgcgtcaaccagctaggaggcgtgtttataaacggacgcccactgcctaaccatatacgccacaagatcgtggagatggctcaccacggcattcggccctgcgtgatttcacgtcagcttagagtatcgcacggatgcgtgagcaaaatcctctgtcgatatcaagaaaccgggagtattcgaccaggagctattgggggttccaaacctaaacaagtgacgacaccagacgttgagaagaagatagaagagtacaagagagagaatccaggcatgttttcctgggagataagggataagctgttgaaggatgctgtctgcgatagaaacaccgttccatccgtgtcaagcatcagccggatcctgagatctaagtttggcaagggggaagaggaagaagccgatttagagcggaaggaggcagaggaaagcgagaagaaggcgaaacacagcattgacggcatcctgagtgaacgcgcatcagctccgcagagcgacgaggggtcagatattgattcagagcccgacttgcctctcaagcgcaaacagagaaggtcaaggacaacatttactgcggagcaattggaagagctcgagcgcgcctttgagaggactcactatcctgatatctataccagggaggagctagctcagagagcaaagctcaccgaggcccgcgtacaggtgtggtttagcaatagacgggcccgctggcggaagcaggccggagctaatcagctcatggccttcaatcacctgatcccggggggatttcctcccaccgccatgcctacattgccaacctaccagctgtccgagacgagctaccagccaacgtccatcccccaggccgtctccgacccctcttcaaccgtgcaccgaccgcagccccttcccccatctacagtccatcagtctacaatcccttctaatccggactccagctctgcctattgccttccatcaaccaggcatgggttctctagttataccgactcttttgtccctcccagtggaccctctaatcccatgaaccctaccatcggaaatggacttagcccacaggtgatgggactgctgacaaaccacggaggagtgccccatcagccacaaactgattacgccttaagtcctctaacaggtggactcgaacctactacaacagtgagcgcctcctgcagccaaaggctggatcacatgaaatcccttgactcacttccgacttcacagtcctattgccctccgacctactcaaccaccggctactccatggaccccgtgaccggctaccaatacggacagtatggccagtcaaaaccctggactttctag

SEQ ID NO: 127679 - DNA, 1518 bp, synthetic construct
  misc_feature 1..1518: note = Description of Artificial Sequence: Synthetic coding sequence
  source 1..1518: mol_type = other DNA
atgacaaccctggccggcgctgtgcctcgaatgatgcgaccagggcccggtcagaattatcctaggtccggctttcctctggaagtcagcactcctctgggccaaggcagggttaatcagctgggtggagtctttattaatggcagacccctgcccaaccacataagacacaagattgtggaaatggcccaccacgggataagaccctgtgtgattagccgccaactgagagtgtcccacggctgcgtttcgaagatcctgtgtagatatcaggaaaccggttcaatccgtcccggagccattggagggagcaagcctaagcaggttaccacaccagacgtagagaaaaagatagaagagtacaaacgcgagaatcccggtatgttcagttgggaaattcgggataagcttctgaaagacgcggtgtgcgataggaacactgtgccaagcgtcagcagcatatcaagaatactgcgctctaaattcgggaagggggaagaggaggaggctgatttggaaagaaaggaggctgaagagtcagagaaaaaagctaagcatagtatcgacggcatcctgtcagagcgcgcctcagctccccagtcagatgaagggagcgacattgatagcgaaccagatctacctttgaagcgtaaacagcgcaggagccgcacaacctttaccgctgagcagttagaggagctcgagagagcctttgagcgaacacactatccagatatctacacacgcgaggagctggcccaacgcgccaagcttactgaggcacgcgtgcaggtctggttcagtaacaggcgagcccgttggcggaaacaggccggggccaatcaactaatggccttcaatcacttgatacctggcggctttccgcccactgctatgccaacgctgcctacgtatcaactgtcagagacctcctatcagccaacgtccattccccaagccgtctcagatcctagtagcactgtccacagacctcagccgctccctccctcaaccgtgcaccagtccactatcccttcgaatcctgacagtagctccgcctactgcctgccctcaaccaggcacggctttagctcctacaccgactcatttgtgccaccatctggacctagtaatcccatgaatccaaccattggtaatgggctttcacctcaagtgatgggcctgctgactaaccacggcggagttccccaccagcctcagacagactatgccctctcccccctgactggtggactggaaccaacaacgactgtgagtgccagctgttcacagcggctcgatcacatgaagagtttggacagcctgcccacgtcccagagctactgtccacccacctactcaacaacgggatatagcatggatcccgtgacaggctaccagtatggccagtatggtcagtcggctttccactatctgaagcctgacatcgcgtggtttcagatactgttaaacaccttcgataaaagcagtggtgaagaggaggacttagaacagtag

SEQ ID NO: 127680 - DNA, 1455 bp, synthetic construct
  misc_feature 1..1455: note = Description of Artificial Sequence: Synthetic coding sequence
  source 1..1455: mol_type = other DNA
atgaccacactagccggcgccgtgcctcgaatgatgaggcccggccccggtcagaattaccctagatcaggctttcccttggaagttagcactccattggggcaaggacgggtgaaccagttaggaggggtgttcatcaacggtcggccactaccaaaccatatccggcacaaaattgtcgaaatggctcatcacggtatcaggccctgtgtcatcagccgccagctgcgggtttcccacgggtgtgttagcaagatactgtgcaggtatcaggagactgggtccatcagacccggagccattggagggagcaagccaaagcaagttaccacgcctgatgtggaaaaaaaaatagaagaatataaacgggagaacccaggcatgttttcttgggagatccgggataagcttctgaaagacgctgtctgcgaccgcaataccgttccctccgtgtcttcaatctcacggatcctgagaagcaaattcgggaagggagaggaggaggaagcggacttagaaagaaaagaagccgaagagagcgagaagaaggccaagcactcaatagatggaattctctcagaacgggcaagtgcgccccaatctgatgagggatcagacatcgactctgagcccgatctgcccctgaagcgcaagcagcgtcgatcgagaactacctttacagcagaacagctggaggagctggagcgcgcctttgaaagaacccattaccctgacatttacaccagagaggaactggcgcagagggcgaaattgactgaagctagagtccaggtttggttctccaaccgacgcgcaaggtggcgcaagcaggcgggagcaaaccagctgatggcctttaaccatctcatcccaggaggcttccctccaactgctatgcccacattgccgacctatcaactgtctgagacaagctaccagccaacctctatcccccaagccgtgagtgacccaagctccactgtgcatcgtccgcagccattgccgcccagcaccgtccatcaaagtacaattccttctaaccctgattcttcctctgcttattgtttgccaagcactcggcacggattttcatcctatacagactcattcgttcccccttcaggaccttccaatcctatgaaccctactattgggaacgggctgagtccgcaggttatgggcctcctgacaaatcatgggggggttcctcatcagccccagacagactacgcgttgtcccccctcactggcggactggagccaactacgactgtgtccgcatcgtgtagccaacgccttgaccatatgaaaagtttggacagtttacccacatcacaatcatactgtccccccacatactcaacaacgggctattctatggatcccgtgaccggataccaatatgggcagtacggtcaatcagcctttcattacctgaagccagatatagcctag

SEQ ID NO: 127681 - DNA, 1452 bp, synthetic construct
  misc_feature 1..1452: note = Description of Artificial Sequence: Synthetic coding sequence
  source 1..1452: mol_type = other DNA
atgacaaccttagccggagcggtgccaagaatgatgagacccggcccaggccagaactaccccaggagtggtttccctcttgaggtgtcgactccactgggacagggtcgagtcaatcagctgggtggcgtcttcatcaacggccgaccgctgcctaaccatatccgacataagattgtcgaaatggcacatcacggcatccgcccttgcgtgatttccaggcagctgagagtatcacacgggtgtgtttcaaaaatcctgtgtcgttaccaagagacaggttcgatacgccccggggctattggtggtagtaagccaaaagtcactacacctgatgtagaaaaaaagatcgaggagtataagcgcgaaaatccaggcatgttttcttgggagatcagagacaagttacttaaagatgcagtgtgcgacaggaatacagttccctccgtatcaagcatatcgcgcatcctgcgaagtaagttcggcaagggcgaagaggaagaggctgatctcgagcgcaaagaagcagaggagtctgaaaagaaagccaagcactccatcgatggcattctgagtgagagagcttccgcacctcagtcggacgaaggatccgatatcgatagcgaaccagacctcccactgaagagaaagcagaggaggtccagaaccaccttcacagccgaacagttggaagaactggagcgtgcgtttgagaggactcactacccagacatctatacccgagaggaacttgcgcagagagcgaaactcacggaagcaagggtgcaagtgtggttctccaatcgcagagcgcggtggaggaagcaagccggcgccaaccaactaatggcctttaaccacctgatccctggtggctttccaccaaccgccatgccaactctacctacctaccagctcagcgaaacatcatatcagccaaccagcataccacaagccgtgagcgacccatcctccacagtccatcgccctcagcctcttcctccaagtaccgtgcatcagagtacaataccgtctaatccggatagctcatccgcttattgtctcccctctactaggcatggtttctcatcatacacagattcttttgttcccccttcaggtcctagcaatcccatgaaccccaccatcggaaatggcctttctccacaagtgatggggcttctcaccaaccacggtggggtacctcatcagcctcagaccgattacgccttatccccgttgactgggggcctagagccgacaacaactgtttccgcaagctgttcccagcgactggaccatatgaagagtctggacagcctccctacctcccaaagctattgccccccaacgtactcaactacaggttactctatggaccctgtgacagggtatcagtacggccaatatgggcaatcagcttttcactacctgaagcctgatattgcctag

SEQ ID NO: 127682 - DNA, 648 bp, synthetic construct
  misc_feature 1..648: note = Description of Artificial Sequence: Synthetic coding sequence
  source 1..648: mol_type = other DNA
atgaccaccttagccggcgcagtgccacggatgatgagacccggccctggccagaattaccccaggtcaggttttccgttagaggtctctacccccttggggcagggtagagtgaaccagctgggaggcgtgttcatcaacggccgcccattacctaatcatattcgacacaagatcgtggaaatggcccatcatgggatcagaccatgtgtcatctcgcgtcagctgagggtttcccacgggtgcgtgagtaaaatcctgtgtcgctatcaggaaacaggcagtatcaggccaggagctataggcggtagtaagcctaagcaagtcactacccctgatgttgagaaaaaaattgaggagtacaaacgggagaaccctgggatgttcagttgggaaatccgtgataaactgctgaaggacgccgtatgcgaccggaataccgtgcccagcgtcagctctatcagtagaatactccggtccaaattcggaaagggcgaagaggaggaggccgacctggagcgaaaagaggcagaagagtcggagaagaaagcaaagcactcaattgatggcatattgtccgagcggggaaagcgatggaggctagggagaaggacatgttgggtgacgtggcgagcaagtgcctcatag

SEQ ID NO: 127683 - DNA, 822 bp, synthetic construct
  misc_feature 1..822: note = Description of Artificial Sequence: Synthetic coding sequence
  source 1..822: mol_type = other DNA
atgcatcaggatggcatcagcagtatgaaccagctcggcggcctctttgtgaacggtaggccactgcctctggacacacggcagcagatcgttaggttggcagtgtcaggaatgcgtccttgtgatatttcaaggattctcaaggtcagcaacggttgtgtcagcaagatcctgggaaggtactataggactggcgttctggagccaaaaggcatcggcggtagcaaacctagacttgctactccgcctgtggtggcgcgtatcgctcagctcaagggggaatgccccgctctgtttgcctgggagatccaacgacagctctgcgccgaaggtctgtgtacccaggacaagacaccgtccgtgtctagtattaaccgagtgctgagagccttgcaggaagatcaggggctcccctgtacccggctgcgcagccccgcagtcctggcacctgcagtgctgaccccacatagcgggtccgaaaccccccgcggcacacatcccggaacagggcatcgaaaccgaaccattttcagcccatcccaagccgaggccctggagaaggagttccagcggggccagtaccccgatagtgttgctcgtggaaagttagcaaccgccacaagtttacctgaggatacagtcagggtatggttcagtaatcggcgggctaaatggcgccgccaggagaaactgaaatgggagatgcagctacctgctgtaccatggcaatgcgcacactcttctcctgcgtgtcccggcacgaccggatctttgctcctgagtgccgtcctaggtaactccacacgaaaggtatctgaatag

SEQ ID NO: 127684 - DNA, 1032 bp, synthetic construct
  misc_feature 1..1032: note = Description of Artificial Sequence: Synthetic coding sequence
  source 1..1032: mol_type = other DNA
atgaaccaacttggcgggctgtttgtaaatggccggcccctgcctctggacaccaggcaacagatagttagactggcagtctctgggatgcggccttgcgatatctctcggatactgaaggtgagcaatggatgcgtaagtaagatcctgggccgttactacagaacaggcgtccttgaaccaaaagggattggcggctccaaaccacgcttggccacacccccagtggttgcccgaattgctcaactgaaaggagagtgcccggctttattcgcgtgggaaattcagcgccagctttgtgctgagggcctctgcacacaggataaaacacccagtgtatcttctatcaatagggttttgagagccctgcaggaagaccaaggcctcccctgcacgcggttacgttctccagccgtactcgcacccgctgttctgaccccacactcagggtctgagaccccacgcggaacccaccccggcacaggtcacaggaatagaacgattttttcacccagccaagctgaagcgttagaaaaagaattccaaagaggtcagtatcccgattctgttgcacgcggtaagctagcaacagcaacttcactgcccgaggacacagtgcgcgtatggttttctaatcgaagagcaaaatggcgacggcaggaaaaactcaaatgggaaatgcagcttcctggggcatctcagggcctcacggtgccgagggtggcacccgggatcatctccgcccagcagtctccaggctcagtgcctacagctgcattacccgcactggaacctctagggccaagctgttatcagctgtgttgggccaccgcacccgaacggtgtctgtcggacactccccccaaggcatgtctcaaaccatgttggggtcatctgccccctcagccaaacagcttagatagcggccttctatgcctcccatgtcccagcagccactgccatcttgctagcctcagtggcagtcaggcacttctatggcctggctgccccctgctgtacgggctagaatag

SEQ ID NO: 127685 - DNA, 1047 bp, synthetic construct
  misc_feature 1..1047: note = Description of Artificial Sequence: Synthetic coding sequence
  source 1..1047: mol_type = other DNA
atgcatcaggatgggattagcagtatgaaccaactggggggtctgtttgtaaatggcaggccgctgcctttagatacacggcagcaaatcgtgaggctcgcggtctctgggatgaggccttgtgatatttctcgcattctcaaggtcagtaacggatgcgtgtcaaaaatcctaggtaggtactaccggaccggcgtcctggaacccaaggggataggaggctctaagcctaggctagcaactccccctgtggtggcgagaattgcccagctaaaaggtgagtgtcccgccctgtttgcttgggaaattcagaggcagctgtgcgcggaaggtctttgtacccaagacaagaccccatcagtgagttccattaacagggtgttgcgcgcattgcaggaggaccagggcctgccctgcacaaggcttcggtctcctgcggtgctggccccagctgtattgacaccccattcaggaagcgaaacacccaggggcacacacccaggtaccgggcaccggaataggaccattttctcacccagtcaggcagaagctctagaaaaagaattccagcgggggcagtaccctgactctgtcgccagagggaaactcgctaccgcgacctcccttcctgaagatactgtccgagtctggttctctaatcgccgagcaaagtggcgacggcaggagaagctcaaatgggagatgcaactgcccggagcctctcagggcctaactgtgccccgcgtggcccctggaatcattagtgcccaacagagccccggaagtgtgccgacagctgcactgcccgccctggagcccctcggcccaagctgctaccaactctgttgggcaaccgcacccgagcgatgtctttccgacacaccaccgaaagcctgtctcaagccctgctgggactgcgggtcttttctactcccagtaatcgccccatcatgtgtggacgtggcatggccctgtctggatgcctccctggcacaccatttaattggtggtgcgggcaaggccacccctactcacttctcccattag

SEQ ID NO: 127686 - DNA, 1563 bp, synthetic construct
  misc_feature 1..1563: note = Description of Artificial Sequence: Synthetic coding sequence
  source 1..1563: mol_type = other DNA
atggctgcactacccggcaccgtcccacgaatgatgcgaccagctcctggtcagaactacccccggacaggatttccactagaagtgtccacccccttagggcaagggcgggtaaatcagctggggggtgtgtttataaacggacgcccgctccctaatcacattcggcataagattgttgaaatggctcatcatggcataaggccatgcgtcatcagccggcagctaagagtgtcacatgggtgcgtgagcaaaattctgtgtcgctaccaggaaaccggttccatccggccaggtgccattggcggttcaaaaccccgtcaggtcgcaacacccgatgtagagaagaagatcgaggaatacaagagggaaaaccccggaatgttctcttgggaaataagagaccgtttgctgaaggatggacattgcgaccggtcgactgtcccgtcaggtctggtcagcagtattagtagagtgcttagaattaaattcgggaaaaaggaggaggaggacgaagcggataagaaggaagacgacggggaaaaaaaggctaaacacagcatcgatggaatattaggggataaaggaaatcggctggacgagggatcagacgtggagtccgagccagacttgcccctgaagcgcaaacagcgccggtctagaacaactttcacagcagagcaacttgaggagctggagaaagcttttgagcgaacacactaccctgacatctataccagggaggagctggcacaaagaacaaaactgactgaagctcgcgtgcaggtatggttttcaaataggagagcacgctggagaaaacaagccggagccaatcagctggctgcattcaaccatcttctgccaggcggctttccccctacaggcatgccaacactccccccttatcagctacctgatagcacataccctacaaccacaatatcccaggatggcgggtctacagttcaccgtcctcagcctctccccccaagcacaatgcaccagggcggactggcagccgcggcagctgcagctgacaccagctctgcctatggcgctagacattcattctcgtcgtacagcgactcttttatgaaccccgcggcgcctagcaatcatatgaaccccgtgagcaacgggttatccccacaggtgatgtctatcctcggaaacccttccgccgtccccccccagccacaggcagatttttccatttcacccctgcatgggggcctggatagcgccactagtatatctgccagttgctctcaacgggcagactccatcaaaccaggagatagcctaccaactagtcaggcctattgtccacccacctatagcaccacggggtattccgtcgaccctgtcgcaggctatcagtatggccagtatggacagtctgagtgcctagttccctgggccagtcctgtcccaattccctcccctaccccgcgggcaagttgtctgttcatggagtcctataaagtggtgtccggctgggggatgagtatcagtcagatggaaaagctgaaatcttcccagatggaacagttcacgtag

SEQ ID NO: 127687 - DNA, 1557 bp, synthetic construct
  misc_feature 1..1557: note = Description of Artificial Sequence: Synthetic coding sequence
  source 1..1557: mol_type = other DNA
atggcggccctgcccgggactgtcccgagaatgatgcgccccgcacctggtcagaactaccccaggaccggcttcccactcgaggtctctactccccttggacaggggcgggttaatcagttgggcggagtgttcatcaatggacgacccttgccgaaccacattagacacaagatagtcgaaatggcgcaccacggcattcgaccatgcgtgatctcccgccaattgcgcgtgtcacatggctgcgtttccaagattctttgtcggtaccaagagaccggcagtatcagacccggggccattgggggctcaaaaccaagacaggtggcgactcccgacgtcgagaaaaagattgaggagtataagagggaaaatcctggcatgttctcatgggagatacgcgatagacttttaaaagacgggcactgcgacaggagcactgtccctagcgttagcagcatctctagagtgctgcgaatcaagtttgggaaaaaagaggaggaggacgaggccgacaagaaggaagatgatggggaaaagaaggcaaagcattctatcgacggcatcttgggggataaggggaatcgtctggatgaaggatccgacgtggaatccgaaccagacctgccgttgaagcgaaaacagcgacgctctagaaccaccttcacagccgagcagctggaggagctagaaaaagcttttgaaaggacccattaccctgacatttatacacgcgaggagctggcccagcgcaccaaactgaccgaagcacgcgtccaagtatggttctctaaccgtcgggcccgctggaggaaacaggctggtgccaatcagctagcggccttcaatcatctacttccgggtggcttcccccccactggaatgcccaccctgcccccgtaccagctgcctgattctacctacccaacgaccacgataagccaggacggcggctcaacggtccaccggccacagcctctgccaccttccacgatgcaccaggggggactagcggccgctgcggccgccgcagatacttccagtgcatatggcgcccgtcactcattttcttcgtattcagatagcttcatgaatccggcagctcccagtaaccacatgaatcctgtttccaatggactgagcccccaggtgatgtctattttgggcaatcctagtgctgtccccccacaaccgcaagccgacttttctatttcccctctccacggcggattggactctgccaccagcatctccgcatcgtgctcccagcgggctgattccattaagccaggggacagcctacccaccagccaggcgtattgtcctcctacttacagcacaacagggtactctgtggaccctgtcgcaggatatcagtatggacagtatggccagtccgagtgcctggtgccttgggctagcccagtgcctattccgtcacccacccctcgcgcatcatgcctattcatggagtcatacaaagtggtttcaggttgggggatgagcatctcgcaaatggaaaaactaaaatccagccaaatggaacagttcacatag

SEQ ID NO: 127688 - DNA, 1518 bp, synthetic construct
  misc_feature 1..1518: note = Description of Artificial Sequence: Synthetic coding sequence
  source 1..1518: mol_type = other DNA
atggccgcactcccaggcacagttcctcgcatgatgagaccagcccccgggcagaactacccacgcaccggtttccctctcgaagtctccacgcctttgggacagggcagagtgaaccaactgggaggtgtcttcattaatgggaggcctttaccaaaccacatcagacacaagatcgttgagatggcgcatcatggtataaggccttgcgttatcagtcgccagctgcgagtcagtcacggatgtgtgtccaagattctctgcagataccaggaaacggggtccattaggccaggcgcaattggcggaagcaagccgcggcaagtcgccactccagacgttgaaaagaagatcgaagaatacaagcgtgaaaatcctggaatgttcagctgggagattcgagatcgcctacttaaggacgggcactgcgataggagcacggtgcctagcggcttagttagcagcatcagtagggtcctcaggattaaattcggcaaaaaagaggaggaagacgaggccgacaaaaaggaggatgacggcgaaaaaaaagcgaagcattccatcgacggcatcctcggcgacaaggggaatcggctggacgagggatctgacgtcgagagcgagccagatctgcccctgaagcgcaaacagcggagaagtagaaccacgttcacagctgaacagctcgaagagcttgagaaggctttcgagagaacccactacccagacatatacaccagagaggaactggcacagcggaccaaactgactgaggccagggtgcaggtgtggttcagcaatcggcgggcacggtggcgaaagcaggccggggccaatcagctggcagcatttaatcacttgctgccgggcggattcccacccacaggtatgccaacacttccgccttaccagctccctgatagtacctatccaacaaccaccatcagtcaagacggaggctccacagtacataggccacagccacttccaccttccaccatgcatcaaggtggactcgctgcagccgcagccgcggctgacacctcatccgcttacggggcccggcatagcttttcatcctacagcgatagctttatgaatccagccgccccctccaatcacatgaatcccgtctcaaatggcctcagcccgcaggttatgagcatactcgggaatccaagcgcagtgccccctcagccacaagccgacttcagcatttctccgctgcacggcggacttgacagtgctaccagcatctctgcttcttgcagccagagggcagatagcatcaagcctggcgacagtctgccaactagtcaagcgtactgcccgcccacctattcgactactggttacagcgttgatccggtagctggataccaatatggtcaatacggtcagacggcggttgactatttggcaaagaatgtgtctcttagtactcagcgtaggatgaagctcggcgagcatagcgcagtgttaggactgctgccggtggagaccggccaggcttattag

SEQ ID NO: 127689 - DNA, 1026 bp, synthetic construct
  misc_feature 1..1026: note = Description of Artificial Sequence: Synthetic coding sequence
  source 1..1026: mol_type = other DNA
atggagcctgcattcggggaagtgaatcaattggggggagtattcgtgaacggcagacccctgcctaacgcaatcagactgagaatagtggaactggcgcagctgggaattaggccgtgtgacatcagtcggcagctgagagtgagccacggatgcgtatcaaagatcttggcacgctataatgagactggctccatcctgcccggagccattggcggttccaaaccacgagtgacaactcctactgtcgtcaagcatattaggacttataagcagagagacccaggaatctttgcttgggagatcagagaccgactcctggctgatggggtgtgcgacaaatacaacgtgccgtctgtgagtagcattagcaggatcttacgcaataaaattggcaacctcgcccaacaggggcattatgactcctacaaacaacatcaacctaccccccagcctgcattgccttacaaccacatctatagttatccttcacccataaccgctgccgcagccaaggtgcccacccccccgggggtgccagcgatacctgggtctgtggcaatgccacgaacatggcctagctcccattcagtaactgacattctcggcattcgttccattactgaccaggtgagcgactcttctccgtaccactctcccaaagtcgaagaatggtcttcccttgggcggaacaattttccggcagctgctccacacgccgtcaatggactggagaagggagcactggagcaggaagccaagtacggacaagcacccaatggcctcccggcagtgggcagctttgttagtgcctcctctatggctccatatcctacacctgctcaggtgagtccctacatgacgtactcagctgctccctctggctacgtggcaggccacggttggcagcatgcaggaggcacttcgctgagtccgcataattgcgacatcccggctagcctggcctttaaaggaatgcaggcggctagagagggatcacatagtgttacagcttccgcactctag

SEQ ID NO: 127690 - DNA, 1026 bp, synthetic construct
  misc_feature 1..1026: note = Description of Artificial Sequence: Synthetic coding sequence
  source 1..1026: mol_type = other DNA
atggagcctgcgtttggtgaggtgaatcagctgggaggtgtctttgtcaacggcagaccactcccaaacgctattcggttgcgaattgtcgaattggcccagctaggtatcagaccctgcgatatttcccggcagctcagagtaagccacggctgtgtttccaaaatcctggctcggtacaacgaaacagggtccatcttacctggagctattggcggatctaagccaagggttacgactcctaccgtagtgaagcacattcggacgtacaagcagagggaccccgggatttttgcttgggaaattagggacagactgctcgctgacggtgtttgcgacaaatacaatgtgcctagcgtctctagcatctctcggatcctgagaaacaaaattggaaacctggctcagcagggacattacgactcttataagcagcatcaacctactcctcagcctgccctcccttataaccacatctacagctacccttccccaattacagccgcagcagccaaggtgcccaccccgcctggagtcccggccatccccgggagcgtcgccatgccgagaacatggccttccagtcatagcgtgacggatatcctgggaataagatcaattaccgaccaggtgtctgatagctctccgtatcacagtccgaaagttgaagaatggtcatcgctgggtcggaacaattttcctgctgccgcaccccacgcagtcaacggtctagagaaaggggccctcgagcaagaagctaagtatggacaggcgccgaacggactccccgccgtcggctcatttgtgagcgcctccagtatggcaccctaccccactccagcccaggtgtccccctacatgacgtacagcgctgcgccgtcgggatatgttgctggacacgggtggcaacacgccgggggcacctctctctcacctcacaactgcgacatcccggcaagcctggcatttaaagggatgcaggctgcacgggaaggctcgcactccgtcacagcaagcgctctgtag

SEQ ID NO: 127691 - DNA, 183 bp, synthetic construct
  misc_feature 1..183: note = Description of Artificial Sequence: Synthetic coding sequence
  source 1..183: mol_type = other DNA
agcgattccagcccttaccactccccgaaggtggaagagtggtcttctttggggcgcaataacttccctgctgctgcgcctcatgcggttaacggcttggaaaagggtgccttggagcaggaggctaagtatgggcaaatccaaaacttcttcctcctgatgatttccagactgaagttctag

SEQ ID NO: 127692 - DNA, 912 bp, synthetic construct
  misc_feature 1..912: note = Description of Artificial Sequence: Synthetic coding sequence
  source 1..912: mol_type = other DNA
atgggaagacctttgctgttaccactgctcccattgcttctgcctcccgcgttcttgcaaccaagcgggtccactggctctggtccttcttatttgtatggggtgacccagccgaagcatctgtctgcgagcatgggtggcagtgtcgagatccccttctcattttattacccttgggagctggctactgccccagatgtcagaataagctggcggcgcgggcacttccaccggcagagcttttatagtactagacccccctccatccacaaggattacgtgaaccggttgttcctgaattggacagaaggtcagaaatccggctttctgagaatctcgaacctgcagaaacaggaccagtcagtgtacttttgtagggtggagttggatactcggagtagtggcaggcagcagtggcagagtattgagggtactaagctaagtatcacacaagccgtaacaactaccacgcagcgccccagctctatgactacaacatggcggttgagctccacaaccacaaccacaggactgcgtgtgactcagggaaagaggcgcagcgatagctggcatatcagtctagagacagccgtcggggtggctgtggccgtgaccgtcctaggcatcatgatcttgggactgatatgcctgctccgctggcgtagacgcaaaggccagcagagaactaaggccacaactcccgcccgtgaacctttccagaataccgaggagccttacgagaatatcagaaatgagggccaaaacacggatcccaaactaaaccccaaggacgacgggatcgtttacgcatccttggccctcagcagctccacaagcccgcgagcccccccctctcatagaccactgaagagcccacaaaatgagacactctatagcgtgttgaaggcctag

SEQ ID NO: 127693 - DNA, 693 bp, synthetic construct
  misc_feature 1..693: note = Description of Artificial Sequence: Synthetic coding sequence
  source 1..693: mol_type = other DNA
atgggccgcccgctgctcctccctcttttgcctctgttattacccccagcgtttctgcagccctccggcagtaccggtagcggaccctcctacctatatggcgtgactcagcccaagcatttgagcgccagtatgggcgggtccgttgaaatccccttctcattttattacccatgggagcttgccacggctcctgatgtgagaatcagctggagaagaggtcattttcatagacagtctttttatagcaccagaccacctagcatccataaggactatgttaacagattgttcctaaactggacagaggggcagaagtctggcttcctgcggatcagtaatcttcaaaagcaggaccagtctgtgtacttctgtcgcgtggagcttgacactcggtctagcggacggcaacagtggcagtccatcgaagggaccaaattgtctataacccaggggcagcagaggaccaaagcgactactcctgccagggaaccatttcagaataccgaagagccatacgagaacattagaaacgaaggccagaataccgaccctaagcttaatcccaaggatgatggcatcgtgtacgctagtctcgctctgtcctcaagcaccagtccacgcgcacctcctagccatcgccctctcaaatctcctcagaatgagacgctgtattccgtgctgaaagcctag

SEQ ID NO: 127694 - DNA, 528 bp, synthetic construct
  misc_feature 1..528: note = Description of Artificial Sequence: Synthetic coding sequence
  source 1..528: mol_type = other DNA
atgggcagacctttgcttctgcccctgctgcctcttctgcttccgcctgcctttctgcaacccagtgggagcacgggcagcgggccaagttacctgtacggggtgacccaacccaaacacctctctgcgtcaatggggggatcggtggaaattccattctctttctactacccttgggagctggccaccgcaccagacgttcgcatttcttggagacgaggccactttcacagacagtctttctatagcactcgccccccatcaatccacaaagactatgttaatcggctcttcctcaattggacggaaggtcagaaatccggcttcttaaggatttccaatctgcagaagcaggatcaaagcgtctacttttgccgcgttgagctcgatacccgctcaagcggcaggcaacagtggcagtcaattgagggcaccaaactgtctataacgcagggcaacccctcgaaaactcagaggtcacatatgcggatatctggcatgaaggataagatccaaatcccaagctag

SEQ ID NO: 127695 - DNA, 492 bp, synthetic construct
  misc_feature 1..492: note = Description of Artificial Sequence: Synthetic coding sequence
  source 1..492: mol_type = other DNA
atgggaaggcctctgttgcttcccctgctgcctctcttgctgcctcccgcttttctacagccgtctggcagcacaggatctggcccctcctatctctacggggttacccagccgaagcatttgagcgcctccatgggtggctcagtagagattcctttctcattttattatccatgggaacttgctactgctcctgacgtgcggatctcttggagaagaggccatttccacaggcaaagcttctatagcactcggccccctagtattcataaagattatgtcaatagactatttcttaactggaccgaggggcaaaagtctgggttcctccgcatttctaatctccaaaaacaggaccagtccgtctacttttgtcgtgtggagcttgacacaaggtcaagcggacggcaacagtggcaatcgattgaggggactaaactctcaatcacccaagggcagcagcgtaccaaggcaaccacccccgcccgatag

SEQ ID NO: 127696 - DNA, 684 bp, synthetic construct
  misc_feature 1..684: note = Description of Artificial Sequence: Synthetic coding sequence
  source 1..684: mol_type = other DNA
atggggcggcctctcttgcttcctttgctgctcctgctgcagccccccgcattcttacagcccggtgggagcacagggtcaggcccctcctatctttatggcgttacacagcctaagcatttatcagcgagcatgggaggatcagtggaaattcccttctctttctactatccatgggagttagccatcgtgcctaacgttaggatcagttggagacgcgggcatttccatggtcagagtttttacagcactagacccccctctattcataaggactatgttaaccggctcttcttaaactggactgagggccaggagagtggcttcctacgtatcagcaacttacgtaaggaagaccagagtgtgtatttctgccgggtcgaacttgataccaggcgctcaggccgccagcagctccaatccataaagggcacgaagcttaccatcacccaggcagtaacaactactaccacatggcggccttcctccaccactacaatcgctggcctgcgcgtgactgagtccaaaggccatagcgagtcctggcatctttcactcgacactgctatccgggtagctttggccgtggcagtgctcaagaccgtgatactgggtctgctttgtctccttcttctttggtggcgcagacggaaagggtccagagcgccatcaagcgacttttag

SEQ ID NO: 127697 - DNA, 999 bp, synthetic construct
  misc_feature 1..999: note = Description of Artificial Sequence: Synthetic coding sequence
  source 1..999: mol_type = other DNA
atgggccgtgcttcatacggaggatcacccgtgggccaccagtcatcttccgatcatcctagagccaagacttgcaggtcacccgtcagagatggaccaagaacactgtgtggtgtgccaaccgtagcactatctctccacttcctccgcgaagcatctagtggaagccgaacatgtggaagacggactagcctgtgcacatctgcaaaaagttcctggacataccgctccgctctgcgccagccactccatcgcgctcccctattgccaggacaattgtgttggagcccaagaccactggagaagaacaaagccatgggtagacccctcctgttacctctcctgctgctcctgcagcctccggcatttctccagcccggaggcagtactggctctggcccttcatatctgtacggggtaacacaacctaaacacctctctgcatccatgggtgggtccgtcgagattccatttagtttttactatccctgggagttagctatcgtgcccaacgtacgcatcagttggcggaggggtcatttccacggacaatcattctactctactagacccccttcaattcataaagactacgtgaatcgactctttttaaattggacagagggacaggagagcggatttctgcggatttccaaccttagaaaagaggaccagagcgtctatttctgtagggtcgagctagacactagaagatctggaagacagcagctgcagtcgatcaagggcactaagttaactatcacacaggcagtaaccacaacaaccacctggagaccgtcttctactactacgatagccggcctgcgggtcacggagtcaaaaggtcacagcgaaagttggcatctgtctcttgacaccgcgattcgagtggcactggccgttgctgtgctgaagactgtcatcctcggcctgctgtgtctgctcctcctttggtggcgccgcagaaagggttcgagagcaccttcaagcgacttttag

SEQ ID NO: 127698 - DNA, 384 bp, synthetic construct
  misc_feature 1..384: note = Description of Artificial Sequence: Synthetic coding sequence
  source 1..384: mol_type = other DNA
atgggcaggccactcctgctgcccctgttactgctgttgcagccccccgcattcctccagccgggcggaagcaccgggtccggaccctcttatctttatggcgtgacacagcccaaacatcttagcgcttcaatgggtggcagcgtcgagatcccattctctttctactatccgtgggaattagctatcgtcccaaatgttcggataagttggcgtcggggtcactttcacgggcaaagcttttactcaacaaggccaccctctatccataaggattacgtcaacagactgtttctgaactggaccgagggccaggagagtggctttttgaggatctccaacctacggaaggaagatcagtctgtctatttttgcagagtttag

SEQ ID NO: 127699 - DNA, 684 bp, synthetic construct
  misc_feature 1..684: note = Description of Artificial Sequence: Synthetic coding sequence
  source 1..684: mol_type = other DNA
atgggcaggcctttgttgctccccttattgcttcttctgcagccgccagctttcctgcagcccggcggtagtacaggcagcggcccgtcctatctatatggagtgacacagccaaagcatctgagcgcgagtatggggggcagcgtcgagattcccttttccttctactacccatgggaattggcaatcgtgcctaacgtgaggattagttggaggcgaggacacttccatgggcaaagcttctactcgacacgcccgccttcaatacacaaggattacgtgaatcgacttttcctgaattggaccgaagggcaggaatccggatttctaaggatttccaacttgaggaaagaagaccagtctgtgtacttttgtcgggtcgagctggacacaaggcggtctggcagacaacagctccagtcgatcaaaggcaccaaacttacgatcacccaggccgtcactacgaccacgacttggcggccgtctagcacaacgacaatcgccgggctgcgtgtcaccgaatccaagggacactccgagtcctggcacctgtccctcgacaccgctatcagagtggcgctggcggtggctgtgttgaagacagtcatcttaggcctcctctgtctgctcctgctgtggtggcgacgccggaaaggatctcgagctccttctagcgatttctag

SEQ ID NO: 127700 - DNA, 384 bp, synthetic construct
  misc_feature 1..384: note = Description of Artificial Sequence: Synthetic coding sequence
  source 1..384: mol_type = other DNA
atggggaggcctctgctcctgccccttcttttattactgcagcctccagctttcctccagcctggaggaagcacaggatcaggtcctagctatctttacggcgttacgcagcctaaacatttgtctgcatccatgggcggatcagtggagatccccttttcattctattacccctgggaactggcgattgttccaaatgtccggattagctggagacgcggccattttcacggccagagtttctactccacaagaccccccagcattcataaggattatgtgaatcgcctttttctcaactggacagagggtcaggaaagcggcttcttacgaattagtaatctacgcaaggaagaccaatctgtgtatttttgtcgagtctag

SEQ ID NO: 127701 - DNA, 183 bp, synthetic construct
  misc_feature 1..183: note = Description of Artificial Sequence: Synthetic coding sequence
  source 1..183: mol_type = other DNA
atgggcaggccactgctgctccctctgctgctcttattgcagccaccagcatttctacagccaggactctgcgagcccgcactgtctgaattagaccgcggctctggcgagcggctgccccaggacctgaagcctgcagaaggtggccccgtttgcgtctttcttccatctagagctggatag

SEQ ID NO: 127702 - DNA, 366 bp, synthetic construct
  misc_feature 1..366: note = Description of Artificial Sequence: Synthetic coding sequence
  source 1..366: mol_type = other DNA
atgggacggcccctactcttacccctcctgttgctgctgcagccccctgcctttctccagcccggcggttctacaggatcgggcccatcatatctttacggggtaactcagcctaaacacctgagtgctagcatgggaggatccgtagagatcccattttctttttactacccctgggagttagctatcgttcctaatgttcggatctcctggcgccgcggccacttccacggtcagagcttctattccacgcgccctccttcaattcacaaggactacgtgaatcgtctctttctcaattggactgaggggcaagaatctggatttctgaggataagcaacctgcgaaaggaagaccagagctag

SEQ ID NO: 127703 - DNA, 384 bp, synthetic construct
  misc_feature 1..384: note = Description of Artificial Sequence: Synthetic coding sequence
  source 1..384: mol_type = other DNA
atggggcggcctctccttctccccctactgctgttgttacagcctcccgcctttttgcagccgggcggctcgactggaagcggaccctcctatctgtatggggtgacacaacctaaacacttgtccgcatcaatgggaggatcagtggaaatacccttctctttctattacccctgggagttagccattgtgcctaatgtgaggataagctggaggcggggacattttcacggccagtctttctatagtactaggccaccgtctatacataaggattatgtgaaccgactttttttaaattggacggaaggtcaggagtcaggtttcctgagaatctctaaccttcgcaaggaggatcagtccgtttacttttgtcgagtgtag

SEQ ID NO: 127704 - DNA, 684 bp, synthetic construct
  misc_feature 1..684: note = Description of Artificial Sequence: Synthetic coding sequence
  source 1..684: mol_type = other DNA
atgggaaggcctctgctgctgcccctgttactgttattgcaacctcctgcgttcctgcaaccaggagggagtacgggaagcggcccatcctatctctacggggtaacccagccgaagcatctctctgcttcaatgggcgggagcgtggagatccccttttcgttctattatccctgggagcttgctatagtgccgaacgtgagaatttcatggaggagggggcactttcatggccagtctttctattctacacgccctcctagcatccataaagattacgtgaaccgtctgtttcttaattggacagagggtcaggaatcaggcttcctcagaatcagtaatttacgaaaggaggaccagtccgtgtatttctgtagagtggaactggacacccggagaagcggccggcagcagttgcagagtatcaaaggcactaagttgaccatcacgcaggcagttaccaccaccaccacatggaggccctcctcaacaacaactattgcagggctccgggtcacagagagcaaaggtcattccgaatcgtggcatctttcattggatacagccattagagtcgcactggctgttgccgtccttaagacagtgattctgggattgctgtgcctgctgctgttgtggtggcggcgtcggaagggttccagagctccctccagtgacttctag

SEQ ID NO: 127705 - DNA, 450 bp, synthetic construct
  misc_feature 1..450: note = Description of Artificial Sequence: Synthetic coding sequence
  source 1..450: mol_type = other DNA
atgggaagacctttgctcctgcctttgctattgttactccagccgcctgccttcctgcagccagggctctgtgagcccgcattgtcagaactcgaccgtggaagcggagagagactgccgcaggacttgaagccagccgaggggggccctgtttgcgtattcctgcccagccgagcaggtcacccagagattagggaagccgcagtggcagtgcatcagggcgaccagacccatcaccaccctggatgtcacaatcatcaccacttggaggcgcagcagcacaatcaccactctaggccgcaggggcaccgaaagcagcgggccctgaggattatggctcccaaaagtggtcactgtcaccagggatgcatcggatgcagatgtgcacagaattgccattttggcactgctgtgccaccccctccagtagtcgaagagaaggaaaggtag

SEQ ID NO: 127706 - DNA, 816 bp, synthetic construct
  misc_feature 1..816: note = Description of Artificial Sequence: Synthetic coding sequence
  source 1..816: mol_type = other DNA
atggggcgcgcttcttacggcggatcgcccgtgggccatcaaagcagctcagaccaccctcgggccaagacctgtcggagccccgttcgagacggtcccaggactctgtgcggggtgcccactgtggcactcagtctgcattttctgcgagaggctagctcaggtagcaggacatgcgggcgaaggacatcgctgtgtacatcagctaaaagctcctggacttaccggtcaggtagactcagttggcagagcatcaaaggcacccatctgacaatcacccaggcactaaggcaacctctgcaccgagcccctttattgcctggtcagttgtgttggagccccaggcctttagagaaaaataaagctatgggccggccactgcttcttcctctactgctgctgctccagccccccgcgttcttacagcctggcctgtgcgaacctgcactctcagagttggaccgtggctctggggagcgcttgccccaggatctgaaacccgccgagggaggtcccgtatgcgtctttttgccgtctcgcgctggtcatccagaaattagagaagcagccgtggcagtacatcaaggcgaccaaacgcaccatcaccccggatgccataaccaccaccacctcgaggctcagcagcacaatcatcactctcgaccacagggtcaccgcaaacagcgcgccctgaggatcatggctcccaaaagcggccactgccaccaagggtgcattggatgtaggtgcgcgcagaattgccactttggtaccgcagtcccaccgccacctgttgtggaagaaaaagagagatag

SEQ ID NO: 127707 - DNA, 684 bp, synthetic construct
  misc_feature 1..684: note = Description of Artificial Sequence: Synthetic coding sequence
  source 1..684: mol_type = other DNA
atggggagacctctcctgttgcccctcttactcctgcttcagccacctgcattcctgcagcccggaggttccacaggctcgggcccttcttatctttatggtgtgactcaaccaaaacacttaagcgcctctatgggtggttccgtcgaaatccccttctcattctattatccatgggaactggcaattgtccctaatgtccggatcagctggcgtagaggacacttccacggtcagtccttctatagcactagaccaccctcaatacacaaagactacgtaaacaggttattcctcaactggacagaaggacaggagtcaggctttctgcggatcagcaatttgagaaaagaggatcagtcagtgtacttctgcagggtggagctggacacacggaggtctggtaggcagcaactccagagcattaagggcaccaaacttaccataacccaggctgtgacaactaccacaacctggcgcccctcttcaactacaacaatcgcaggactccgagtaaccgagtctaaaggacatagtgaatcttggcatttatcactggacactgctatcagggtggccctagccgtggcagtgctcaagaccgttatcctgggtttgttgtgtctgctcctgctgtggtggcgtcgccgaaagggctcccgggctcctagcagcgacttttag

SEQ ID NO: 127708 - DNA, 327 bp, synthetic construct
  misc_feature 1..327: note = Description of Artificial Sequence: Synthetic coding sequence
  source 1..327: mol_type = other DNA
atggggagagccagctacgggggttcccctgttggacatcagagctcgagcgaccaccctagggctaaaacctgccggtctcctgtaagagacggccccagaacactttgtggcgtgcctaccgttgcactgtcattgcattttctccgtgaagcctcttcgggcagtcgcacttgcggcagacgcacgtccctctgtaccagcgcaaagtccagctggacctataggtctggacggttatcctggcagtccattaaagggacacacttaaccattacgcaggcactccgtcaaccgctgcaccgtgcacccctgctccctggctag

SEQ ID NO: 127709 - DNA, 384 bp, synthetic construct
  misc_feature 1..384: note = Description of Artificial Sequence: Synthetic coding sequence
  source 1..384: mol_type = other DNA
atgggtcggcctctcttactccccctgttactcctgctacagccccccgcttttcttcagcccggcggatctaccgggtccgggccgagttacttgtatggggtgacacagccaaagcacttaagcgcctctatgggcgggtccgtggagattcctttctctttttattatccatgggaactggccatagtgccaaatgtgcgtatctcgtggagacgcggacattttcatggccagtctttctacagcacaaggcctccaagcattcacaaggattacgtgaatcgcctcttcttaaactggacagagggacaggagtccggctttctccgtatttccaatctgagaaaagaagatcagtctgtatacttctgtcgagtctag

SEQ ID NO: 127710 - DNA, 738 bp, synthetic construct
  misc_feature 1..738: note = Description of Artificial Sequence: Synthetic coding sequence
  source 1..738: mol_type = other DNA
atgacctcttcatacggccacgtgctggagagacagccagcgctgggtggacgcttagactcacccggtaatctggatacactgcaggctaaaaaaaatttcagcgtgagccatctgctggatttggaagaagcgggcgatatggtcgccgcccaggctgacgaaaatgttggcgaggccggtaggagcttgctagagtccccgggcttaacaagcgggtccgacacaccgcagcaggacaatgatcagctcaactcagaagaaaagaaaaaaaggaagcaacgaagaaaccgtacaacattcaatagtagccagctgcaagccctcgagcgcgttttcgagcggacccactatcccgatgcattcgtgcgcgaggacttagcccgacgcgtgaatctaacagaggcacgcgtgcaggtctggtttcaaaatagacgcgctaaatttcggaggaacgaacgcgccatgctggctaataaaaatgccagtttgttgaaaagctatagcggggatgttacagctgttgagcagccaatcgtgcctaggcccgcacctcggcccaccgattacctctcttggggcactgccagtccatatagcgcaatggccacatactcagcgacatgtgccaataacagcccagcccagggcatcaatatggcgaattctatcgcgaatttgcgtttaaaagcaaaagaatattcattgcaaaggaaccaggtgcctaccgtgaactag

SEQ ID NO: 127711 - DNA, 654 bp, synthetic construct
  misc_feature 1..654: note = Description of Artificial Sequence: Synthetic coding sequence
  source 1..654: mol_type = other DNA
atgactagcagttacggacatgtcctcgagagacaaccggccctgggcggccgattggattccccaggtaacctagatactctccaggccaagaaaaactttagcgtttcccatctgctggacctggaagaggccggcgatatggtggcggctcaggccgacgagaacgttggggaggccggccgctctctacttgaatcaccaggcctcacctctggttctgacactcctcagcaagacaatgaccagctgaactccgaggagaagaagaagcggaaacagaggaggaatcggactacgttcaatagtagtcagttgcaggcactggagcgggtgtttgaacgaacccactatcctgacgcattcgtgagggaagacctggctcggcgtgtaaacctcacagaagcacgagttcaggtttggtttcaaaaccgtagggccaagtttcggagaaatgaacgcgccatgctcgcaaataagaatgcctctctgctgaagagctatagcggagatgtcacagccgtggagcagcctattgttccgaggccagcccccagacccacggactacttgagttgggggaccgcgagcccttatcggtccagttcgctgccacgttgctgcctccatgaggggcttcacaatgggttttag

SEQ ID NO: 127712 - DNA, 762 bp, synthetic construct
  misc_feature 1..762: note = Description of Artificial Sequence: Synthetic coding sequence
  source 1..762: mol_type = other DNA
atggattctgccgcagccgcgttcgctcttgacaaacctgccctgggacctggacctccccctcctccacccgcactgggccctggggactgtgcgcaggctaggaagaattttagcgtgtcgcatctcctagatttagaggaagtggctgctgcaggaagactggcggctcgccccggcgcccgtgcagaagccagggagggcgccgcaagggagcctagcggggggagctccggctctgaagcagctccgcaggacggcgaatgcccaagccccggccgaggcagcgccgccaaaaggaagaagaagcagagacggaatcggacaacattcaacagtagccaactccaggccctcgagcgggtgtttgagagaacccactaccctgacgcttttgttcgcgaagaactggccagacgcgtgaatctctccgaagcccgagttcaggtgtggttccagaacagaagggcaaaatttaggagaaacgagagagctatgctggcctctaggagcgcatctctccttaagagctactcccaggaagccgccatagagcaaccagttgctcctagacctactgcactgtctcctgattatctctcttggacggcatcctcaccgtactctacagttcctccatattctccaggtagcagcggaccagcgacccccggggtgaatatggcgaattctattgcaagcctgagactcaaagcaaaggaattttccttacatcattcacaggtgccgacagttaactag

SEQ ID NO: 127713 - DNA, 855 bp, synthetic construct
  misc_feature 1..855: note = Description of Artificial Sequence: Synthetic coding sequence
  source 1..855: mol_type = other DNA
atggactactcttacctcaactcttacgactcatgtgtggccgcaatggaggcatctgcgtatggagactttggggcttgcagtcagcccggggggtttcagtacagtccactgcgtccagcctttcctgctgctgggccaccctgtccggccttgggcagttctaactgtgcgctgggtgccttgcgcgatcaccagcctgctccttatagtgctgtgccatacaagttttttcctgaaccatccggcctgcatgaaaagagaaagcagcggcgcataaggaccacatttacatcagcgcagttgaaggaactggagcgggtgtttgctgaaacccactaccccgatatttatacacgtgaagaactggccttgaaaattgacttgacggaggcccgagtgcaggtgtggttccagaataggagagcaaaattccgaaagcaggaacgggcagctagcgctaaaggtgccgccggagcagccggagctaagaagggcgaggcacggtgttcttctgaggatgatgatagcaaagaatctacctgttctccaacaccagactcgacagctagtttaccacctcctcctgcgcccggactagcctcccctcgattgagcccttctccccttcccgtggcccttggttccggccccggtccggggcccggtccacagcccctgaagggagccctctgggcaggggtggccggcggcggaggcgggggaccaggtgctggcgccgctgaactacttaaggcctggcaacccgcagagagtgggccgggtcccttttcaggggtgctttctagcttccatcggaaacctgggcctgcgcttaagactaatctgttctag

SEQ ID NO: 127714 - DNA, 1800 bp, synthetic construct
  misc_feature 1..1800: note = Description of Artificial Sequence: Synthetic coding sequence
  source 1..1800: mol_type = other DNA
atgaagctgctgaaattgacaggctttatttttttccttttttttctgacagagagcctgactctgccaactcagccaagagatatcgagaactttaacagcactcagaagttcatcgaggacaatattgaatacatcacaattatcgccttcgcccaatatgttcaggaagctactttcgaggaaatggaaaaactggtaaaagatatggtggagtataaggaccggtgtatggcggacaagaccctcccagagtgttctaagctgcctaacaacgtactccaagagaagatatgtgcaatggagggtcttccacagaagcataatttctcccattgttgctccaaagtcgacgcccagcgtaggctctgcttcttttacaataaaaagtcggacgtcgggtttctgccaccatttcccaccctggacccagaagaaaaatgtcaggcctatgaatccaacagagaaagcctgctcaatcactttctgtacgaggtggccagacggaacccatttgtgtttgccccaaccctgctgaccgtggcagtgcacttcgaagaagtagcgaagtcctgttgtgaagaacagaacaaagtgaattgcctacagacacgggccattcccgtgacccaatacctgaaagcattttccagctatcagaagcacgtttgcggcgctttacttaagttcggtactaaggtggtgcattttatctacatcgcaatcctgtcacagaagttccctaaaattgagttcaaagagttgatctccctcgtcgaagacgtgtcctccaactacgacggctgttgcgagggggatgttgttcaatgtattcgggacacgtcaaaagtaatgaaccatatctgctccaagcaggatagcatctcctccaagattaaagagtgttgcgaaaagaagataccggagcggggacagtgcatcataaattcaaacaaggacgaccgcccaaaggatctcagccttcgggagggaaagttcacagactccgaaaacgtgtgccaggaacgagatgcagatccagatacattcttcgcaaaatttactttcgaatacagcagaagacatcctgatctaagcatccccgagttgttgagaattgttcaaatttacaaggacttgttgagaaactgctgcaatacagagaaccctcccggctgttatcgatatgcagaggacaaattcaacgagaccacagagaaatccttgaagatggtgcagcaagaatgcaagcactttcaaaatttgggcaaggacgggctaaaataccactacctcatcagattgacaaaaatcgcccctcagttatccaccgaggagctagtctcccttggagaaaagatggtgaccgcatttactacctgttgtacattgagtgaggaatttgcctgtgttgataatctggcggatcttgtctttggcgagctttgtggggtgaacgaaaacagaaccataaaccctgccgtggaccactgttgtaagaccaattttgcatttcggcgcccttgtttcgagtccctgaaggccgacaaaacctacgtgcccccccctttttctcaagacctctttaccttccacgcagacatgtgccagtcccaaaacgaggaactgcagagaaagaccgacaggttccttgtcaacctggtgaagctgaaacacgagctcacggacgaagaactccagtcgttgtttacgaatttcgctaatgtcgttgataagtgttgcaaagccgaatcgcccgaagtgtgttttaatgaggaatccccaaaaataggaaattag

SEQ ID NO: 127715 - DNA, 945 bp, synthetic construct
  misc_feature 1..945: note = Description of Artificial Sequence: Synthetic coding sequence
  source 1..945: mol_type = other DNA
atggacgctttcaaggggggaatgtctttggagcgactacccgagggattgagacctccacctcctcctccccatgatatgggcccagcttttcatctggctcggccggcagaccctcgcgagcccctcgagaactcagcatccgaatcaagcgacaccgagctgccggagaaggagcggggaggggaaccaaagggaccggaagactcaggggcaggcggaactggatgcgggggggctgatgaccccgccaaaaagaaaaagcagagacgccaacggacacacttcacatcacagcagctccaggagctggaagcaacattccagcgaaatagatatcctgatatgagcatgagggaggagattgccgtgtggaccaacctgaccgagccacgtgtgcgggtttggttcaaaaaccggcgagccaagtggagaaagagggagagaaaccagcagttggatctctgtaagggtggatacgtcccacagttctcagggctggtccagccttacgaggacgtgtacgcagcaggttacagttataataattgggctgcaaagtcactggcccccgccccactgtcaacaaagtcatttacattcttcaactctatgagtcctcttagctcacagtcgatgttctcggcgccgtcctcaataagttctatgaccatgccaagcagcatgggccctggagccgtgccaggcatgcccaatagcggcttgaacaatatcaataaccttaccggctcaagtcttaattccgcgatgtcgcccggggcctgtccctatggtaccccagccagcccctacagcgtctacagggacacttgcaactctagcttggccagcttgagactaaagagcaaacagcactccagctttggctatggcggtctacaggggccagcctcaggcctcaacgcctgtcaatacaatagctag

SEQ ID NO: 127716 - DNA, 345 bp, synthetic construct
  misc_feature 1..345: note = Description of Artificial Sequence: Synthetic coding sequence
  source 1..345: mol_type = other DNA
atggacgcttttaaaggtgggatgagtctcgaaagactgcccgaaggactaaggccccccccccccccgccccatgatatgggaccagctttccatctggctaggccagccgatcccagggaaccgctggagaacagtgcatcagaatcctcagatacggagctcccggagaaagagcgtggaggcgagccaaagggcccggaagattcaggagcaggcggaacaggctgtggcggagccgacgatccagccaaaaaaaaaaaacaacgaagacagaggactcacttcacctcacaacagctccaagaattggaagccactttccagaggaatcgctacccttag

SEQ ID NO: 127717 - DNA, 945 bp, synthetic construct
  misc_feature 1..945: note = Description of Artificial Sequence: Synthetic coding sequence
  source 1..945: mol_type = other DNA
atggacgctttcaagggggggatgtcactggagcgtctgccagagggcctccgccctccccctccaccaccccatgatatgggtcctgcattccacctcgcacggcctgccgacccacgtgagcccctggagaatagcgcctctgagtccagcgacaccgagctgcctgagaaggaacggggaggcgagccgaaagggcccgaggattccggagctggcggaactgggtgtggtggagcagatgacccagccaagaaaaagaagcagagacgacaacgaacccatttcacctcgcaacagctgcaggaactggaggcaacctttcagaggaatagataccctgatatgagtatgagagaagaaatagcagtttggactaatttgacagaaccccgagtgcgggtttggtttaagaaccggcgggcgaaatggcggaagcgcgagagaaatcagcagctcgacctctgtaaaggggggtacgtgccacagttttccggactcgtccaaccctatgaggacgtatacgccgctggctatagttacaacaattgggccgcgaaaagccttgctcctgctcctctttctaccaagagctttaccttctttaacagcatgtctcctctgagctctcagtccatgttctccgccccatcctctatttcaagcatgaccatgccatcttctatgggacctggcgccgtgcctggtatgcctaacagcgggcttaacaacattaacaaccttaccggcagcagtctgaattctgcaatgagccctggagcatgtccctacggtacccctgcttccccatattccgtgtatagagacacatgcaatagcagcctggcgagccttaggcttaagagcaaacaacactccagctttggatatggcggactgcagggccctgcgtccggactgaacgcatgccagtataactcctag

SEQ ID NO: 127718 - DNA, 396 bp, synthetic construct
  misc_feature 1..396: note = Description of Artificial Sequence: Synthetic coding sequence
  source 1..396: mol_type = other DNA
atggatgcttttaagggcggcatgtcattggagcgcctgcctgaagggctgagacccccaccgccccccccccatgatatggggcctgctttccacttggcaagacccgctgacccgagagagcccctagaaaactctgctagcgaatcatcagacactgagttacccgaaaaggagcgcggcggggagccgaagggccctgaagattccggcgccggcggaaccggatgcggtggggccgatgacccagccaagaaaaaaaaacaacggcgccaaagaactcactttacttcacagcagctgcaggagttagaggccaccttccagagaaacaggtaccccgatatgagcatgagggaagagatagctgtgtggaccaatctcaccgaaccctag

SEQ ID NO: 127719 - DNA, 975 bp, synthetic construct
  misc_feature 1..975: note = Description of Artificial Sequence: Synthetic coding sequence
  source 1..975: mol_type = other DNA
atgaattgcatgaagggccctctgcatctggaacaccgcgccgcgggcaccaagctgtcggccgtcagctcttcgagctgtcaccacccacaacccctcgcgatggctagtgtgttggccccagggcagccaagatcattagattccagtaaacaccgcctcgaggtccacactatttccgataccagttcccccgaggcagctgagaaggacaaaagccaacagggcaaaaatgaagacgtgggtgccgaagacccctccaaaaaaaaacggcagcgcaggcagagaacccatttcacttcccagcaactgcaggagctcgaggccacttttcagcgaaacagatatcctgacatgtctacacgggaagagatcgcagtttggactaatctgaccgaagcgcgcgtccgagtgtggttcaaaaacaggcgcgcaaagtggcggaagagggaaaggaaccagcaggctgaactgtgtaaaaacggttttggtcctcaatttaatgggctcatgcagccatacgatgacatgtatcccggctactcctataacaattgggctgctaaggggctgacatccgcctcactgtctacaaaaagttttccattttttaattctatgaatgtaaatcctctgagctctcagtcaatgttctctccccctaactcaatcagtagcatgtccatgtcatcctcaatggtcccaagcgccgtgactggtgttccaggaagcagcctaaattccttaaacaacctgaacaacctgagcagcccatcacttaattctgctgtccccacacccgcttgtccttatgccccaccaacgcctccatatgtctaccgggacacctgcaattctagcctagcatctctacgtctgaaggcaaaacaacacagctctttcggctacgctagtgtccagaaccctgctagtaatctgtctgcctgccagtatgccgttgataggccagtctag

SEQ ID NO: 127720 - DNA, 954 bp, synthetic construct
  misc_feature 1..954: note = Description of Artificial Sequence: Synthetic coding sequence
  source 1..954: mol_type = other DNA
atggagacaaactgtagaaagctcgtgtcggcatgcgttcagctcggagtgcaacctgccgccgtggagtgcttgttcagtaaagactctgaaattaagaaggtggagtttactgatagcccggagtcccggaaggaagcagctagctctaaattttttccaaggcagcatcccggagccaacgagaaggacaaatcccagcagggcaagaacgaagatgtcggcgctgaggacccatctaagaaaaagcgacagaggcgacagagaactcactttactagtcaacagctgcaagagcttgaggcgacatttcagcgcaaccgataccctgacatgtctactcgagaagaaatagctgtgtggacaaatttaactgaggcaagagtgagagtgtggtttaaaaacagacgcgctaagtggcgcaagcgggaacgtaaccaacaggccgagctgtgcaagaatggcttcggaccacagtttaacggtttgatgcagccatacgacgacatgtaccccgggtactcatacaataactgggccgcaaagggcttgacaagcgcgagcctgtcaactaaatcctttccattcttcaacagcatgaatgttaacccactgtccagtcaaagcatgttttcaccaccaaattcaatatcttctatgtcaatgtctagtagcatggtgccctccgccgtcactggcgttcccggcagcagtctgaatagcctgaacaatctcaataacttgtcaagcccctctttgaatagtgccgtgcctactcccgcttgcccatatgcccccccaacccccccttacgtttacagggatacatgcaattcctcccttgcaagtctccgcctcaaagccaagcagcactcttcattcggatacgctagcgtccagaaccctgcaagtaatctgtccgcatgtcagtacgccgtagaccgaccagtgtag

SEQ ID NO: 127721 - DNA, 816 bp, synthetic construct
  misc_feature 1..816: note = Description of Artificial Sequence: Synthetic coding sequence
  source 1..816: mol_type = other DNA
atggaaacaaattgtcgcaagctggttagtgcatgcgtacagttggagaaggataaatcccagcagggcaagaatgaggatgtcggggccgaagatccttcaaaaaagaagaggcagcgacgtcagcgaacacactttactagtcagcaactgcaggaactggaagcgacattccagcggaacagataccccgacatgtcaacaagggaggagatagcagtttggacaaacctgacagaggcgcgggtccgcgtatggtttaaaaacagacgagctaaatggcgaaaacgagagaggaatcaacaggccgagctgtgcaagaatgggttcgggccccagtttaatgggctgatgcagccttatgacgacatgtaccctgggtactcatacaacaactgggctgctaaaggattgactagcgcttctttaagcaccaaatccttccccttctttaattctatgaacgtcaatcctctgtccagtcaaagtatgttttctcctccaaattctatcagctcaatgtcgatgagcagttcaatggtcccatccgctgtgactggtgtcccgggatctagtctcaattccctcaacaatctgaacaacctgtcttctccatcgttgaacagcgcagtgcctacaccagcatgcccgtatgcacctccaactccaccttacgtgtatcgagacacctgtaacagctcactggcatcactccgacttaaggcaaagcagcatagctcctttggatatgcgagcgtgcagaacccagcaagtaacttatcagcctgtcagtacgcggtcgacaggcctgtgtag

SEQ ID NO: 127722 - DNA, 954 bp, synthetic construct
  misc_feature 1..954: note = Description of Artificial Sequence: Synthetic coding sequence
  source 1..954: mol_type = other DNA
atggagaccaactgtcggaaactcgtgtctgcttgcgtccagctgggcgttcagccagcagccgtggagtgcctatttagtaaagattcagagatcaaaaaggtggagtttacagactcaccagagtccaggaaagaagcggcctcctcaaaatttttccctagacaacacccaggggccaatgaaaaagacaagtcccagcagggtaagaatgaagacgtgggcgcagaagatccgtcaaagaagaaaaggcagagaagacagaggacccactttactagccaacagctgcaggagctggaagcaacctttcagcggaacaggtacccggacatgtcgaccagggaggagatagccgtctggaccaacctgacggaggccagagtccgcgtctggtttaaaaatcgtagggcaaaatggcgaaagcgtgaacggaaccaacaggcggagctgtgcaagaatggattcggcccccagttcaatgggcttatgcaaccttacgacgacatgtacccaggatactcatacaataactgggcagccaagggactgacctcagcatccttgtccaccaaatcttttcccttttttaattcgatgaatgtcaaccccctctcctcacagagtatgtttagtccacctaacagcatatcaagcatgtccatgtcctcaagcatggtgccatctgccgtgacgggggtgccaggctcaagcctgaactcactcaacaacctcaataatttgtcttccccgtccctcaattctgctgttccaactcctgcatgtccttatgcaccacctactcctccatatgtttaccgtgacacttgcaattcatctctggcttccctgcgactgaaagctaagcagcacagttccttcggctatgcatccgtgcagaatccggcgtccaatctgtctgcctgccagtacgctgtggaccgcccagtctag

SEQ ID NO: 127723 - DNA, 873 bp, synthetic construct
  misc_feature 1..873: note = Description of Artificial Sequence: Synthetic coding sequence
  source 1..873: mol_type = other DNA
atggagacaaactgccgcaagctggtcagcgcctgtgttcaactgggagtccagccggccgctgtggagtgcctgttttccaaggatagcgagataaagaaagtcgaatttaccgacagccccgagtctcgtaaggaagcagcctcatctaagttctttccccgtcagcacccaggagctaacgaaaaggataaaagccagcaaggaaaaaacgaggatgtcggcgcggaagatccatcaaagaagaagaggcaacgcaggcagagaactcacttcacaagtcagcagctgcaggagctggaagctacatttcaacgtaaccgttatccagatatgtctaccagagaagagattgccgtgtggaccaacctgactgaggcacgggttagggtgtggttcaaaaatagacgcgccaagtggcgaaaaagggagcggaatcagcaggccgaactgtgcaaaaacggattcgggccacaattcaacggactcatgcagccctacgacgatatgtacccaggatactcctacaataactgggcagctaagggacttacatccgcctcgttaagtactaaatcctttccctttttcaattctatgaacgtgaatcctctcagttctcaatctatgttttccccccctaacagcattagcagtatgtctatgagcagttccatggttcctagcgctgtcactggcgtgcctggctccagtctgaacagtctgaacaacctgaataacctctcctccccttccctgaatagtgctgttcccacaccagcctgtccatatgctccgccaaccccgccctacgtgtaccgtgatacatgcaactcatccttagctagtctgcggcttaaggcaaaacagtag

SEQ ID NO: 127724 - DNA, 357 bp, synthetic construct
  misc_feature 1..357: note = Description of Artificial Sequence: Synthetic coding sequence
  source 1..357: mol_type = other DNA
atggaaaccaactgtagaaagctggtctcggcttgcgtccagctcgagaaagacaagtctcagcaggggaagaacgaagacgtgggtgccgaggatccgagcaaaaaaaaacggcagcggagacaaagaacacactttacttcccagcagctccaggaactggaagctacctttcagcgtaatcgctatcccgatatgtcaaccagggaagagatagcagtgtggactaatctgacagaagctagggtgagggtctggttcaagaacaggagagccaaatggcgcaagcgcgagagaaaccagcaggcggaactgtgcaaaaacgggttcggtccacagttcaacggcctgatgtag

SEQ ID NO: 127725 - DNA, 909 bp, synthetic construct
  misc_feature 1..909: note = Description of Artificial Sequence: Synthetic coding sequence
  source 1..909: mol_type = other DNA
atggaattcggcctgctctccgaggccgaggccagaagcccagcacttagcttgagcgatgccggaactcctcacccacagttgccagaacatggctgcaaagggcaggagcattcagacagcgagaaagcatcagcctccctgcccggtggatctcctgaggatgggtctttaaagaaaaagcagcggcgacagcgtacccacttcacatctcagcagctccaggagttggaggctacttttcagagaaatcgctaccccgacatgtcaacccgtgaggagattgctgtctggacaaatctgactgaagctagggtcagggtgtggtttaagaacaggcgcgcgaagtggagaaaacgtgaacgatcccagcaagctgagctttgcaaaggcagtttcgctgctccactcggaggccttgtcccaccatacgaggaagtctatccaggctacagctatgggaactggcctcccaaagcgcttgcccccccattagccgcaaagaccttccccttcgctttcaacagtgtcaatgttggtcctctggccagccagcccgtcttttcccctcctagtagtatcgctgcttccatggttccaagtgcagctgccgctcctggaacagttcccggacctggggccctccagggcctcggggggggcccaccagggttggcacccgccgccgtatcttctggggccgtctcctgcccgtacgcatccgcagccgcagcagccgccgctgctgcttcctctccatatgtgtatcgggacccctgcaactcgtccctggcgagtttgaggctcaaggcaaagcagcatgcctcattcagctatcctgctgtacacggaccccctcctgctgctaatctttccccgtgccagtatgccgtggagcgccccgtgtag

SEQ ID NO: 127726 - DNA, 909 bp, synthetic construct
  misc_feature 1..909: note = Description of Artificial Sequence: Synthetic coding sequence
  source 1..909: mol_type = other DNA
atggagttcgggctcctcagtgaggcagaggcaagaagccccgctctgtctctctctgacgctggaactcctcatccccagcttcctgaacatggctgcaagggccaggaacactccgactctgaaaaggcctccgcgtctctcccggggggctccccagaagatggatcccttaaaaaaaagcagcggcgacagcggacccacttcacttctcagcagctccaggaacttgaggctaccttccagagaaataggtatccagacatgtctacgagagaggagatcgccgtttggaccaatctaacagaagcccgcgtgcgcgtgtggtttaagaatcgcagagccaagtggaggaaacgcgaaaggtcacagcaggcagaactatgtaaaggatccttcgccgcccctcttggcggcctggttccgccttacgaagaggtttatcccggttacagttatggcaactggccccccaaggcactggcccccccactagcggcaaaaaccttcccctttgcattcaatagtgtgaacgtgggacctctggcatcgcagccagttttcagtcctcctagtagtattgctgcatctatggttccttcagcagccgccgcacccggaactgtgcccggtcctggcgctctgcagggacttggtggtgggccacccggcctggctcctgccgccgtcagctctggtgctgtatcttgcccttacgccagtgcagccgctgctgcagccgcagctgcctccagtccctacgtgtaccgcgacccttgtaactcttctctggcctccctaagactgaaggctaagcaacacgctagcttcagctaccccgcagtgcacggcccccctccggcagccaacctctccccgtgccagtacgctgttgagaggcctgtgtag

SEQ ID NO: 127727 - DNA, 1179 bp, synthetic construct
  misc_feature 1..1179: note = Description of Artificial Sequence: Synthetic coding sequence
  source 1..1179: mol_type = other DNA
atggagcttgttgctggctgttacgaacaagtgctgtttggatttgccgtccaccctgaacctgaagcctgcggcgatcacgaacagtggactctggtggcggattttactcaccatgcccacaccgcgtcgctctcagcagttgctgtcaactctagattcgtggtcacagggagcaaagatgagactattcatatatatgacatgaagaagaaaatcgagcacggtgcccttgtacatcactccggaactattacatgcctgaagttttatggcaatcgtcatcttatttccggtgccgaggacgggttgatttgcatttgggacgccaaaaagtgggaatgcctgaaatctatcaaagcacataaaggccaggttacatttcttagtatccacccttctggcaaacttgcactttcagtcggaactgataagacgctgcgcacttggaacctggtagagggtcgcagtgctttcattaaaaatattaagcagaatgcccatatcgtagagtggagcccgaggggtgagcagtacgtagtaattattcagaataagattgacatctaccagttagacactgcctcaatatcaggcaccattaccaatgaaaagagaatctcctctgtcaaatttttatccgagagcgtgttagcagtcgccggtgacgaagaggttatacggttctttgattgcgattcgctggtgtgtctctgtgagtttaaggcccacgaaaatagagttaaggacatgttctcattcgaaattcccgagcaccacgttattgttagcgcaagctcagacggcttcattaagatgtggaaactgaaacaggataaaaaagtccccccctccctactgtgcgaaattaacacaaacgcacgtctcacttgcttaggcgtgtggctggataaagtggccgacatgaaggaatcgctcccccctgctgccgaaccttctccggtgtcaaaagagcagtcgaagatcggtaaaaaggagcccggcgacacagtgcacaaggaggaaaagagatccaagcctaataccaaaaaacgcggtctaactggggattccaaaaaggcaacgaaggaatcgggactgatttccactaaaaaacggaaaatggtggagatgttagagaagaagcgcaaaaagaagaagatcaagaccatgcagtag

SEQ ID NO: 127728 - DNA, 3372 bp, synthetic construct
  misc_feature 1..3372: note = Description of Artificial Sequence: Synthetic coding sequence
  source 1..3372: mol_type = other DNA
atgtcaggcacctcttcacacgagagcttctacgactctctatcggatatgcaagaggagagcaagaacaccgatttttttcctggcctgtcagcattcctgagccaagaagagattaataaaagtttggacttagcaagacgggccattgccgacagtgaaaccgaagatttcgatagcgaaaaagagatcagccagatattctccacttcccctgcttcgttgtgcgaacacccttcacacaaggagacaaaactgggtgaacacgccagtaggaggccacaagacaatcgatctactcctgtgcagcctttagccgaaaagcagacaaaatccatatcttctcccgtatctaagaggaaacctgctatgtctccattactcacaagaccatcttacattcgatctctgaggaaggccgagaagcggggggcaaaaacaccttcaactaatgttaagccaaaaacccctcatcagcgcaaaggaggccctcagagccagctctgtgacaaggctgcaaatttaatcgaggagctaactagcatctttaaggccgccaaacccagaaacagatcccctaatggggagtcatcgagcccagactccgggtacctctcccccaagaatcagccatccgccctcctgtctgcctcagctagccagagcccaatggaggaccagggcgaaatggagcgcgaagtgaaatcccccggcgccagacactgctatcaggacaatcaggacctggccgttccccacaacagaaagtcacatccacaacctcattccgcactccacttccccgcagccccgaggttcattcagaaacttcgatcacaagaagtggccgaaggctcccgggtatacctcgaatgtcgagtcaccggtaatcctacaccaagagtccggtggttctgcgagggaaaggaactccataatacgccagatattcagattcactgtgaagggggggacttgcataccctgatcattgccgaggcctttgaagacgatacgggcagatatacgtgtctggctacaaatccctcaggatccgacacaacatccgcagaagtgttcattgagggcgcatcctctactgactctgatagtgaatccctggcattcaaatctagagctggggcaatgccacaagcccagaaaaagactacctcagtttctctcacgatcggaagcagctccccaaagactggagtgaccaccgccgttatacagcccctgtctgttccagttcaacaggtgcatagcccgaccagctacctttgtcgtcctgatgggacgaccaccgcttactttcctcctgttttcacaaaggagcttcagaacactgcagtggcagaaggacaggttgtggtgctcgagtgccgagtcagaggtgcccctcctctccaggtgcagtggttcaggcaaggttcagagatccaggacagcccagacttcagaatcctccaaaagaagccaaggtcaactgccgagccggaggagatttgcacactcgtgatcgctgagaccttccccgaggacgccggaattttcacatgttccgcccgcaacgactatggttcggccacctctaccgcacaactggtagttacctctgctaatacagaaaactgtagctacgagtcaatgggggagagcaacaatgatcactttcagcattttccccccccgcctcctattctcgagacttcaagcctggagcttgcttcaaaaaagccaagcgagattcagcaggtaaacaacccagagctcggactgtccagggctgccctccagatgcagttcaacgctgctgaaagggagaccaatggagtccacccatctagaggggtaaacggactcatcaacgggaaggctaacagtaataaatctttacctacacctgctgtgttactttctcctacgaaagaacctccccctctcttagccaagcccaaactgggattccccaagaaggctagccgaaccgcgcgtatcgcgtcggatgaggagattcagggcacaaaagacgcagttatccaggatctggaacggaagctccgcttcaaggaggacctactaaataacggccagccaagactgacatacgaggagcgcatggcgaggagactgttgggtgctgattcggcaaccgtgttcaatatccaagaacctgaggaggaaactgcaaatcaggatattggatcacctcacgccagcgtggggagcccattagacggccagaaggaatacaaggttagctcatgtgaacagcgcctgatatccgagattgagtatcgcttagaacgttcacccgtggatgagtcaggcgacgaggtgcagtatggcgacgtcccggtcgagaatggaatggccccctttttcgaaatgaaacttaaacactataagatatttgaagggatgcccgtgacatttacctgcagagtggctgggaaccctaaacctaagatatactggtttaaggacggaaaacagatatccccaaaatccgaccactacacaatccaacgcgacctggacgggacctgtagcctgcatactaccgcgagcacactggatgatgatggcaattacacaatcatggcagccaaccctcagggcaggatttcctgcacagggcggctgatggttcaggccgtcaaccagagaggacgtagccctcgtagcccatctgggcatccccatgtgagaaggccaaggtctagatcacgggacagcggcgatgagaacgagcccatccaggagaggttcttccggccacatttcctccaagcacccggagatctgactgtgcaagaaggcaagctgtgccgtatggactgcaaagtatccggattgcctactcccgatctctcctggcaactggacggtaagccggttaggcctgactccgcacataaaatgctggtgcgcgaaaacggcgtccactcactaatcatcgagcctgtgaccagccgagatgcaggcatctatacctgcattgccacgaaccgggcggggcagaattcattctcgctggagttggtagtggctgccaaggaggctcataaaccaccagtctttatcgagaagctgcagaataccggcgtggcagacgggtatccagtgcgcttggagtgcagagttttgggggtgccacccccacagatattctggaagaaggagaacgagtcgctcacacacagcaccgaccgagtctctatgcaccaagacaaccacggatacatctgtctgctcatacaaggcgcaacgaaagaggacgccggatggtatacggtaagtgccaaaaatgaagctggaattgtgtcttgcacagctaggttggacgtgtacatctccaggcattag

SEQ ID NO: 127729 - DNA, 2019 bp, synthetic construct
  misc_feature 1..2019: note = Description of Artificial Sequence: Synthetic coding sequence
  source 1..2019: mol_type = other DNA
atgtccgctctggcatcccgttctgcacctgccatgcaatcatccgggtcttttaactatgctaggcccaagcagttcatcgctgcgcagaatttaggccccgcctccggccacggtactccagcgtcctcaccctcatcttcctcacttccctcacctatgtctcctacccctcgccagtttggccgcgctcccgtgccacccttcgcgcagccgtttggcgcggagcctgaagctccttggggttccagctctccttccccgccgccgcccccgcccccagtgtttagtcccaccgcagcctttccagtccccgacgtgttccccctcccgccaccaccaccgcccctccccagcccagggcaggcgtctcactgctccagcccagcaacccgattcggacattcacagacacccgcagctttccttagcgccctgctccccagccagccgccacctgccgccgtcaatgctttaggactccccaagggcgtaacacccgcaggatttcctaaaaaggcgagcaggacagccagaattgcgagcgatgaggaaattcaggggaccaaagacgccgtaattcaggatctggagcgaaagctccgatttaaggaagaccttctgaacaacggacagcccaggctcacatacgaagaacgcatggcccggcgcctccttggcgctgactccgccacagtgttcaatatccaggagcctgaggaggagacagcaaatcaagaatataaagtcagcagttgcgaacaaagactgatctccgagattgaataccgcttggagcggagcccagtggatgagtctggcgatgaggtgcagtatggggacgtgccagtggagaacgggatggccccatttttcgagatgaagctgaaacactacaaaatttttgaaggcatgcctgtcacttttacctgtcgcgtcgctggcaatcccaagccaaagatctattggttcaaagacggcaaacaaatctctccaaagtcagaccactacactatccagcgtgacctcgacggcacgtgttccctgcacaccactgccagcacattagatgatgatggcaactacactattatggccgccaatccccagggacgcatttcctgcactggcaggttgatggtgcaggcagttaaccagaggggcaggtccccccggagcccctcaggccaccctcacgttaggcgccctcgatcccggtctcgtgattctggtgacgaaaatgaacctatccaggaacgcttctttcggccacacttcttgcaagcccccggcgatcttacagtccaggaaggcaagttgtgtcggatggattgtaaagtcagtggcctaccaacgcctgatctgagctggcaactggatgggaagccagtgaggcctgattctgctcataagatgctggtaagagagaacggcgtgcatagcctgatcatcgagcccgtcacgagtcgtgacgcgggaatctacacctgtattgccacaaatagggccggacaaaactccttctccctcgagctggtggtcgccgccaaagaggcacacaaaccacccgtgttcatagagaagctgcagaataccggcgtagcagacgggtatccagtgaggttagagtgtcgcgtgctaggcgtcccacctccgcaaatcttctggaagaaagaaaatgaaagcctgacccatagtacagaccgagtcagtatgcaccaggacaaccacggatacatttgcctgctcatacagggagccaccaaggaggacgctggatggtacacagtgagtgccaagaacgaagctgggatcgtatcgtgtactgctagattggacgtttatacccagtggcatcagcagtcacaaagcacaaagccaaagaaagtgcgccccagcgcctcccgctacgcagctcttagcgaccaaggtttagacatcaaagccgcgttccagcctgaagccaaccccagccaccttacgttaaatacagccttggtagaatcagaagacctttag

SEQ ID NO: 127730 - DNA, 2334 bp, synthetic construct
  misc_feature 1..2334: note = Description of Artificial Sequence: Synthetic coding sequence
  source 1..2334: mol_type = other DNA
atgccgcaagcccagaagaaaacaacttccgtttcacttacaataggctcttccagtcctaaaactggtgtcaccactgcagtgatacagcccttaagtgtcccagtacagcaagtgcattctcccacatcctacctctgtcggcccgacggcaccacgactgcttacttcccccctgttttcacaaaggagctgcagaacaccgctgttgctgagggacaagtggtggtcctggagtgtagagttaggggtgcgccccctctccaggtgcagtggtttcgtcagggctctgaaatccaggactctccagactttagaatacttcaaaagaaacctagaagtaccgctgagcctgaggaaatttgtactctcgtcatcgccgaaaccttcccagaagatgctggaatctttacctgctccgcgagaaacgactacggcagcgccacgagcaccgcacaactggtggtgaccagcgcaaacacagagaattgctcctatgagagtatgggtgagtctaacaacgatcactttcagcatttcccaccaccccctcccattctggagaccagctccctcgagctcgcgtctaagaaaccgagcgaaatccagcaggttaacaaccctgaactaggacttagtagagccgcactgcagatgcaattcaacgctgcggaacgggagaccaacggcgtgcacccttctagaggtgtgaatggtttaatcaatggaaaagctaatagcaacaagtctctgcctacccctgccgttctgttgagtccaactaaagagcctcccccattgctagctaagcctaagctcggctttcccaagaaggcgtctaggacggctcggatcgcctccgacgaagagatacaggggaccaaggatgctgtgatccaggacctagagcggaagctcaggttcaaggaagacttacttaacaacgggcagcccagactgacctacgaggagcgcatggctagaaggctgttgggagctgactccgctaccgtgtttaatattcaagagcctgaggaggagacagcaaatcaggagtacaaagtctcttcctgtgagcaacgcttaatttctgaaattgaatatcgcttggaacggtcaccagtggatgagtccggcgacgaggtacaatacggcgacgtccccgtggagaacggcatggccccattttttgagatgaagctgaagcactataagatcttcgaggggatgccggtcacattcacttgcagagtggccggaaatccaaaaccaaaaatctactggttcaaggatggtaagcagatctctccaaagtcagaccattacactatccagagagatcttgacgggacctgtagcctgcatacaacagccagcacgcttgatgatgacggcaactataccattatggccgcgaatcctcaagggagaatttcttgcaccgggagacttatggtgcaggccgtgaatcaaaggggaaggtcaccgcgatcaccttctggtcatccccacgtccggagacccaggtcacgctcgagggactcaggtgatgagaacgagccaattcaggagcgcttcttcagacctcacttccttcaggctccgggcgacctcaccgtacaagagggcaaactttgtaggatggactgcaaagtttccggactgcctactcccgatctctcctggcaactggatggcaaaccagtccggccagatagtgcccacaagatgcttgtccgggagaatggtgtgcacagtctcatcatagagcctgttacttctagggatgctggcatttacacttgcattgcaaccaatcgggctgggcagaatagcttctcccttgaactggtggtagcagcgaaagaagcacataagccccctgtttttattgagaagttgcaaaatactggagtcgccgatgggtatccagtgcggctcgagtgtagagttttgggggtcccgcctccccagatcttttggaaaaaggaaaacgaaagtttgacgcactctaccgatcgcgtttctatgcaccaggataatcatggatatatctgtctgctcatccagggagctaccaaagaggacgccggatggtacacggtcagtgccaagaacgaggccggcatcgtgtcttgtaccgcgcggctggatgtatacacccaatggcaccagcaaagccagtctacaaaacctaagaaggttcgcccttctgcctctaggtacgccgctttgtccgaccagggcctggacatcaaggctgccttccagccggaggcgaatccaagccacttgaccttaaacacagctctggttgaatctgaggatctctag

SEQ ID NO: 127731 - DNA, 3321 bp, synthetic construct
  misc_feature 1..3321: note = Description of Artificial Sequence: Synthetic coding sequence
  source 1..3321: mol_type = other DNA
atgtccggaactagtagtcacgaatcattctacgactcattgagcgacatgcaggaagagtccaagaatactgactttttcccggggctaagcgccttcctgtcccaggaggagattaacaagagtctcgacctggcccgacgcgccatcgccgacagcgagaccgaagatttcgactcagaaaaggagatttcacagattttttccacttctcccgcctccttgtgtgaacacccttcgcacaaggagactaaactcggtgagcacgcttccagaaggcctcaggataaccgctctaccccggtccagccactggctgagaagcagacaaagtccatctcgtccccagtgagtaagcggaagcctgctatgagtccgctgctgaccaggccatcatatatcaggagcttaagaaaagccgagaaacgaggggctaagaccccctccaccaacgtcaagcccaagacaccccaccagcggaagggcgggcctcagagccagctttgcgataaagctgctaatttaattgaagaactgacctcgatcttcaaagccgctaagccccggaataggtctcctaatggagagagctcaagccccgactcagggtacctgtcccccaagaaccagccaagcgcactgctgtcagcgagcgcatcccaatcccctatggaggaccagggagaaatggagagggaagtaaagagtcccggggcacgtcactgctaccaagataatcaggacctcgccgttccacacaaccgcaagagccaccctcagccccatagcgctctacacttcccagccgcacctagattcattcagaaactgcgatcccaggaggtggctgagggatcaagggtgtatctcgaatgccgcgtgactggcaaccccactccacgggtccgatggttttgcgaaggaaaagaacttcacaatactcctgatatccagattcactgcgagggaggtgatttgcacacgctcattatcgcagaggcgtttgaggacgatacaggacggtacacttgcctcgctactaatccaagcggatccgacactaccagcgccgaggtattcattgaaggggcctcttccactgactctgacagcgagtctctcgcattcaagagcagagccggcgctatgccccaagcgcaaaaaaagacgacctcggtcagtctgacaataggatcatcatcacctaaaacaggagttaccacagccgtaattcaaccactgtctgtacccgttcaacaggtgcattccccaaccagttatctatgccggcccgatggtaccacgaccgcctacttcccaccagtgtttactaaggagttacagaataccgccgtagccgaaggacaggtcgtggttctcgaatgcagggtacgcggggcaccgcctctccaggtgcagtggttccggcagggaagcgaaattcaggatagccctgattttcggattctccagaaaaaacccaggagcaccgctgaaccggaggagatttgcacactggtcatcgctgagacctttcccgaagatgcaggtatttttacatgtagcgctagaaatgactacggctcagccacatcaaccgcccaactcgtggtcaccagcgcaaatactgagaattgctcttacgaaagtatgggggagagcaacaatgaccacttccagcatttcccgccaccacccccaattttagaaacatcgtctctcgagctagcctccaaaaagccctcggagatacaacaggttaataacccggagctcggattaagtagggcggcgctgcagatgcagttcaacgcagccgagagagaaactaatggggtgcatcctagccggggagtgaatggcctcattaacggcaaagcaaattccaacaaatctcttccgacacctgccgtgttgttatctcccaccaaagagcccccaccactgctggcaaagcccaagcttgggtttccgaaaaaagcttccagaaccgctcggatcgcttcagatgaagaaatccagggcacaaaggacgcagtcattcaggacctggagcgaaaactgcggtttaaggaggacctgttgaacaatggccagcctcgcctaacctacgaggagcgcatggcccgaaggctcctgggagcagacagcgcaaccgtttttaacatccaggagcctgaggaagagactgctaatcaggagtacaaagtaagcagttgtgagcagcgtttgatctccgagatagagtacaggctggagagatcgcctgtggacgaaagcggtgacgaggtgcagtatggagatgtgcctgtggaaaatggaatggcaccctttttcgaaatgaaactcaagcattacaagatattcgaagggatgcccgtgacatttacctgccgggtggctggaaatcccaaacctaagatctactggtttaaagacggaaagcagatctcccccaagagcgaccactacaccatccagcgcgacctagatggcacctgtagtctgcataccacggcctccaccctcgatgacgacggcaactacacaatcatggctgctaatcctcagggaaggatttcttgcactgggcgtctcatggtgcaagcggtgaatcagcgtgggagatctcccaggagcccatccggacacccacatgtaaggcgacctaggagtcggtcccgcgactccggggacgagaatgagcctattcaggagcgtttctttcgtccccacttccttcaggcaccgggtgatttgaccgtgcaagaaggaaaactctgccgcatggattgtaaggtgagcggtctgcctacacctgatttgtcctggcagctggacggcaaacctgtgcggcccgatagcgctcacaaaatgttggtgcgggaaaatggggttcactctcttatcattgaaccagtgacatctcgcgacgctggaatttatacatgcatcgccacaaatcgggccgggcaaaattcattcagtctagaactggtcgtggccgcgaaggaggcacataagccccctgtctttattgagaagctccagaacaccggagtcgcagacgggtacccagtccggttggagtgtcgagttctcggagtaccccccccacaaattttttggaagaaggagaacgaaagtctgacacattcaactgacagggtgagtatgcaccaggacaaccacggctacatctgcctgctgatacaaggcgcaactaaggaggatgccggatggtatactgtcagtgccaagaatgaggcagggattgtgtcttgcactgccagactggatgtgtatatttcccggcactag

SEQ ID NO: 127732 - DNA, 1233 bp, synthetic construct
  misc_feature 1..1233: note = Description of Artificial Sequence: Synthetic coding sequence
  source 1..1233: mol_type = other DNA
atgagtcccctgctgacgagaccttcctacattagatccctgcgcaaggccgaaaaacggggggctaaaaccccatctaccaacgtgaagccaaaaaccccgcatcaaagaaagggggggccacaaagtcagctgtgcgacaaagctgctaatctaattgaagaattaacgtctatatttaaggcagccaagcctagaaatagaagtcctaacggggaatcctcgagtcccgattcaggctatctgagccctaagaaccaaccatccgccttactgagcgcttccgcgtcgcagtctccgatggaagaccagggtgagatggagcgcgaagtgaaaagcccaggcgcaagacactgctaccaggacaatcaggatctcgcggtaccacataacagaaagagccacccacagccccactctgctcttcacttccccgcggctccaaggttcatccagaaactgcgttcccaagaagtagctgaagggagccgagtgtacctggagtgtcgagtaaccggcaacccgaccccccgtgtccgttggttctgtgaggggaaggaactgcataatacccccgatatacagatacattgtgaaggaggtgacctccacacgctgataatcgccgaagccttcgaagacgacactggccggtacacctgcctggccacaaacccctctggctccgacactaccagcgcggaggtcttcattgagggggcatcaagtaccgattcagattccgagtccctggcttttaaatctcgggcaggagccatgcctcaagcccaaaaaaagacaacctctgtgagtctgaccattggatcttcttcacctaagacaggagtgacgactgcagtgatccagccactgtctgtgccagtacagcaggtgcacagccccacaagttatctttgtaggcccgacggcaccacaaccgcttattttccacctgtttttaccaaagaactgcagaatactgcggtggcagaagggcaagtagttgtgctggagtgtagagtgcgtggcgccccgcccctgcaggttcagtggttccggcaggggtccgaaatacaagactcacctgacttcaggattctgcagaagaagccccggtctacggccgaacctgacgttctgtacgtgttcgttcgcgtacggtgtcaccagatgaaaattcaatactacaatctggctcacctgatcagttcttggcttagctccttcttgtag

SEQ ID NO: 127733 - DNA, 3006 bp, synthetic construct
  misc_feature 1..3006: note = Description of Artificial Sequence: Synthetic coding sequence
  source 1..3006: mol_type = other DNA
atgcctcaggctcaaaaaaagaccacgagcgtgagcctcaccatcgggagctcctcaccgaagaccggcgtcaccacagccgtgatccaaccactgtccgtgccagttcagcaggttcactcccccaccagttacctgtgcaggcctgatggcactaccactgcctacttccctcctgtgttcaccaaggaactgcaaaacacagccgtggccgaaggacaggtggttgttctggagtgccgggtgcgcggcgctcctccccttcaggtgcaatggttccggcagggttccgaaattcaggactctccagatttcaggatccttcagaagaaacctcgctccacggcagagcccgaggaaatttgtacactggtcattgccgagacctttcctgaggacgccgggattttcacttgctccgcgcggaacgactacggctcagctacctccacggcccagctggtcgtgactagtgccaacactgagaattgttcctatgagtcgatgggtgagtccaacaacgaccactttcagcatttccccccccccccgcctatcctagagaccagcagtctggagctggccagtaagaaaccgagtgagattcagcaagtaaataatcctgaactcggcttgtcaagggcagctctgcagatgcaatttaacgctgctgaaagagagaccaacggagttcacccaagtcggggggtgaacggtcttattaacgggaaagcaaattccaataagtcgctgccaacccccgcggtgctgttatcacctactaaagaacccccaccattgctagcaaagcccaagttggatccgctcaaactgcagcagctgcagaatcagattaggttagaacaggaggcgggcgcccggcaacctccccccgctcccaggtctgctccacctagccctccattccccccccccccagcttttcctgaattggccgcctgcacaccacccgctagtcctgaacctatgtcagccttggcatccaggtctgctcctgctatgcagtcttcggggagttttaactacgcaagacctaaacagtttattgctgcccagaatcttggtccagccagtggacacggaacacctgcttcatctccttccagtagtagtctcccttctccaatgtcccccacgccgaggcagttcggacgcgctccagtgccgccattcgcccagccttttggagccgagcctgaggccccctggggctcaagctcaccttctcctccaccaccccctcctcctgtgttctcaccaacagcagcttttccagtgccggacgtgttccctctccccccgcccccacccccgctgccatctcctggtcaagcttctcattgcagctctcctgcaacaagatttggccattcccagactccagctgcctttttaagcgctcttcttccaagtcagcccccgccagcagccgtgaatgcattaggactaccaaaaggcgtcacccccgccggttttcccaagaaagcctctcgtactgctcgaattgcctccgacgaggaaattcagggcactaaggacgcagtcatccaggaccttgagaggaagttaaggtttaaggaggatttgctcaacaacgggcagccccggctgacatatgaagagaggatggcaagaaggttactgggagccgactccgccaccgtgttcaatatccaggaacccgaagaagagacagccaaccaggagtacaaagttagcagctgtgaacagagactaatctccgagattgagtacaggctagagcgctctccggtcgacgaatctggagacgaggtgcaatatggggacgtcccagtagagaacggaatggccccattctttgagatgaagctcaagcactataaaatctttgagggtatgcccgtaacgtttacatgtcgcgtggctggaaatcccaagccgaagatctactggtttaaagatggcaaacaaatctcgccgaagagtgaccattacaccatccagcgcgaccttgacggcacatgctctctgcacaccaccgcttccacattggacgacgatggcaactacacaatcatggctgctaaccctcaaggccgtatcagttgcactgggagactaatggtgcaggcagttaatcaacgcggaagatcccccagatctccatcggggcacccacatgtgaggcgccccagaagcagatctcgcgacagcggcgatgagaatgagcccatccaggaaaggttcttccggcctcactttctgcaagcgcccggggacctgaccgtgcaggaaggaaagctctgtagaatggactgtaaggtgtccgggctcccaacccccgacttgtcctggcagctggacggaaagcctgtgcgcccagacagtgcccacaaaatgctggttcgcgaaaacggcgtgcattcattgattatcgagcccgtcacttcccgcgatgcagggatttatacctgtattgctaccaacagggctggtcagaattcctttagcctggagctcgtggtcgcagctaaggaagcccacaagcctccagtatttatcgaaaaacttcaaaacaccggagtagctgacggctaccctgtgagacttgagtgccgtgtcctgggtgtgccaccgccccagatcttttggaagaaggagaacgaatctctcacacactccacggaccgggtgagcatgcaccaggacaaccatggatacatatgccttctcattcagggcgcaactaaagaagatgccggatggtatacggtcagtgcaaaaaatgaagccggcattgtgagttgcacagctaggttggatgtttatacccaatggcaccagcagtcacaatcaacaaagcctaagaaggtgcgcccatcagcgagcagatacgccgctctgtccgaccaggggttggatataaaggctgcttttcagccagaggctaatcctagtcatctcactctcaataccgctctggtggagtctgaggatctgtag

SEQ ID NO: 127734 - DNA, 483 bp, synthetic construct
  misc_feature 1..483: note = Description of Artificial Sequence: Synthetic coding sequence
  source 1..483: mol_type = other DNA
taagggaaacctgtgcgccccgactcagcacataagatgcttgtccgcgagaatggcgtccacagtcttattattgagccagtgacctcccgggacgccgggatttacacttgtatcgccactaatcgcgccggccaaaattccttttccctggaactcgtcgtagccgcaaaagaggcccataaacctcctgtttttattgaaaagctacagaacacgggcgtggcagatggatacccagtgagattagaatgtagggttttaggtgtaccacccccgcagattttttggaagaaggaaaacgagtccctgacgcattcaacagaccgcgtctcgatgcatcaggataatcacggctatatttgtctccttattcagggagcgacaaaggaggatgctggttggtatacagtgtcggcgaaaaacgaggctgggatagtcagctgcacagctcgtctggacgtctacattagccgacattag

SEQ ID NO: 127735 - DNA, 1539 bp, synthetic construct
  misc_feature 1..1539: note = Description of Artificial Sequence: Synthetic coding sequence
  source 1..1539: mol_type = other DNA
aagaatactgactttttccccggcctctctgcatttctctcccaggaggagatcaacaaaagtcttgacctcgcaaggcgcgcgattgccgattccgagaccgaggacttcgactccgagaaagagatctcacagatcttttctacctccccagcttccctttgtgaacacccttcccataaggagacaaaactgggcgaacacgcttctcgcagaccacaggataatcgatcaacccctgttcagcctttggccgagaaacagacaaaatcaatttcgtcacctgtatctaaaagaaagccggcaatgtctccacttttgactcggccatcgtacatcaggtcgttaaggaaggctgagaagaggggtgcaaagacgcccagtactaatgtcaagcccaaaacaccccaccaacgcaagggagggcctcagtcccagttgtgtgataaagcagctaatcttatcgaagaacttaccagcatctttaaggcggctaagcccaggaaccgaagtcctaacggggaatcatcatcaccagactcaggatacctttcacccaaaaaccagccaagcgccttactgagcgcgagcgcctcgcaatcaccaatggaagaccagggagaaatggaacgggaagtgaagtctccaggagctagacactgctatcaggacaaccaggatcttgccgtcccccacaatcggaagagccatccccagccacattcggccctgcactttcctgctgcaccccggttcatccagaaacttaggagccaggaagttgccgagggcagtagggtgtacctcgagtgcagagttacagggaatcccacccctcgggtaaggtggttttgtgaaggcaaagagttacacaacacccctgatatccagattcactgtgagggcggcgatctgcacacactgatcatagcggaggcttttgaggatgacaccggtaggtatacctgtttggcaacaaaccccagtggatcagataccacttcggctgaagtgttcatcgagggcgcatctagtacggacagtgattcagagtctttagcattcaaaagccgcgctggcgccatgcctcaggcacagaaaaaaacaaccagcgtctccctgacaatcggcagttcaagtccaaagaccggcgttaccactgccgtcattcagccgctatccgtaccggttcagcaggtccacagccctacatcctacttatgccggcccgatgggacaacaactgcctactttccccccgtgtttactaaagaacttcaaaacacagccgtagctgaaggccaggtagtcgtattagaatgccgggtcagaggggccccccctctccaggtgcagtggttcagacagggatcagaaatacaggatagtccagactttagaattctacagaagaaacctcgttcaaccgccgaaccagatgtgctgtacgtctttgtgcgagtgcgatgccaccagatgaagattcaatactacaacctggctcacctgatcagttcctggctgtcaagtttcctctag

SEQ ID NO: 127736 - DNA, 87 bp, synthetic construct
  misc_feature 1..87: note = Description of Artificial Sequence: Synthetic coding sequence
  source 1..87: mol_type = other DNA
atgagcggaacatcttcacacgaatcattctacgacagcctttccgatatgcaggaagaatctaaaaacacggatttctttccttag

SEQ ID NO: 127737 - DNA, 690 bp, synthetic construct
  misc_feature 1..690: note = Description of Artificial Sequence: Synthetic coding sequence
  source 1..690: mol_type = other DNA
atggctgcacagcctctgcgccatagatccagatgcgctactccaccccggggagatttctgtggcgggacagaaagagccatcgaccaagccagcttcacaacatccatggagtgggatacacaggtagtgaagggcagctctcctctaggcccggccggccttggggctgaggagcctgctgcagggccacaactgcccagctggttacagcccgaacgctgcgccgtgttccaatgcgctcaatgtcatgccgttctagctgactctgtccacctggcctgggatctaagccgaagtttaggcgctgttgtgtttagccgggtgaccaataacgtggtattagaggcaccattcttggtgggcatcgagggtagcttaaaggggtccacgtacaacctgctgttttgtggaagttgtggaatccccgtgggattccacctgtactccacccatgctgcgctagccgcccttagggggcacttctgcctcagctcagacaaaatggtctgttacttattaaagactaaagccatcgtaaacgcaagtgagatggatattcaaaatgtccctctgtccgagaaaatcgcagaacttaaagaaaagatcgtcctgacccataacaggctgaagagtttaatgaaaatactgagcgaggtgacccctgatcagtccaagccggagaattag

SEQ ID NO: 127738 - DNA, 816 bp, synthetic construct
  misc_feature 1..816: note = Description of Artificial Sequence: Synthetic coding sequence
  source 1..816: mol_type = other DNA
atggcctctccaggatgtctttggctgttagctgttgcgctgctgccatggacctgcgcgtcccgcgctttgcagcatcttgacccaccagcaccgctcccgctcgtcatctggcatggcatgggcagccgatacgttgctcagacaggcctggaactcctcgcctcaagtaacccacctgcctccagctaccagtccgctggtatgattggggattcttgctgtaaccccctaagtatgggcgctataaaaaaaatggtggagaaaaaaattccaggcatatacgtcctgtccttggagattggaaaaactctcatggaggacgttgaaaacagtttttttcttaacgttaatagtcaggtgacgactgtctgtcaggcattagcaaaggatcccaagcttcagcaggggtacaacgcgatgggattcagccaaggagggcaattcctccgggctgtggcccaaaggtgtccttccccacccatgattaatcttatctcagttgggggtcagcaccagggcgtgtttggattaccccggtgccccggcgaaagctcccatatctgcgacttcatcaggaagacactcaacgctggagcttacagtaaagttgttcaggaacgcctggtccaggctgagtactggcacgatcccattaaagaggacgtctaccgcaatcattccatatttttggcagacatcaaccaggagcgaggaatcaatgaatcttacaagaagaacctgatggctcttaagaagtttgtaatggtgaagtttctgaatgacagtattgtggatccagttgattccgaatag

SEQ ID NO: 127739 - DNA, 921 bp, synthetic construct
  misc_feature 1..921: note = Description of Artificial Sequence: Synthetic coding sequence
  source 1..921: mol_type = other DNA
atggcttctcctgggtgcctgtggctcttggcagtcgcacttctgccctggacttgcgccagcagggcactccagcacctcgatccaccggctcctttgcccctggtgatttggcacggcatgggggacagttgttgcaacccgctgtctatgggagcgatcaaaaaaatggtggagaaaaaaattcctggcatctatgtgctcagtctcgagatcgggaagaccttaatggaggacgtggaaaattcattcttcctcaatgtcaatagccaggtgacgaccgtttgtcaggccctggccaaggacccgaagctgcaacagggttataacgccatgggatttagccaggggggacagtttctcagggccgtcgctcaacgatgcccctccccaccgatgatcaacctcatcagtgtcggcggacaacatcagggcgttttcggcctgcctcgctgtcctggagagagcagccacatttgtgacttcatccggaagactttgaatgccggcgcttactcgaaggttgtccaggagagactggtacaggctgagtactggcacgatccaatcaaagaagacgtgtatcggaaccactctatttttcttgccgacataaatcaggagaggggaatcaacgagtcttacaaaaaaaatctgatggctttaaagaagttcgtcatggtgaagtttctcaatgatagcattgtggacccagtggactccgagtggtttggattctatagatccgggcaggctaaagaaactatccccctgcaggagacttccctctacactcaggaccgactcgggttgaaagagatggacaatgctggccaactggttttcctggcgactgagggagaccacctgcagctgtcagaagaatggttttatgctcacattatcccatttctcggatag

SEQ ID NO: 127740 - DNA, 612 bp, synthetic construct
  misc_feature 1..612: note = Description of Artificial Sequence: Synthetic coding sequence
  source 1..612: mol_type = other DNA
atggcctcccccggctgtctctggctgctggctgtggccctcttgccctggacatgcgcctccagagcgctgcaacacctagatccccccgctcccctccctcttgtgatctggcatgggatgggagtgtttggcctgcctcggtgtccgggcgagagctcccatatctgtgatttcatccggaaaaccctcaacgccggggcctactcaaaagtggtgcaggagaggcttgttcaggcggagtattggcacgatcccattaaagaggacgtgtaccggaaccatagcatttttcttgccgacatcaatcaggagcgtggcatcaacgaatcatataaaaagaaccttatggccttgaagaagttcgtaatggtcaagttcctcaatgattccatcgtggacccggtcgactcagaatggttcggattctaccgcagcggacaggccaaggaaacaatcccccttcaagaaaccagcctttatactcaggacaggttaggactgaaagaaatggataacgccggtcaactagtgttcttagccaccgagggagaccacttacaactcagcgaggagtggttctatgcccatatcatcccttttttggggtag

SEQ ID NO: 127741 - DNA, 921 bp, synthetic construct
  misc_feature 1..921: note = Description of Artificial Sequence: Synthetic coding sequence
  source 1..921: mol_type = other DNA
atggccagccccggatgcctttggcttctcgcagttgcacttctgccctggacctgcgctagccgtgctttgcagcacctagatcctccagcacccctgcctttagtaatttggcatggaatgggggactcttgttgtaatcccctgtctatgggggccatcaagaaaatggtggagaagaaaattcctggtatctacgtcctgagtttggaaattggcaagactttgatggaggacgtcgagaactctttttttttaaatgtgaactctcaggtgaccactgtgtgccaagcccttgccaaggacccgaagctacagcagggatacaacgctatggggttctcgcaggggggtcagtttctcagagctgtcgctcagcggtgcccttccccgcccatgataaacctaatctctgttggggggcagcatcagggagttttcggccttccccgttgccccggggaatcctctcacatttgcgacttcattagaaagacgttgaatgctggagcttatagcaaagtcgtacaggagcgcctggtacaggctgagtattggcacgaccctataaaggaggacgtttatcgtaatcactcaatctttctcgctgacatcaaccaagaacgagggattaacgagtcttataagaagaacctaatggccctgaaaaagttcgtgatggtcaagtttcttaatgactctatcgtcgatccagtcgattccgagtggtttggcttctaccgcagtggccaggccaaggagacgattccactccaggagacttcactctacacgcaggatcgcctagggctgaaggaaatggacaacgccggccagctagtattcctggcaactgagggcgaccatctgcaactctccgaagagtggttttatgcgcatataatacccttcctagggtag

SEQ ID NO: 127742 - DNA, 909 bp, synthetic construct
  misc_feature 1..909: note = Description of Artificial Sequence: Synthetic coding sequence
  source 1..909: mol_type = other DNA
atgttaggactatgtggtcagagactgcccgcagcatgggtcctgttgttactccccttcctaccgttactgctcttagccgccccggcacctcaccgtgctagctacaagcctgtcatcgtcgtccacggtttgtttgactcatcttatagttttagacacctcctggagtacattaatgaaacacaccccgggactgtggtgaccgtgctagatcttttcgatgggagggaatccctgcggccgctgtgggagcaggtccagggcttccgcgaggctgtggtcccaattatggccaaggctcctcagggtgtccacctgatttgttacagccagggcggacttgtctgtcgagcccttctgagcgtgatggatgatcacaacgtggacagcttcatttcactgtccagcccccagatggggcagtacggggatacagactacctgaaatggcttttccctacaagtatgcggagtaacctgtatagaatttgctattctccctggggtcaggagttctctatttgcaactactggcacgatcctcaccatgacgacctatacctcaatgccagtagcttcctcgccctgatcaacggcgagcgggatcatcccaatgctaccgtgtggagaaagaacttcctcagagtgggacatctagttttgattgggggtccagacgatggcgtgattaccccatggcagagctctttcttcggcttttatgatgcgaacgaaacggttctggagatggaggagcagctggtctaccttagggattccttcggcctcaagactctcctcgccagaggcgcaatcgtccgttgtcccatggccggcatctcgcataccgcctggcactccaacaggaccctatatgagacttgcatcgagccatggttgagctag

SEQ ID NO: 127743 - DNA, 927 bp, synthetic construct
  misc_feature 1..927: note = Description of Artificial Sequence: Synthetic coding sequence
  source 1..927: mol_type = other DNA
atgaagtcttgcggctccatgcttgggctatgcggccaacgcctaccagccgcctgggtgttactgcttctgccctttctgccgctgttgctgttggctgcccctgcccctcatagagctagctataagcctgtaatcgtggtgcatggactgttcgacagctcctatagctttcgccatctcctggaatacatcaatgagacacacccgggaactgtggtcacagtactcgacctgtttgatggaagagagagcctgcggcccttatgggagcaagtgcagggattcagagaggcagtggtgcccattatggctaaggccccacagggggtccacctgatctgttactcccaaggggggcttgtgtgtcgggcgttgctgagtgtgatggatgaccacaatgtcgactctttcatcagcttaagctcaccgcagatgggtcagtacggtgatacggactatttgaagtggctgtttcctacatcaatgagaagtaatctgtacaggatatgctactctccctggggccaagaattctccatctgcaattactggcatgaccctcatcatgatgatctctacctaaatgcttcctccttcctggcactgatcaatggcgaacgcgatcaccctaatgccaccgtgtggcgcaagaattttctccgtgtcgggcacctggtcctgataggcggccccgatgatggcgtcattaccccctggcagtcctccttcttcggtttctacgatgctaacgaaacagtgctcgaaatggaagaacagctagtgtatttgagagattcatttggactcaaaacactcctggctcgaggcgcaatcgtcaggtgccccatggccggcatatcacatacagcctggcactcaaatcgaaccctctacgaaacttgtatcgagccatggctgagctag

SEQ ID NO: 127744 - DNA, 909 bp, synthetic construct
  misc_feature 1..909: note = Description of Artificial Sequence: Synthetic coding sequence
  source 1..909: mol_type = other DNA
atgctgggcttgtgtggccagcgacttcctgctgcttgggttttgttgctactgccctttcttcctttactgctcctcgcagctcccgctccccatagggcctcctacaagcctgtgattgttgttcacgggctgtttgactcttcctacagctttcggcaccttttggagtatattaacgagactcatccaggcaccgttgtgaccgtactcgacctgtttgatggtagagagagcctgcgaccactctgggagcaagtgcaagggttccgggaggccgtggtaccaatcatggctaaggccccccagggcgtgcacttgatttgctactcgcagggggggctggtctgtagagcactgctcagtgtgatggatgatcataacgtggattcatttataagcctgagtagcccccagatgggtcaatacggcgacaccgactacctgaagtggctcttcccgactagcatgcgaagcaacctctatcggatatgttacagcccttggggtcaggaattctctatttgcaactattggcatgacccccaccacgatgatctgtatctgaatgcctctagcttcttggctctgatcaatggtgagcgagaccaccctaatgcgaccgtttggcgaaagaattttctccgtgtcggacacctagtgcttatcggaggaccggacgacggagtgataacaccttggcaatcatcctttttcgggttctacgatgccaatgagactgtgttggagatggaagagcaactggtgtacctgcgggattcattcggactcaaaactctgttggcacggggggcaatcgttcggtgtcccatggcaggaatcagccacacggcatggcactcaaatcgtactctgtatgagacatgtatagaaccttggctcagttag

SEQ ID NO: 127745 - DNA, 909 bp, synthetic construct
  misc_feature 1..909: note = Description of Artificial Sequence: Synthetic coding sequence
  source 1..909: mol_type = other DNA
atgcttgggctttgcggccagcggcttcctgcagcttgggtactgctgcttctcccgtttctgcccctgctcctactggccgcccccgcccctcatagagcctcctataagccagtgattgtggttcatgggctgtttgacagctcttactctttccgccacctcttagagtatatcaacgagacacatccagggacagtggttacggtccttgatctgttcgacggaagggagtcactgcggcctttatgggaacaggtccaaggcttccgggaagccgttgttcctattatggctaaagcaccgcagggagtgcacctgatctgttatagtcagggcggcctggtgtgtcgggccttactcagcgtcatggacgatcataatgtggactccttcattagcctcagctcacctcagatgggccagtatggcgatactgactacctcaaatggttgtttccaactagtatgaggagcaatctgtatcgaatttgttactccccctggggccaggagttcagcatctgtaattattggcacgacccccatcacgatgatctgtatttaaacgcctccagctttctggcacttattaatggagaaagggaccacccgaacgccaccgtctggaggaagaacttcctgcgcgtcgggcaccttgttctcattggaggtcccgacgacggtgtcatcacaccatggcagagctcattcttcggtttttatgacgccaatgaaacagtgcttgagatggaggaacaactggtctacctgagggacagctttgggttgaagacgctcctggcccgaggagccattgtccgctgtcccatggctggcattagccatacagcctggcacagcaataggacactgtatgaaacttgtattgagccatggctctcttag

SEQ ID NO: 127746 - DNA, 927 bp, synthetic construct
  misc_feature 1..927: note = Description of Artificial Sequence: Synthetic coding sequence
  source 1..927: mol_type = other DNA
atgaaatcatgtggctcaatgctcggcttgtggggccagaggctccccgctgcttgggttttgcttttgctcccattcctcccactgctcttgcttgccgcccctgctcctcacagggagtcctataagcccgtgattgttgtgcatgggttgttcgactcttcatactcttttaggcatctgctcgagtatattaatgaaacgcaccctggcacggtcgtgacagtgctggatctatttgatgggagagagtccctgaggcccctgtgggaacaggttcaggggtttagagaggctgtggtgccgatcatggccaaggccccccagggagtccacctcatttgctacagccagggggggctcgtttgccgggccctgctttccgtcatggatgatcacaacgtggacagctttattagcctcagctcccctcagatgggacagtacggcgatacagattatctcaagtggttgttcccaacttccatgaggagtaatttgtacagaatctgttacagtccatggggccaagagttctctatctgcaattactggcacgacccccatcatgatgatttgtatctcaacgcctcctctttcctggcgctgattaacggggagagggaccaccccaacgccacagtttggcgaaagaactttctgagggtgggccacctggttctcattggcggcccggacgacggggttattaccccttggcaatcgagcttttttggtttctacgacgccaatgagacagtcctggagatggaggagcagctggtttacctaagggacagctttgggctcaaaaccctgctggcaagaggagccatcgtccgctgtcccatggcaggaattagccataccgcatggcactctaacagaacattgtatgaaacttgcatcgagccctggctatcctag

SEQ ID NO: 127747 - DNA, 927 bp, synthetic construct
  misc_feature 1..927: note = Description of Artificial Sequence: Synthetic coding sequence
  source 1..927: mol_type = other DNA
atgaagtcctgtgggtccatgttgggactgtggggacagaggctgccggctgcctgggtgcttcttctgctcccatttcttccactactactgctagcggccccagccccacatagagcatcttacaagcctgtcattgtcgtccacggcttatttgacagctcctactctttcaggcaccttttggaatatattaacgaaacccaccccggaacagtggtcacagtgctcgacctgttcgatggacgcgagagtttacgcccactgtgggaacaggtgcagggcttcagagaggccgttgtgccgatcatggccaaggccccgcaaggcgtccatctaatatgctatagtcagggcggcttggtttgccgagccctgctgagcgttatggacgaccacaacgtggattcttttatttccttgtcaagcccgcaaatgggccagtacggagacacagactacttaaagtggctgttcccgacgtcaatgagaagcaacctgtatcgcatctgttactcaccgtggggccaggaatttagtatctgcaattactggcacgatccacaccatgatgacttgtacctaaatgcttcgagcttccttgctctcatcaacggtgagcgcgaccaccccaatgcgaccgtctggagaaaaaactttctgagagtggggcatcttgtgttgattggaggcccggatgacggagtcatcaccccttggcagagttctttttttggattctatgacgctaatgagaccgtgctagagatggaggagcaactggtgtatctgcgcgacagctttggactgaaaacacttctggcccgcggggcgatcgtgcgatgtccaatggccggtatctcacacaccgcctggcactccaataggactctgtacgaaacatgtattgaaccttggctcagctag

SEQ ID NO: 127748 - DNA, 909 bp, synthetic construct
  misc_feature 1..909: note = Description of Artificial Sequence: Synthetic coding sequence
  source 1..909: mol_type = other DNA
atgttaggcctctgcggccagcgacttccggctgcttgggtcctcttgcttcttccttttctgccattactgcttctggccgctccagcaccccaccgtgcctcttataagcccgttattgtggttcacgggttgtttgatagtagttacagctttaggcacctcttggaatatatcaatgaaacacaccctgggaccgtcgtgacagtgttggatctattcgatgggagggaaagcctccgacccttgtgggagcaggtgcaagggtttcgcgaggccgtggttccaattatggctaaagctcctcaaggagtacacctgatctgctatagccagggagggctcgtctgccgagccttactgtcagtgatggacgaccataatgttgactcctttatcagcttgagcagccctcagatggggcagtatggcgatacagattacttgaaatggctgtttcctacctcgatgaggtccaacctctaccggatctgttattctccctggggccaggagttctccatctgtaattactggcatgatccccaccatgacgatctgtacctgaacgcgagtagtttcctagccctgataaacggcgagcgggatcaccccaatgcaactgtctggcgaaagaacttcctgcgagtgggccacctcgtgctgattggagggccagacgatggagtgatcaccccatggcaaagctctttttttggcttctacgatgccaatgagacggtgctcgaaatggaggagcagctcgtatacttgcgggacagtttcggccttaagacactgctggccagaggggccatcgtcaggtgccccatggccggtattagccacaccgcctggcactcaaaccgcactctgtacgaaacttgcatcgagccgtggctttcctag

SEQ ID NO: 127749 - DNA, 909 bp, synthetic construct
  misc_feature 1..909: note = Description of Artificial Sequence: Synthetic coding sequence
  source 1..909: mol_type = other DNA
atgttaggcctctggggacagcgccttccagcagcgtgggtcctgctcctactcccttttctgcctctcctcctgctggccgcacccgcccctcatcgggaaagctacaagccggttattgtggtccacggtctttttgattctagctactcctttagacacctacttgagtacataaatgagacacaccccggcacagtagtgaccgttcttgacctctttgatggccgtgagtctctcaggcctctctgggaacaggttcaggggtttcgggaggccgtagtaccaataatggccaaggctccgcagggtgtccatcttatctgctatagtcagggtggactggtctgtcgcgccctcctctccgtcatggacgatcataacgtggattccttcattagtctatcctctcctcagatgggacagtatggggacacagattatctgaagtggctgtttccaacgtctatgagatccaacttatatagaatatgctactcaccgtggggacaagagttcagcatttgtaactattggcatgacccccatcatgacgacctctacctcaatgcttccagtttcctggccttaattaacggggagcgtgaccacccgaatgccacggtatggagaaagaattttttgcgagtggggcacctcgtgctgattggcggacccgacgacggggtgatcaccccgtggcagtccagtttctttggcttctacgatgcaaacgagacagtgttagaaatggaggagcagctggtgtacttacgcgacagttttggcctgaagaccctactcgctcgcggcgccatcgtccggtgccctatggcagggatctctcacaccgcatggcacagcaacaggactctctacgaaacatgtattgagccttggttgagctag

SEQ ID NO: 127750 - DNA, 909 bp, synthetic construct
  misc_feature 1..909: note = Description of Artificial Sequence: Synthetic coding sequence
  source 1..909: mol_type = other DNA
atgctggggttgtggggacagagactgcccgccgcctgggtgctcctgctgctgccattcttgcctttgctcctcctggctgcccccgctccccaccgggagtcgtacaagcccgttatagtcgtccacggcttgttcgattcatcctatagcttcagacacctgctggagtacatcaatgaaacccatccaggcacagtggtaaccgtactcgacctatttgatggtcgcgaatcactgcgcccgctctgggaacaggtgcaggggttccgagaagccgtggtgccgattatggcaaaggccccgcagggcgtgcatcttatctgctatagtcagggaggattagtttgtcgagcccttctgtccgtgatggacgaccataatgtggactcctttatctccttgtcctcaccacagatgggtcaatacggcgatacagattacctgaagtggctatttcctacatctatgaggtccaacctataccggatttgttacagtccttggggccaggaatttagcatttgtaactattggcatgatccccatcacgacgacctgtacttaaatgcctcatcatttctggccctaatcaatggagagagagatcaccctaacgccaccgtttggagaaagaactttctccgggtgggccacttggtgcttatcggcggacccgacgatggggttattacaccctggcaaagtagcttctttggcttttatgatgcaaacgaaaccgtgttggaaatggaggaacaacttgtatacctgagggattcttttggcctgaaaaccctcctcgctaggggcgccatagtcaggtgccccatggctggaatctctcacaccgcctggcactctaatcgaaccctgtatgagacttgtatcgaaccatggctctcatag

SEQ ID NO: 127751 - DNA, 909 bp, synthetic construct
  misc_feature 1..909: note = Description of Artificial Sequence: Synthetic coding sequence
  source 1..909: mol_type = other DNA
atgctggggctgtgggggcaaagacttcccgccgcctgggtattgttgctgttaccattcctcccactcctgttactggcggccccagctccccatagagaatcctacaaacccgttatcgtggtccacggcttattcgatagcagttattcattcagacatttgctcgaatatatcaatgaaacgcaccctgggaccgtagttaccgtgcttgacctgtttgacggccgcgaaagtctgcggccgttatgggaacaggtgcagggttttagagaagctgtggtccccattatggctaaagccccacagggcgtgcacctcatttgttattcgcagggcggccttgtgtgtcgcgccctgctcagcgttatggatgaccacaatgtggatagctttattagcctgtcatccccgcagatgggtcagtacggggatacagactatttgaagtggctatttcctactagcatgagatccaacttgtatcgtatttgttattccccatggggacaggaattttcgatttgtaactattggcacgacccccaccatgacgacctttatcttaacgccagctccttcctcgccttgatcaatggcgagagggaccaccctaacgctacagtgtggagaaagaactttctcagggtaggacatttggtgctgatcggtggtccagatgacggggtgatcaccccttggcaatcatcattcttcggattctacgatgctaatgagacagttctggagatggaggagcagctggtgtacctgcgagatagctttgggctgaaaaccctacttgctagaggtgcaattgttcggtgtccaatggccgggatctcccacacagcttggcactctaaccgcaccctctatgagacctgtattgaaccctggcttagttag

SEQ ID NO: 127752 - DNA, 909 bp, synthetic construct
  misc_feature 1..909: note = Description of Artificial Sequence: Synthetic coding sequence
  source 1..909: mol_type = other DNA
atgctcggactatggggacaaaggctccctgccgcatgggtccttttactcctaccgttccttccactactcctgttggcagcccctgcccctcaccgggcctcatataaacctgtaatcgtagtacatggattgtttgacagctcctacagtttccggcatctgctggagtacatcaacgagacacacccagggacagtggtgacagtcctggatctgttcgatgggagagaaagtctgaggcctctgtgggaacaagtacaggggttccgcgaggctgtcgtacccatcatggcgaaagctccccagggtgtgcaccttatctgctattctcagggaggactagtgtgcagggccctgctgtctgtgatggacgatcacaatgtagattccttcatttctttgagtagcccgcagatgggccagtatggagataccgactacttaaaatggctgtttcccacttcgatgcgcagtaatctctatcgtatctgttactcaccctggggtcaggagttcagtatctgcaattactggcatgacccccaccacgatgatttgtatcttaacgcgagtagcttcctcgctctcattaatggagaaagggaccaccccaatgctaccgtttggcggaaaaatttcctccgagtggggcatctggtcttgatcggaggccccgatgacggtgtgattaccccctggcagtcaagtttcttcggattctacgatgcaaatgagacggttcttgagatggaggagcagctcgtgtatctcagggattcctttggtctgaagaccctgctggcgcggggagcaatcgtaagatgccctatggctggcataagccacactgcctggcacagcaacagaacactttacgagacttgcatagaaccctggctatcttag

SEQ ID NO: 127753 - DNA, 909 bp, synthetic construct
  misc_feature 1..909: note = Description of Artificial Sequence: Synthetic coding sequence
  source 1..909: mol_type = other DNA
atgctcggtctgtggggacagcgcctccccgctgcatgggtgctgttacttctccctttcctgcctctgctgctgttggctgctccggccccacatcgcgcctcttacaaaccagtcattgtggttcacggcctgtttgactcctcatactccttccgccacttactggagtatatcaatgaaacccatcccggtacagtggtgactgtgcttgacctctttgacggcagggagtcactgcggcccctctgggagcaggtccaaggattccgggaggctgtggtgcccattatggcaaaagctcctcagggggttcatctgatatgttattcccagggaggtctggtctgtcgcgctttgctaagtgtcatggacgaccacaatgtggatagcttcatcagtctaagtagcccacagatggggcaatatggagacactgattacctcaagtggctgttcccgacctccatgcggtcgaatctgtatagaatctgctactctccatggggccaagagttttcaatctgtaactactggcatgatccccaccatgacgacctctatcttaacgcaagctcattcctggctttaatcaatggcgagcgagatcatccaaacgccacagtgtggcggaaaaactttttacgcgtaggccatctagttctgataggcggcccagatgatggcgttattacaccatggcagtcaagcttctttggcttttacgacgcaaacgagacggtcctagagatggaggagcagctggtgtacctccgcgacagctttggcctaaaaacattgttggccagaggcgcaatagtgagatgtcctatggccggaatcagccacacggcctggcatagcaatcgaacactgtatgaaacctgcatcgagccatggctgagttag

SEQ ID NO: 127754 - DNA, 909 bp, synthetic construct
  misc_feature 1..909: note = Description of Artificial Sequence: Synthetic coding sequence
  source 1..909: mol_type = other DNA
atgctcggcctctggggacagcgccttcctgcagcatgggtgctgctgctgctgccctttctccctttgctgctactggccgcccctgctccacatcgcgcgagttacaagcccgtgatcgtcgtgcatggcctctttgactcctcgtactcgttccggcatctattagagtacatcaacgaaactcacccaggtaccgtcgtaactgtgctagacctctttgacgggagagaaagcctccgcccactttgggagcaggtgcaggggttcagggaagctgtcgttcctatcatggctaaagctcctcagggtgttcacctcatctgttactcgcagggggggctcgtgtgtcgcgccttgctgtccgtaatggacgatcacaatgtggatagctttatctccctctcatctccacagatgggccagtatggcgacaccgattacttgaaatggttgtttcccacttccatgcgctcaaacctttacaggatctgctacagcccatgggggcaggaattttcgatctgtaactattggcacgacccccatcacgacgatttatatctgaatgcttcatctttccttgcgctgattaacggggaacgggaccaccccaacgctaccgtgtggcgaaagaactttctgagagtgggtcatctggtgctaatcgggggccccgatgatggcgtgatcaccccctggcagagttcgtttttcggattttacgatgctaacgagactgtgctcgagatggaagagcagctcgtgtaccttcgggattcttttgggctgaagactctgctagctcggggggccattgtaaggtgtcctatggccggtatctcccacacagcttggcacagtaataggaccctgtacgagacctgcatcgagccctggcttagctag

SEQ ID NO: 127755 - DNA, 927 bp, synthetic construct
  misc_feature 1..927: note = Description of Artificial Sequence: Synthetic coding sequence
  source 1..927: mol_type = other DNA
atgaagagctgcggctcaatgctcggcctgtggggccaaaggctcccagccgcttgggtgctattgttactgccattcttgcctttactgcttctagcagcacctgctccccaccgggcaagttataaacccgtgatcgttgtgcacggactctttgattcttcttactccttccgccaccttctggaatacattaacgagacacatccaggcactgtggtgactgttctcgacctgttcgatggccgggagtctcttcgcccgttatgggagcaggtgcagggttttagggaagccgtggtccctattatggctaaagccccccagggggtgcaccttatctgctattcccagggcggccttgtatgccgagctctcctgtcagttatggacgaccataacgtggatagctttatatcactgtcgtcccctcagatgggacagtacggagacacagattacctgaaatggttgttcccgacttctatgcggagcaacctctaccgcatctgttattcaccatggggccaggagttttccatctgcaactattggcacgaccctcatcacgacgatttatatttaaatgcctcttcctttttagcactgattaacggtgagagagatcaccctaacgctaccgtatggcgaaagaacttcctcagagtgggccatctcgtgctgattggtggacccgacgatggcgttatcacaccctggcagtctagctttttcggcttctacgacgccaacgaaactgtgctggagatggaagagcagctcgtctatttaagagactcattcgggctgaagacacttctcgcgagaggcgcaattgtgcgatgcccaatggcgggcattagccacaccgcctggcacagcaacagaacactgtacgagacttgcatagagccctggctgtcgtag

SEQ ID NO: 127756 - DNA, 282 bp, synthetic construct
  misc_feature 1..282: note = Description of Artificial Sequence: Synthetic coding sequence
  source 1..282: mol_type = other DNA
atgctcgggctgtggggccagaggctgccagctgcatgggtgttgcttttgctcccctttcttccattgctcctgctggccgcgcctgcccctcatcgggccagttacaagcctgtgatcgtcgttcatggtctttttgactcatcttacagtttccgtcatctccttgagtatatcaatgagggggccctgtgtgctggcttgtgcttcctttcttggatgatcacaacttggattttgagcagtccgagtcctctacacagatgggactccatggaatag

SEQ ID NO: 127757 - DNA, 543 bp, synthetic construct
  misc_feature 1..543: note = Description of Artificial Sequence: Synthetic coding sequence
  source 1..543: mol_type = other DNA
atgctcgggctatgtggacagcggctgcctgcagcctgggtgcttctgctcctgccatttcttcctctcctgctgctggcagctcctgctccacatcgtgccagttacaaacctgttatcgtagtccacggtctgttcgattccagttacagcttccgccatttgttggaatacatcaatgaaacgcatccggggactgtggtcactgtgttagatctcttcgacgggagggagtccctgagacccctctgggaacaggtgcaaggatttcgagaggccgtggtccccattatggcgaaggccccacagggcgttcatctcatctgttatagccagggtggcctggtgtgcagggctttactatccgttatggacgaccataacgttgactctttcatttccttgtccagtccacaaatgggccagtacggggatacagattatctcaagtggctcttccctacatccatgcgttctaatctgtatcggatctgttactccccttggggacaggaatttagtatttgtaactattggcactag

SEQ ID NO: 127758 - DNA, 927 bp, synthetic construct
  misc_feature 1..927: note = Description of Artificial Sequence: Synthetic coding sequence
  source 1..927: mol_type = other DNA
atgaagagctgtggcagcatgctcggtctgtgggggcagaggctgccggccgcttgggtgcttctcctcctgccctttctccctctgctattgctagccgccccggctccccatcgcgccagttacaagcctgtgatagtcgtacacggtctctttgatagctcgtattctttccgccatcttctagaatacatcaatgagacacaccccgggacagtggtgaccgtgctcgatcttttcgatgggcgcgaaagcttgcgaccactctgggagcaggtgcagggatttagagaagcagtagtgcctataatggccaaagccccgcagggagtgcacctgatctgctatagccagggtggcctagtctgccgggccctgctttctgtgatggatgaccacaatgttgacagctttatttcactgtcttcaccccagatgggacaatatggggacaccgactacttgaagtggctgtttcctacctctatgagatccaacctgtatagaatttgctatagtccctggggtcaggagttcagcatttgcaattattggcacgacccacaccatgatgacctgtacttaaacgcttcttccttcttggccctcattaacggcgaaagagaccatcccaatgcaactgtatggcggaagaatttcttgcgtgtgggccacctagtattaatcggagggccggacgacggcgttatcacaccttggcagtcctcttttttcggcttctacgacgcaaatgagactgtgttggagatggaagaacagttagtctacttgcgggactcgtttgggttgaaaacactcctggcccgtggggctatagtgaggtgtccaatggccggtatctctcacacagcttggcattctaatcgcacactgtacgaaacttgcatagagccctggcttagctag

SEQ ID NO: 127759 - DNA, 603 bp, synthetic construct
  misc_feature 1..603: note = Description of Artificial Sequence: Synthetic coding sequence
  source 1..603: mol_type = other DNA
atgctcggcctctggggacagagactccctgcagcctgggtgctcctgctgctgccattcctgccgctcctgctgctagcagcccccgcaccacatcgtgagtcatacaagcctgtgatcgtagtgcacggcctgtttgattcaagttattcttttaggcatctgctggaatatatcaatgagactcacccaggtaccgtcgtgaccgtactcgacctgttcgacggcagggaaagtcttcgacccttgtgggagcaggtccaggggttcagagaggctgttgttcccattatggccaaggctccacagggagtgcacctgatatgttactctcagggtggccttgtgtgtcgagctctcctatctgtcatggacgatcataatgtggattctttcattagcctttctagcccacagatggggcaatacggagatacggactatctcaaatggctcttccccacatctatgcgaagcaacttataccgcatctgctactcaccatggggccaagaattctccatatgcaattactggcatgacccgcaccacgatgatctgtatttgaatgcctcttccttcctggctctaatcaacggatag

SEQ ID NO: 127760 - DNA, 477 bp, synthetic construct
  misc_feature 1..477: note = Description of Artificial Sequence: Synthetic coding sequence
  source 1..477: mol_type = other DNA
atgcttgggctttggggacagcggctgcctgctgcatgggtgcttttactgctgccctttctccccctactgcttttagccgccccagcgccccaccgcgagtcctacaagcccgtcattgtcgtgcatgggctgttcgactcttcatatagcttccgccatttgttagaatatatcaatgaaatgggccagtatggggacaccgattaccttaagtggctgttccctacctccatgaggagtaatttataccgtatttgttatagcccatggggtcaggagtttagcatttgtaattactggcatgatcctcatcacgacgacctgtatttaaatgctagctcattcctcgccctcatcaatggagagcgtgaccatcccaacgcaacagtctggaggaaaaattttttgcgggttggccatctcgtcctgataggtggcccagatgatggagtgatcactccatggcagagttag

SEQ ID NO: 127761 - DNA, 543 bp, synthetic construct
  misc_feature 1..543: note = Description of Artificial Sequence: Synthetic coding sequence
  source 1..543: mol_type = other DNA
atgcttgggctctgggggcaacggctgcctgccgcctgggtcctcctgctgctgccgtttttgcctctcctcctgctggccgcccccgccccacacagggcctcttacaagcctgtgatcgtggtacacggtttgttcgattctagctacagcttccggcacctgctggaatacattaatgaaacgcacccagggacagtggttaccgtactggatctgttcgatggccgggaatctctgcgacctctgtgggagcaggtccaggggttcagggaggccgttgtacccatcatggctaaggctccacagggcgtccacctcatttgttactcccagggcggcttagtatgcagagccttgttaagcgtaatggacgatcacaacgtcgattccttcatctcactgagctcaccccagatgggtcagtacggagacacagattacttgaaatggctctttcccacgagcatgaggagcaacctgtatcgaatttgctatagcccctgggggcaggagtttagcatctgcaactattggcactag

SEQ ID NO: 127762 - DNA, 477 bp, synthetic construct
  misc_feature 1..477: note = Description of Artificial Sequence: Synthetic coding sequence
  source 1..477: mol_type = other DNA
atgctcggcctttggggccagaggctccctgccgcgtgggtgctgctgctcttgcctttcctgcctctgctcttacttgcagcacccgcaccccatagagcttcttataagcccgtgatcgtggtgcacggcttgttcgatagttcttacagcttccgccacctcttggagtacattaatgaaatggggcagtatggcgataccgactatctcaaatggctttttccaacttccatgcgctccaatctatataggatatgctatagcccgtggggccaggagttcagcatttgcaactattggcacgacccccatcacgacgatctctatcttaacgcaagctcatttttggccttaattaatggagagagagatcatcctaacgctacagtgtggcggaagaactttctgcgggttggtcatctggtgcttatcggcgggcccgacgacggcgtgattaccccatggcagtcatag

SEQ ID NO: 127763 - DNA, 543 bp, synthetic construct
  misc_feature 1..543: note = Description of Artificial Sequence: Synthetic coding sequence
  source 1..543: mol_type = other DNA
atgttagggctctggggccagcgtctacccgcagcgtgggttttgttgctcctacccttcttacctctcctgctcttggcagccccagctcctcacagggctagctataaaccagtgatcgtcgtacacggcttgtttgatagttcctacagctttcggcatttactcgaatacatcaacgaaactcaccccggcacagtcgtgaccgtcctggacctgttcgacggccgggaatccttgaggccgctctgggagcaagtgcagggcttccgggaggccgtcgttcccattatggcgaaggccccccagggcgtgcatctaatctgttacagtcaggggggattagtctgtagggcactgctctctgtgatggacgaccacaacgtagacagctttatctccctgtcttctccccaaatgggccagtacggggatacggactatctaaagtggctgttcccaacgtccatgagatctaatttgtaccgtatctgttattccccatggggccaggaattttctatctgcaactattggcattag

SEQ ID NO: 127764 - DNA, 909 bp, synthetic construct
  misc_feature 1..909: note = Description of Artificial Sequence: Synthetic coding sequence
  source 1..909: mol_type = other DNA
atgctgggcctgtggggccaacgccttccagctgcatgggttctcctactgctcccattcctcccactgcttctcctggccgcacccgccccgcacagagcctcctacaagcctgtcatcgtagtgcacgggctgttcgatagtagctatagtttcaggcatctcctggaatacataaatgaaacccaccctggcacagttgtgactgtccttgacctcttcgatgggcgcgagagccttcgcccgctttgggaacaggttcagggattcagagaggctgtggtgccgattatggcgaaggcacctcagggtgtccaccttatttgttatagtcagggaggcctcgtgtgtcgagccctgcttagcgtgatggacgatcacaatgtagattcattcatctccttgagttccccacaaatgggacagtatggcgatacggactacctgaagtggctgttcccaacgagcatgcggagtaacttgtataggatctgttacagcccctgggggcaggagttctccatttgcaactactggcatgacccccatcatgacgatttgtacctcaacgcctcaagcttccttgcgttgattaatggggagagggaccatccaaatgcgacagtatggcgaaagaattttctgagagtggggcacctggtcctgattggaggacctgatgacggtgtgatcactccctggcagtccagcttttttggcttctacgacgcgaatgagacagttcttgaaatggaagagcagctagtgtaccttagagacagcttcggcctcaagacacttctcgcacggggcgcaattgttcggtgccccatggctggcatctctcacacagcatggcattctaataggaccttgtatgagacatgcattgaaccatggctcagctag

SEQ ID NO: 127765 - DNA, 909 bp, synthetic construct
  misc_feature 1..909: note = Description of Artificial Sequence: Synthetic coding sequence
  source 1..909: mol_type = other DNA
atgctgggtctatgggggcagcgattgcccgcagcctgggtccttctgctgctgcctttccttcccctgttgttgctggctgcacctgccccacatcgagcttcctacaagccggtgatcgtagtgcacggtttgttcgattcctcatacagcttccgacatctgctagagtacataaatgagacccatccaggcacggttgtcacagtccttgatctattcgacggtagagaaagcctccgacctctgtgggagcaggtgcagggcttcagagaggctgtcgtgcccattatggcgaaggcaccacagggtgtccacctcatatgctactctcaaggaggcttggtgtgcagagccctgctttccgtgatggacgatcacaatgtggacagtttcatctccctgagcagcccccagatggggcaatatggcgacacagactacctgaagtggttattccccacatctatgagatcaaacctgtacagaatctgttactcaccctggggtcaggaattttcaatctgtaattattggcatgacccacaccacgatgatttgtatcttaacgcctccagcttccttgcactaatcaatggcgaacgcgatcacccaaatgcgactgtgtggcgcaagaacttcctccgcgtagggcacttagttctgattggcggtcctgacgacggagtgatcacaccatggcaaagttcatttttcggattctatgatgccaatgaaaccgtgttggaaatggaagaacaacttgtctaccttcgagatagttttggactaaagaccctcctcgcacgaggtgcaatcgtgcggtgtcccatggccgggatcagccacaccgcttggcattccaatcgaaccctgtacgagacatgcattgagccatggctgagttag

SEQ ID NO: 127766 - DNA, 927 bp, synthetic construct
  misc_feature 1..927: note = Description of Artificial Sequence: Synthetic coding sequence
  source 1..927: mol_type = other DNA
atgaaatcatgtgggagtatgctcgggctgtggggccaacgcctcccagcggcgtgggtcttgctgcttctccccttcttgcctcttctgctcctggccgcaccagcccctcacagagcgagttacaagccagtcatagtggttcacgggctctttgactcctcatacagctttcggcatctgttggagtacattaacgagacccaccccggtaccgtcgtcacagttctcgatctgttcgatggtcgagaatcacttcgccctctatgggagcaggtccagggctttcgggaagccgtcgttcccataatggctaaggccccacagggcgtgcacttgatttgttatagtcaaggtggcttagtgtgcagggcgctactttccgtgatggatgaccacaatgtggacagctttatcagtctcagttccccgcaaatgggccagtacggagatacagactacctgaagtggttgtttcccaccagtatgcgctctaacctgtaccgaatctgttattctccttgggggcaggagttttccatttgcaattattggcatgatccccatcacgatgatctctacctgaacgcctccagttttctggctttgattaatggtgagagagatcacccaaatgcgactgtgtggaggaaaaattttctacgagttggccacctagtgctcatcggtggccccgacgatggtgtgattaccccatggcaaagctcgttttttggcttctatgatgcaaatgagaccgtgctggagatggaagaacagctggtgtacctcagggattcctttggactgaagactcttctggcccgcggtgctattgtgcgatgtccaatggccggtatttctcacacagcctggcatagcaacaggacactctacgaaacttgcatagagccctggttatcctag

SEQ ID NO: 127767 - DNA, 282 bp, synthetic construct
  misc_feature 1..282: note = Description of Artificial Sequence: Synthetic coding sequence
  source 1..282: mol_type = other DNA
atgctgggtctgtggggccagcgtcttcctgctgcatgggtgcttttgcttctcccattcctgccccttctattgctggcagcgcctgcccctcatagagccagctataaacctgtcattgtggtgcacggcctcttcgattccagctactccttccggcatcttttagaatatattaacgaaggggccttgtgtgccggcctgtgcttcctgagctggatgatcacgacttggatcctctcctcacccagcccactccacaggtgggactctatggagtag

SEQ ID NO: 127768 - DNA, 909 bp, synthetic construct
  misc_feature 1..909: note = Description of Artificial Sequence: Synthetic coding sequence
  source 1..909: mol_type = other DNA
atgctgggcctctgggggcaaaggctccctgccgcctgggtcctccttttattgccttttttgccactgttgctgctcgccgcacctgcaccccaccgggcttcatacaaaccagtgattgttgtgcacgggctctttgatagctcctactcatttcgccatcttctggagtatattaatgagacccaccctggcactgtcgtaaccgttttagacttgtttgacgggcgtgagtcactccgacctctctgggagcaggtgcaagggttccgagaagctgtcgtacctatcatggcgaaggctccccaaggggtacacttaatatgctactctcagggcggtctggtttgccgcgctcttctctctgttatggatgaccacaatgtggactctttcatttccttgtcgtcccctcaaatgggccagtacggggacaccgactacctaaagtggttgtttccaacctcgatgaggtcaaatctgtacagaatctgttattctccatggggacaggagtttagtatttgcaactattggcacgatccccaccacgatgatctctatctgaatgcgtcaagtttcttggctctgatcaatggcgagcgagaccatccgaatgcaaccgtgtggcgtaaaaacttcctcagggtcggtcatctggtccttatcggcggtccagatgacggtgttatcacaccttggcagtcttctttttttgggttttacgatgccaacgaaaccgtgctcgagatggaagagcagctggtctacttacgggactctttcggattaaaaacactactggctcggggcgcaatcgtcagatgccctatggccgggattagtcacacagcctggcacagcaatagaaccctgtatgaaacttgcattgagccatggctgtcctag

SEQ ID NO: 127769 - DNA, 477 bp, synthetic construct
  misc_feature 1..477: note = Description of Artificial Sequence: Synthetic coding sequence
  source 1..477: mol_type = other DNA
atgctcgggttgtgcggacagcgtctgcctgctgcttgggtgctcctactcctaccatttctccctctgctgctgctagccgccccagcccctcatagggcgtcttacaaacccgtgatcgtggtgcacggtctatttgacagctcttatagctttcgtcatctgctcgagtacataaatgagatggggcagtatggcgacacagattacctcaagtggttatttcccacttctatgcggagcaacctttacagaatttgttactcaccttgggggcaggaattttcgatctgtaactactggcacgaccctcaccacgacgacttgtacctcaatgccagcagctttctcgcattgatcaacggagaaagagaccatcctaacgccaccgtgtggcgcaagaatttcctgcgggtaggccatcttgtattaatcggagggcctgatgatggtgtgatcaccccctggcagtcctag

SEQ ID NO: 127770 - DNA, 711 bp, synthetic construct
  misc_feature 1..711: note = Description of Artificial Sequence: Synthetic coding sequence
  source 1..711: mol_type = other DNA
atgcttggtctttggggccagagactcccagctgcctgggttctcctgctgcttccattcctacccctgctgctactagcggcaccagcccctcacagggaaagttacaaaccagtgattgtcgtgcatgggctcttcgactcctcttacagcttccgtcaccttttagagtatattaacgaaacacatcccgggactgtcgttactgtactggacttgtttgacggacgtgaatctttgcgccctttatgggagcaggttcagggattccgcgaggccgtagtgccaataatggctaaagctccacaaggggttcacctcatttgttactcacaaggaggacttgtgtgcagggctttactcagtgtgatggatgaccataacgtcgactcattcatatccctgagttcaccccaaatggggcagtacggcgataccgattatctgaagtggctcttcccaacgagtatgcgctcaaatctctaccggatctgttacagcccctggggacaggaattcagcatctgcaactactggcacgaccctcaccatgatgacttatatctgaacgccagctcattcctcgctctgattaacggtgagcgcgaccaccctaatgccaccgtttggcgtaagaactttctgcgagtgggccacctcgtacttattggcggcccagatgacggagtcataacaccttggcagtcatag

SEQ ID NO: 127771 - DNA, 543 bp, synthetic construct
  misc_feature 1..543: note = Description of Artificial Sequence: Synthetic coding sequence
  source 1..543: mol_type = other DNA
atgctgggtctctgggggcagcgtctgcccgccgcgtgggtcctgctgctgctcccattcttacccctgctgctgctggcggctcccgcaccacacagagcaagctacaaaccggttatagtagtacacggtctgtttgatagctcctattcattccgtcatctactggagtatatcaatgagacacatccagggacagttgttacggtattagatctgtttgacgggagagagagtttgcgcccgctttgggaacaagttcagggattcagggaggccgtggtgcccattatggccaaggctccacagggggtccacctgatttgctattcccaaggaggtctcgtgtgcagagccctcctgtctgtgatggacgaccacaacgtagattccttcatctctcttagctcaccccaaatgggccagtatggcgacacagactacctgaagtggctatttcctacaagcatgcggagcaatctgtacaggatctgttactcaccatgggggcaagaattctcgatttgcaactactggcattag

SEQ ID NO: 127772 - DNA, 711 bp, synthetic construct
  misc_feature 1..711: note = Description of Artificial Sequence: Synthetic coding sequence
  source 1..711: mol_type = other DNA
atgctcggcttgtggggacagagactacccgcagcctgggtactgttactgcttccattcctgccccttcttcttttagctgcacccgcacctcaccgcgagtcctacaagccagtcattgtcgtgcatgggctgtttgatagctcttattcttttcggcacctgctggaatacatcaatgagacccatcctggcactgtcgtcactgtcctcgacctattcgatggcagggaatcgctcaggccattgtgggaacaggtccaaggttttagagaggctgttgtgccgatcatggccaaagccccacagggcgttcacctgatttgctactctcagggcgggctggtgtgtagagccctgctgagcgtgatggatgatcacaatgtggacagtttcatctcactcagttcaccacaaatgggccagtacggagataccgattacctgaagtggctgttcccaacatccatgcggtcaaacctatatcggatctgttatagcccatgggggcaggagttctctatctgcaactactggcacgatcctcaccacgatgacctttacctgaatgcttcctccttcctggccctaatcaatggcgagagagatcaccccaacgccacagtgtggcggaagaactttctacgggttggacacttagtactcatagggggacccgatgatggtgtcattactccctggcagagttag

SEQ ID NO: 127773 - DNA, 603 bp, synthetic construct
  misc_feature 1..603: note = Description of Artificial Sequence: Synthetic coding sequence
  source 1..603: mol_type = other DNA
atgctcggattatggggccagaggctgcctgcagcctgggtcttgctgctactgcctttcctgcctctgctgctgctggctgcccctgccccacacagagctagctataaacccgttatcgtggtccatggcctgttcgatagctcctactcttttaggcaccttctggaatacataaacgagacacaccccggtacggtggtgacagtactcgacctatttgacgggcgcgaaagcctgagaccactctgggagcaggtgcaagggttccgcgaggccgttgtgccgattatggccaaagcacctcagggggtccacctgatctgttacagtcaaggcggtctggtctgccgggctctgctaagcgttatggatgatcataatgtcgatagctttatcagcttgtcctccccccagatgggtcagtatggtgatacggactacctaaagtggctgttcccaaccagtatgcgctctaacctatacaggatttgttatagtccgtggggacaggaatttagcatttgcaattattggcatgaccctcaccatgacgacctgtacctgaacgcttcttcctttctggctcttattaacgggtag

SEQ ID NO: 127774 - DNA, 909 bp, synthetic construct
  misc_feature 1..909: note = Description of Artificial Sequence: Synthetic coding sequence
  source 1..909: mol_type = other DNA
atgttgggcctctggggccagcgccttcctgcagcttgggtgctgctgttgttaccctttttgccgttactgttgctcgcggcccctgcccctcaccgcgcttcttataagccagtcattgtggtacacggcttattcgattcaagctactccttccgtcatctgttggagtacattaacgagactcaccccgggacagtcgtgacagtcctggaccttttcgacgggagagaaagtttgaggcccctgtgggagcaggtgcagggattcagagaggccgtggtcccaattatggccaaggctcctcagggggtgcacctgatctgttactcccagggcgggttggtatgtcgggcccttttatctgtgatggatgaccacaacgtcgattcatttatttccctatcctcgccgcagatgggacagtatggagataccgattatctgaaatggcttttccccacctcaatgcgttctaacctgtatcggatctgttattccccctggggtcaggaatttagtatctgcaattactggcacgatcctcaccacgatgatctttatctaaacgcttcatcttttctggcactgattaacggagagcgagaccaccctaacgccactgtctggcgcaaaaatttcttgagagtgggacacttagtgctaatcggcggacctgacgacggcgtcatcacgccctggcaatcctcattctttggcttttatgacgcaaatgagaccgtgcttgagatggaggagcagctcgtgtacctgagagattcgttcggactgaagacactgttagcgcgcggcgcaatcgtgcggtgccctatggccggtatttcccacacagcatggcactccaaccgtaccctttacgagacttgcattgagccttggcttagttag

SEQ ID NO: 127775 - DNA, 603 bp, synthetic construct
  misc_feature 1..603: note = Description of Artificial Sequence: Synthetic coding sequence
  source 1..603: mol_type = other DNA
atgcttggactctggggccagcggcttcctgccgcatgggtgttactcctactgccctttctcccactcctcttgctggctgctcccgcccctcaccgagcctcttacaagcctgtgattgttgtgcacggtctcttcgacagttcgtattccttccgccacttactagagtacatcaatgagactcaccctggcacagtggttacagttctcgacctgttcgacggaagggagagtctgcggcccctttgggagcaagttcaggggttccgtgaagccgtcgtacccatcatggccaaagccccccagggcgtgcacctgatttgctatagccaggggggactggtctgcagggcactgttgtccgtgatggatgaccacaacgtcgactccttcattagtttatcttcaccccagatgggacaatatggcgacaccgactacctcaaatggctctttcccactagcatgaggtctaacctctaccgcatttgttactctccttggggccaggaattttctatatgtaactactggcacgacccccaccatgacgatctgtatttaaatgcatcttcatttttggccttaatcaacgggtag

SEQ ID NO: 127776 - DNA, 729 bp, synthetic construct
  misc_feature 1..729: note = Description of Artificial Sequence: Synthetic coding sequence
  source 1..729: mol_type = other DNA
atgaagagttgtggctctatgctcggcttatgggggcagcggctacccgccgcctgggtactcctcctgttgcctttcctgccccttctgctccttgctgcccctgcacctcatcgggaaagctacaagcccgtcattgtggtgcacggcctgttcgacagttcttattctttccggcacttactggagtacatcaacgaaacccaccccggcactgtggttactgtcttggacttattcgatggacgtgaaagtcttcggcctctgtgggagcaggttcagggcttcagggaggctgtggtccccattatggccaaggcccctcagggagtgcaccttatatgctattctcaaggcggcctagtatgtcgtgccttgctttcggtgatggatgatcacaacgtcgactcttttatctccctgagctcacctcagatgggtcagtacggtgacactgattatctcaagtggctgtttcccactagtatgcggtcaaacctgtaccgcatttgctactccccttggggacaggagttcagcatctgtaactactggcatgatccacatcacgacgacctgtatctcaacgccagctccttcctggccctgattaatggggaacgcgatcatcccaatgctactgtttggaggaagaacttcctgagagtggggcaccttgtgctgattggcgggcccgacgatggcgtaatcaccccatggcagtcttag

SEQ ID NO: 127777 - DNA, 711 bp, synthetic construct
  misc_feature 1..711: note = Description of Artificial Sequence: Synthetic coding sequence
  source 1..711: mol_type = other DNA
atgttgggcctctgggggcagagacttcccgctgcatgggtcctactccttctgcctttcctgcctctgctgcttctagctgctccagcccctcaccgcgagtcttataagcctgtgattgtcgtgcatggcctatttgacagcagctattcctttagacatctcttggaatatatcaacgagacacaccccggcaccgttgtgacagtgcttgacctttttgatggccgtgagtccttgcgccctctctgggaacaggttcaaggctttagagaagccgttgtccctatcatggctaaggccccacagggcgtccacctgatctgttactcgcaggggggactggtgtgcagagccctactgtctgtgatggacgaccataacgttgacagttttatctccttgagtagtccccaaatgggacaatacggtgatactgactacctgaaatggctgtttcctacttccatgcgttccaacttataccggatctgttactcgccatggggacaagagttctccatttgcaactattggcacgacccccatcacgatgatctttaccttaatgcctcatcctttttggccctaattaacggagaacgcgaccatcccaatgccaccgtttggaggaaaaatttcttacgggtgggccacctcgtgctgattggcggccctgacgatggtgtaatcacgccgtggcagagttag

SEQ ID NO: 127778 - DNA, 543 bp, synthetic construct
  misc_feature 1..543: note = Description of Artificial Sequence: Synthetic coding sequence
  source 1..543: mol_type = other DNA
atgttggggctttggggacagagactccccgccgcctgggtccttctccttctacccttcctgcctctgctcctgctggccgccccagcccctcatcgggcttcctataagccagtgatagtggttcatggactcttcgactctagctacagttttagacatttacttgagtatattaatgagacacaccccggcacagtggtcactgttctggatttattcgacggcagagagtccctcagacctttgtgggaacaggtccagggctttcgggaagcagtggtgccgattatggcgaaagcccctcagggggtgcacctgatctgctactcgcagggagggctcgtgtgccgcgcactgctgagcgtgatggacgatcataatgtcgattccttcataagcctgtcaagtccccagatgggccagtatggcgatactgattacctgaaatggcttttccccacatctatgcggagcaatctgtacaggatttgctattccccatggggtcaagagttttcgatttgcaactactggcactag

SEQ ID NO: 127779 - DNA, 477 bp, synthetic construct
  misc_feature 1..477: note = Description of Artificial Sequence: Synthetic coding sequence
  source 1..477: mol_type = other DNA
atgctggggctgtggggccagaggttgccagccgcatgggttctactccttcttccctttctgcccctgttgctgctggccgccccggcccctcatcgcgctagctataaaccagttattgttgtacatgggctgtttgatagcagctattccttccggcatctgcttgagtatatcaatgagatgggacaatacggtgacacggactatcttaaatggctatttccgacatcaatgcgtagtaacctgtataggatctgttatagcccatggggccaggagttcagcatttgcaactactggcatgacccccatcatgacgacctctaccttaatgcttctagcttcctggcactcatcaacggcgaaagagaccaccccaatgcaacagtgtggcgcaagaattttttgcgagtgggacacctggtcttgattggcggtcccgacgatggggtaatcactccttggcagagttag

SEQ ID NO: 127780 - DNA, 603 bp, synthetic construct
  misc_feature 1..603: note = Description of Artificial Sequence: Synthetic coding sequence
  source 1..603: mol_type = other DNA
atgctcggcctgtggggccaacggttgcccgctgcgtgggtactgctacttctgcctttcttaccactcctgctgctggctgcccctgcacctcaccgagagtcgtacaagcctgtgatcgtggtccacggtctcttcgattctagctacagcttccgccatctcctagaatacattaatgagacacaccccggaacagttgtcacggtgctggacttatttgatggcagggagtccttaaggcccctctgggaacaagtacaggggtttcgagaggccgtcgtgccaattatggctaaggctcctcagggcgtccatttgatctgctactctcagggaggtctggtatgtcgtgctcttctttctgttatggacgaccacaatgtcgactcgttcatatccctatcatctccccagatgggacagtatggcgacacagactatctgaaatggttgttcccaacatcaatgagatctaatttatatcgcatttgctattccccttggggacaggagtttagtatctgcaactactggcacgatccgcaccatgacgatctttacctgaatgctagtagcttccttgcattgatcaacggctag

SEQ ID NO: 127781 - DNA, 603 bp, synthetic construct
  misc_feature 1..603: note = Description of Artificial Sequence: Synthetic coding sequence
  source 1..603: mol_type = other DNA
atgctgggactttgcggccagaggctgcctgcggcttgggtcttgctgctattgccgtttctcccattacttctgcttgcagcccctgctccacaccgtgcaagctacaaacccgtgattgtagtgcatggcctctttgatagttcatattcatttaggcacctcttggaatatataaatgagacgcacccaggaacagtggtgaccgtgctggaccttttcgacgggagagaaagtctgcggcctttgtgggagcaggtacaaggattcagagaagccgtggtcccgattatggctaaggccccacagggagtgcacttaatttgttacagccagggcggactcgtgtgcagggcactgctctccgtaatggacgaccacaacgtggactcatttatcagcctgagtagcccacagatgggccaatacggagatactgactatctcaaatggctattcccaacctccatgcggagcaacttgtatagaatctgttatagtccgtggggacaggaattttcaatttgcaactactggcacgaccctcaccacgacgacttatatctgaatgcttctagtttcctggccctcataaatgggtag

SEQ ID NO: 127782 - DNA, 441 bp, synthetic construct
  misc_feature 1..441: note = Description of Artificial Sequence: Synthetic coding sequence
  source 1..441: mol_type = other DNA
atggatgatcataacgttgacagctttattagcctgtccagtccccagatgggacagtatggcgacacagactatctgaaatggctttttccgacctctatgcggtctaacctgtatagaatttgttactcaccttggggccaggaattttctatttgcaactactggcatgatcctcaccacgacgacttgtatctcaacgcctccagtttccttgccctgattaatggcgagcgtgatcatcccaatgcaaccgtttggaggaagaattttctgagagtgggtcacttggtgctgataggcggccccgacgatggcgtgattacaccctggcagtcctccttcttcggcttctatgatgcaaacgagactgtgctcgaaatggaagagcagcttcctgtcggctcctcagtaaaagctaatcatggtgtccagggctag

SEQ ID NO: 127783 - DNA, 477 bp, synthetic construct
  misc_feature 1..477: note = Description of Artificial Sequence: Synthetic coding sequence
  source 1..477: mol_type = other DNA
atgctgggcttgtggggtcagcgcctccccgcggcctgggtgttgctgctgttaccttttctgcccctcttgctgctggcagccccagccccgcaccgcgcaagctacaaaccagttatcgtggttcacggcctgtttgatagcagctattccttccgccatcttctcgagtatatcaacgagatgggccagtatggcgacactgattacctaaagtggttgtttcctacctcaatgaggtccaacctgtatcgaatctgttatagtccatggggccaggagttttctatttgcaactactggcacgacccgcaccacgacgatctgtacctgaatgccagtagtttcctggccctcatcaacggcgaacgggatcaccctaatgctaccgtgtggaggaagaattttctccgggtgggccacctggtgctcatcggcgggccagatgatggcgtgatcaccccctggcagtcttag

SEQ ID NO: 127784 - DNA, 909 bp, synthetic construct
  misc_feature 1..909: note = Description of Artificial Sequence: Synthetic coding sequence
  source 1..909: mol_type = other DNA
atgctgggattatggggacagcgcctgcctgccgcctgggtcttactccttctgccttttcttccgttattgctcctagctgcccctgcgccccacagggctagctataagcctgtaatcgttgtgcatggtctgtttgatagttcttacagtttccggcacctgcttgaatacattaatgaaacacaccccggcacagtcgtcacagtcctggacctgtttgacgggagggagtcacttagaccactgtgggaacaagttcaggggtttcgggaggctgtcgtccctatcatggctaaagccccacagggggtccatctcatttgttactcgcaaggcggactagtttgtagggcactgctgtcagtgatggacgatcacaacgtcgattccttcattagcctgtccagccctcaaatgggccagtacggagataccgactacctcaagtggctgtttccgaccagcatgcgcagtaacctctacaggatttgctattccccatggggacaggagttttccatctgtaattactggcacgacccacaccacgatgacctgtacttgaacgccagttcattcttagctttaattaatggggagcgagaccacccgaacgctactgtgtggaggaaaaattttctcagggtggggcatctggttctgattggtggccctgatgatggagtgattactccttggcagagctcgttcttcggcttctacgatgcaaacgagacagttttagaaatggaggagcagctcgtttatttacgcgacagttttggcctgaaaactttgctggctaggggtgcaattgttaggtgcccaatggcaggtataagccatacggcctggcattccaaccgtacactctacgaaacctgcatcgagccctggctgtcttag

SEQ ID NO: 127785 - DNA, 909 bp, synthetic construct
  misc_feature 1..909: note = Description of Artificial Sequence: Synthetic coding sequence
  source 1..909: mol_type = other DNA
atgcttggcctttgggggcagagattacctgccgcgtgggtacttctactcctaccgtttctgccccttctcttgctcgccgctccggcccctcaccgggcttcctacaagccggtcattgtagtgcacggactgtttgattccagctactctttccgacatctccttgaatatatcaacgaaacacaccccgggactgtcgttacggtcctggatctttttgatggtagggaatcactcaggccactgtgggagcaggtccagggtttccgggaagcagtcgtgccaatcatggccaaggcaccgcaaggagtccacttgatttgttacagtcagggcggtctggtatgcagggctcttctgagcgtgatggacgaccataacgtggacagtttcatcagcctgtccagtccacaaatgggccaatatggtgatacagattatctcaaatggctgtttcccacatctatgaggtccaatttgtatagaatatgctattccccttgggggcaggagtttagcatttgcaactactggcacgatccccatcatgacgatttgtatctcaatgccagcagtttcctggccctgattaacggggagagggaccaccccaatgccacagtgtggcgaaaaaactttctcagggtcggccacctggtactgatcggcggacccgatgacggcgttataacgccttggcagtcatcttttttcggtttctacgacgccaatgaaaccgtgcttgaaatggaagaacagctggtgtacttacgcgatagctttgggttaaaaactctactcgctcggggcgccatcgtccggtgtcccatggctggcatttctcacactgcatggcacagcaaccggactctatacgaaacctgcatagaaccttggctgagttag

SEQ ID NO: 127786 - DNA, 909 bp, synthetic construct
  misc_feature 1..909: note = Description of Artificial Sequence: Synthetic coding sequence
  source 1..909: mol_type = other DNA
atgctaggtctctggggtcagcgactgccagctgcttgggtgctgctcctgctgccattcctccccctcctcctcctagccgctcccgcccctcacagagcctcctacaaacctgtcattgtagtacatggtctctttgacagcagctactccttccgacatctgctagagtatattaatgagactcaccctggtacagtcgtgacagtcctcgacctctttgacggaagggagtctctgcgcccattatgggaacaggtacagggcttcagggaggccgtggtcccaatcatggctaaagctcctcagggagttcatctgatctgctattcgcaaggtggcctcgtttgtagagcgctccttagcgtcatggatgaccataatgtggattctttcatctcactatcaagtccacagatggggcaatacggcgacaccgactatctcaagtggctctttcctacctccatgcggagcaacctttacaggatttgttacagtccctggggccaggaattttccatttgcaattactggcatgatccacaccatgatgatctgtacttaaacgcctcttcattcctggcattgatcaatggtgaacgggatcaccctaacgccaccgtgtggcggaaaaatttcttgagggttggccacctagtgctgatcgggggccccgacgacggcgtcattaccccatggcagtcatcattcttcgggttttacgatgcaaatgagactgtgctcgagatggaggagcagctggtttacctgcgtgacagttttggccttaaaaccctgttggcccgaggcgccatcgtgagatgccctatggctgggatcagtcataccgcatggcactctaaccgcaccctctatgagacttgtattgagccatggctgagttag

SEQ ID NO: 127787 - DNA, 282 bp, synthetic construct
  misc_feature 1..282: note = Description of Artificial Sequence: Synthetic coding sequence
  source 1..282: mol_type = other DNA
atgctcggactgtggggtcagcgcctgccggccgcctgggtccttctcttgctgcccttcctgccgctcctgctgctcgctgctcccgcgccacatcgtgagagctacaagcccgtaattgtggtgcatggactttttgacagctcgtactcctttcgacacctgctggagtacatcaacgaaggcgcgctctgtgccggtctgtgtttcctgagctggatgatcacaacatggattctctccagtccttctccgctgcacaggtgggattctatggaatag

SEQ ID NO: 127788 - DNA, 603 bp, synthetic construct
  misc_feature 1..603: note = Description of Artificial Sequence: Synthetic coding sequence
  source 1..603: mol_type = other DNA
atgctagggctctggggacagagattgccggctgcatgggtgcttttactgctgcccttcctgccgttacttctgcttgccgcccccgccccacaccgggcgtcgtacaaacctgtgattgtggtgcatggactgtttgactctagctacagttttagacatttgctggagtatattaatgaaacccaccctgggaccgtggtgacggtcctggatcttttcgatggtcgagaaagcttgcggcctctgtgggaacaggtccagggcttccgggaggctgttgtgcccattatggccaaagcaccccagggggttcatctaatctgctactcgcaaggcgggttggtgtgcagggcgctcctcagtgtcatggacgaccacaacgttgatagtttcatctccctgtctagcccccagatgggccagtacggtgacactgattacctgaaatggctgtttccgacatctatgagatctaatttatatcgcatctgctactcaccttggggtcaagaatttagcatctgtaactactggcacgacccccatcacgatgatttgtacctcaacgccagcagcttcctagccctgataaacggatag

SEQ ID NO: 127789 - DNA, 603 bp, synthetic construct
  misc_feature 1..603: note = Description of Artificial Sequence: Synthetic coding sequence
  source 1..603: mol_type = other DNA
atgcttggcttatggggccaaagacttccagcagcatgggtccttctcctgctccccttcctgcccctcctgctcctcgcagcccctgccccccatcgggcatcatacaaaccagtcatagtggtacatgggttattcgacagttcctattcattccggcacctcttggaatacatcaatgaaactcatccaggtaccgtggtaactgtcctggatctcttcgacggaagggagagcttaaggccgttgtgggagcaggttcaagggtttagagaggcagtcgtgccaatcatggctaaggcacctcagggcgtacacttgatctgttacagccaggggggcctcgtgtgccgcgccctgctttccgttatggacgatcataacgttgattcattcattagtctgtcttcaccgcagatgggtcagtacggagataccgactacctcaaatggctgttcccaacctccatgagatcgaacttgtatcgcatctgctatagtccatggggtcaggagttttctatctgtaactattggcacgatcctcaccatgatgacctgtacctgaatgccagctctttcctggccctgattaacggatag

SEQ ID NO: 127790 - DNA, 909 bp, synthetic construct
  misc_feature 1..909: note = Description of Artificial Sequence: Synthetic coding sequence
  source 1..909: mol_type = other DNA
atgctaggcttatggggccagcgattgcctgctgcgtgggtgctgttgcttttaccttttcttccattgttactcctggcagctcctgccccacatagggccagctacaagcctgtcattgtggtgcatggcctgttcgacagttcatattctttcaggcatttactggagtatattaacgaaacccaccctggcaccgttgtcacagttctggacctgttcgacggaagagagagtttgcgcccactatgggaacaggttcaagggttcagagaagctgtggtgcctatcatggccaaggctcctcagggcgtccaccttatttgctattcacagggtggactcgtgtgtcgcgcccttctctccgttatggacgatcataatgtggattctttcataagcctgagctccccgcaaatggggcaatacggcgacactgattatttaaagtggctgtttccaacctcaatgagatcgaatctgtatagaatttgttacagcccatggggccaggagtttagcatatgcaactactggcacgatccacaccacgatgacctttacttaaatgccagttctttcttagccctgattaacggcgaacgcgaccatccaaatgcgactgtgtggcgcaagaacttcttgagagtgggccacctggtgctcataggcgggccagacgatggagtgattacgccctggcagtcgtctttcttcggcttttacgatgctaacgaaacagtgttggaaatggaggagcaacttgtctatctgagggactctttcggtctgaagactctcctcgcccggggggcgatcgtcagatgcccaatggccggcatttctcacacggcttggcatagcaacaggaccctttacgagacatgtatcgaaccctggctgagctag

SEQ ID NO: 127791 - DNA, 906 bp, synthetic construct
  misc_feature 1..906: note = Description of Artificial Sequence: Synthetic coding sequence
  source 1..906: mol_type = other DNA
atgctagggttatgcggccagagactgcctgccgcttgggttcttctactgcttccctttctccccctgctcctgttggccgcccccgcaccgcaccgcgcgagttacaaacccgtgatcgttgtccacggactcttcgactcatcttattcttttagacatttgcttgaatacatcaacgagacacatcctggcacagtggtcacagtgttggacctgttcgacggtagggaatccctgcgacccctttgggagcaagtccagggcttccgggaagcagtggttccgatcatggcaaaagcccctcagggcgtacacctcatttgctattctcaaggcggattggtgtgccgtgctctgttgtccgtgatggatgatcacaacgtagactccttcattagcctgtcatcccctcagatggggcaatatggagacacagattacctgaagtggctgttcccaaccagcatgcggtccaacctataccgtatatgttactcaccttggggccaagaattcagtatatgtaattattggcatgacccacaccacgatgacctgtatcttaacgcaagctctttccttgccctgattaatggagagcgtgatcaccctaatgcaactgtgtggcgcaagaattttttgcgagtcggacacctggtactcatagggggcccagacgacggagtcatcactccgtggcagtcctctttcttcggcttttatgacgcaaatgaaactgtcctggaaatggaagagcagctgccagcacgccctactcatcagtcagaactgttgctgctgagattggtgtgtctcaaaccccctagacgcaaaaagccagcctgcagggtacagcggcagagtgagagctggggtccagggctgtcatgtgccttatcctag

SEQ ID NO: 127792 - DNA, 477 bp, synthetic construct
  misc_feature 1..477: note = Description of Artificial Sequence: Synthetic coding sequence
  source 1..477: mol_type = other DNA
atgctgggcctgtggggacagcgcctgccagccgcgtgggtgctcttgcttcttccctttctgcccctattactattggccgccccggccccccaccgagaatcctataagcccgtcattgttgtgcacggtctcttcgatagttcatacagctttcggcacctgttggagtatattaacgagatgggacagtacggggataccgattacctgaagtggctctttcctacaagtatgagatcaaacctgtacagaatctgctactctccttggggacaagagtttagcatctgcaattactggcatgacccccaccatgacgacttatatcttaatgcatcatcgttccttgcgctaattaatggcgaacgggatcatcctaacgctacagtgtggcgcaagaattttttaagggtgggacaccttgtgctaatcggtgggcctgacgatggcgtgataactccctggcaatcttag

SEQ ID NO: 127793 - DNA, 543 bp, synthetic construct
  misc_feature 1..543: note = Description of Artificial Sequence: Synthetic coding sequence
  source 1..543: mol_type = other DNA
atgttgggcctgtggggccaacgcttgcccgcagcttgggtcctgctccttctgcctttcctgccgctgctcctcctagccgcacccgccccacaccgagcatcctacaagcctgtgatagtggtacacggcttgtttgacagtagttatagttttagacacctgttagagtacattaacgagacccaccccggaacagtcgtgaccgttctggatttatttgatggtcgcgaaagtcttcggcccctgtgggaacaggtgcaggggtttagagaggccgtagtccccatcatggctaaagctccgcagggggtccatttgatatgttactctcagggcggactcgtttgcagagccctcctctcggtgatggatgatcacaatgttgattcattcatctctctgtcgtccccgcagatgggccaatacggggacacagattacctgaagtggctgttccccacttccatgaggagtaacctgtacagaatctgctacagcccgtggggacaagagttctccatctgcaactactggcactag

SEQ ID NO: 127794 - DNA, 603 bp, synthetic construct
  misc_feature 1..603: note = Description of Artificial Sequence: Synthetic coding sequence
  source 1..603: mol_type = other DNA
atgctaggcctatggggccaaagacttcctgccgcttgggttctcctattgctcccattcctgcctctgctcctgctcgccgcaccagccccgcatagggcaagttataagcccgtaatagtggttcacggcctatttgacagttcatactcctttaggcacctgctggagtatatcaatgagacacaccctgggaccgtggtaaccgtccttgatttgtttgacggacgggaatctcttcgccccctgtgggaacaggtgcagggcttcagggaggctgtggtgccgatcatggccaaggcaccccagggggtccatctcatctgctattcacagggcggtctggtttgccgggctctgctgagtgtgatggatgaccacaacgtggactcatttatatcactgagcagtcctcaaatgggacaatacggcgacacggattacctgaagtggctttttcccacgtcaatgcgttcaaacctgtaccggatttgttactctccgtggggacaagagttcagcatttgcaactattggcacgaccctcaccatgatgacctctatctaaacgcttcttctttcctcgcactaatcaacggctag

SEQ ID NO: 127795 - DNA, 909 bp, synthetic construct
  misc_feature 1..909: note = Description of Artificial Sequence: Synthetic coding sequence
  source 1..909: mol_type = other DNA
atgctcggcttatggggacagcggctgccagcagcctgggtgctgcttcttttgcctttcctgccactgctcctgcttgctgcccccgccccccatagagcttcttataaaccagtgatcgtggtacatggcctgtttgattcgagctacagcttccggcacctactcgaatacattaacgaaacccatccagggacagtcgtgaccgttctagacttgttcgatgggcgcgagagcctgaggcctctgtgggaacaggtccagggctttcgcgaggctgtagtgcccatcatggcgaaggctccacagggcgttcacctgatctgttattctcagggcgggctggtgtgtcgtgcattgctcagtgtgatggatgaccacaacgtggatagcttcatcagcctgagttctccgcagatgggccagtatggggacacggactacctcaagtggcttttccctacttccatgaggtcaaatctgtatagaatttgttacagcccctgggggcaggagttctccatctgcaactactggcatgacccgcaccacgacgacctctacttaaacgcctcgtcctttctcgcgcttataaacggagagcgcgatcatcccaacgccacagtatggcgaaagaactttctacgtgtcggacacctggtgttgatcgggggcccggacgacggagtgattacgccttggcagtcaagtttcttcgggttctacgacgcaaatgaaaccgtcctggaaatggaagaacagctggtttaccttagagattccttcggcctgaaaacgctgctcgctcgcggagccattgtccggtgccccatggctggaattagtcacaccgcctggcacagcaaccggacactgtacgaaacctgcatcgagccttggctgtcttag

SEQ ID NO: 127796 - DNA, 909 bp, synthetic construct
  misc_feature 1..909: note = Description of Artificial Sequence: Synthetic coding sequence
  source 1..909: mol_type = other DNA
atgctcggcttgtggggtcagcgcctgcccgcggcctgggttctgctgcttctcccgttccttccactactgttgctggctgctcccgcccctcatagggcgtcatataagccagtcatagtggtgcatggcctcttcgactcatcttattcttttcgccacctgctcgaatatatcaacgaaacccaccctggaaccgttgtaaccgtcttggacctgtttgacggccgggagagtctccgtcctctctgggaacaagtgcaaggatttagagaagcagtggttccaattatggccaaagctccacagggggttcatctgatttgctattcccaagggggcttagtatgccgcgccttactgtcagtgatggacgaccacaatgtggactcatttattagcctgagctcaccacagatgggccaatatggtgatactgattacctaaaatggttgtttcctacaagcatgcggtccaacctataccgcatttgttactccccgtggggccaggaattcagcatatgcaactactggcatgatcctcaccatgacgacttgtatctgaatgcttcctctttcctggctcttataaacggcgaaagggaccacccgaacgcgaccgtgtggcgcaagaattttctgagggtgggtcacttggtcctgatcggcgggccggacgacggtgtgatcacaccctggcaatcctcgttctttgggttttacgatgccaacgaaacagtgttggaaatggaggaacagttagtgtaccttcgagacagcttcgggctcaaaaccctgttagcacgcggggctatcgtcagatgcccaatggcagggattagccacaccgcctggcattctaatcgcactctgtacgaaacctgcatcgagccatggttgagttag

SEQ ID NO: 127797 - DNA, 282 bp, synthetic construct
  misc_feature 1..282: note = Description of Artificial Sequence: Synthetic coding sequence
  source 1..282: mol_type = other DNA
atgctgggactgtggggtcagcggcttcctgccgcctgggtgctgttgctcctgccatttcttccattgctgctcctggctgcaccagcaccacaccgcgcttcatacaagccagttatcgtagttcatgggctctttgactccagctactcatttcggcatcttcttgagtacattaacgaaggagctctgtgcgcgggcctctgctttctgtcttggatgatcactacatggattctgtcttccccaagccccctccataggtgggactccatggaatag

SEQ ID NO: 127798 - DNA, 282 bp, synthetic construct
  misc_feature 1..282: note = Description of Artificial Sequence: Synthetic coding sequence
  source 1..282: mol_type = other DNA
atgctcggcctgtgcgggcagagactccccgctgcatgggtgctcctgctattgcccttccttcccctgcttctgttagcagctcctgctcctcatcgcgcttcatacaaacctgtgattgtggtgcacggactgttcgattcttcttatagtttcagacatctgctcgaatacatcaatgagggcgccctgtgcgccggactctgttttctatcttggatgattaccacgtggattctgagttcaccgtctcccctgcatcgatgggacagcatggaatag

SEQ ID NO: 127799 - DNA, 909 bp, synthetic construct
  misc_feature 1..909: note = Description of Artificial Sequence: Synthetic coding sequence
  source 1..909: mol_type = other DNA
atgttgggcctgtggggccagcgtttgccggccgcatgggtcctgctgctgctgccattcctaccattgctgctcttagctgctcccgctccgcaccgtgcctcttacaagcctgttatagtggtgcacggactctttgactccagctattcctttagacacctgttagaatacatcaacgagacacacccaggaactgtcgttactgtactagacctgtttgacggccgcgagtcactaagacctctgtgggaacaggtgcaagggttcagagaagcagtggtccctataatggcaaaggccccgcagggggtccatcttatctgctactcccaggggggtctggtgtgcagggctctgctgtcagtgatggatgaccataacgtggactcatttatctcgcttagcagtcctcagatgggacagtatggagataccgactatcttaaatggctgttccccacctccatgcggtccaatctgtatagaatttgctacagcccttggggccaggaatttagcatttgcaactattggcatgatccccatcatgatgacttgtatttgaacgcttctagcttcctggcccttatcaacggagagcgggaccatcctaacgcaacagtgtggagaaaaaacttccttagggttggacacctggtgctcatcggtgggcctgacgatggagtcatcacaccttggcagtcaagctttttcggattttacgatgccaacgaaacagtcttggagatggaagaacagctcgtctatctgcgagattctttcggattgaaaacattgctggcaaggggagctatagtgcggtgtccgatggctggcatcagccatactgcgtggcacagcaaccgcaccttgtacgagacttgcatcgaaccttggctctcctag

SEQ ID NO: 127800 - DNA, 909 bp, synthetic construct
  misc_feature 1..909: note = Description of Artificial Sequence: Synthetic coding sequence
  source 1..909: mol_type = other DNA
atgttgggcctttggggacaacggcttccggctgcttgggtcctcctgcttttgccctttctgccacttctgctgctggccgccccagcgccccaccgtgcatcgtataaaccagtcattgtggtgcatggactgtttgactccagctactccttcaggcacttgcttgagtacatcaatgaaactcatccaggaacagtggtcacagtgctggatctgtttgacggtcgggaatcactcaggcctctgtgggagcaggtacagggtttccgtgaagctgtagtgcctatcatggccaaggctcctcagggagtccatctgatttgctatagtcaaggtggcctcgtgtgccgggctttactgagtgtgatggatgatcacaacgtggacagctttataagcctgagctcccctcagatgggccaatacggcgatactgattacctcaaatggctcttcccaacgtccatgcgcagtaacttgtaccggatctgctatagtccgtggggccaggagtttagcatctgtaattattggcacgacccacaccacgatgacctgtacctgaacgctagttcattccttgccctaatcaatggagaaagagatcaccccaatgccactgtttggcggaagaatttcttacgggtgggtcacctcgtcctgatcgggggccctgacgatggtgtgatcacaccctggcagtcttcattcttcggattttacgacgccaatgaaaccgttcttgagatggaggaacagttagtgtaccttagggattcatttgggctcaagaccctgctggctaggggagctatcgtccgttgtcctatggctggtattagccatacagcctggcattctaaccgaactctgtacgagacgtgcattgagccttggctgagctag

SEQ ID NO: 127801 - DNA, 543 bp, synthetic construct
  misc_feature 1..543: note = Description of Artificial Sequence: Synthetic coding sequence
  source 1..543: mol_type = other DNA
atgcttgggctctgggggcagcggctgccagctgcatgggttttgctgttgctgccatttctacccctgctgctactcgcagcgccagcacctcaccgggagtcctacaagccggtgatcgtagtgcacggattatttgattccagctactctttccgacatctgttagaatatatcaacgagacacatcctgggactgtggtaaccgtgttggacctgtttgacggacgcgaatcactgagacccttgtgggaacaggtccagggctttagggaagccgtcgtccccatcatggccaaagcccctcagggcgtgcatctgatctgctattcacaggggggactcgtgtgccgggccctcctgagtgtgatggatgaccacaacgttgattcttttatcagtctaagctccccacagatgggtcaatacggggatactgactatctgaagtggctgtttccgacctccatgcgctcaaacctgtaccgcatctgctacagcccctggggccaggaattctctatttgcaattactggcactag

SEQ ID NO: 127802 - DNA, 543 bp, synthetic construct
  misc_feature 1..543: note = Description of Artificial Sequence: Synthetic coding sequence
  source 1..543: mol_type = other DNA
atgctgggactttggggtcaaagattgcccgccgcctgggtcctgttgttactcccgttcctgcccttactgctcctcgcagcccccgccccccacagggagtcctataaacccgtgatcgtagtgcatggcctcttcgactcttcttatagcttcaggcatctgttagagtatatcaacgagacccatccggggaccgtcgtgactgtgctcgacttgttcgatggtcgcgagagcctgagaccgctgtgggagcaagtgcaaggctttcgggaggctgtagttcccattatggccaaagcaccccagggggtacatctgatctgttattcacagggaggccttgtttgtcgagctctgttgtccgttatggatgatcacaatgtggacagctttataagtctatcttccccccagatggggcagtacggtgatactgactacctgaaatggctgtttcccacgagtatgaggagtaatctttataggatttgctattctccttgggggcaggaatttagtatctgcaactactggcattag

SEQ ID NO: 127803 - DNA, 282 bp, synthetic construct
  misc_feature 1..282: note = Description of Artificial Sequence: Synthetic coding sequence
  source 1..282: mol_type = other DNA
atgctcgggctatggggtcagcgattacccgccgcgtgggttctcctgttgttaccattcctcccattgctgcttttggccgctccagcaccacacagggagtcgtacaaacctgtcatcgtagttcatgggttgttcgacagtagctactcctttcggcacctcctggaatacataaacgaaggagccctgtgtgctgggctatgttttttaagttggatgataacaacatggatcctaagcagcccctctcctctccaccggtgggacagcatggagtag

SEQ ID NO: 127804 - DNA, 711 bp, synthetic construct
  misc_feature 1..711: note = Description of Artificial Sequence: Synthetic coding sequence
  source 1..711: mol_type = other DNA
atgttaggactctggggacagcggctccctgcagcatgggtcctgctcctcctccccttcctgcccctgttgttgctcgccgcccctgctccgcaccgggagagttacaagccagtgattgtcgttcatgggttgttcgactcctcttactctttcagacacttgctcgaatacatcaacgaaacacaccccggcacggtggtcactgtgctggacctgttcgacgggagagaaagccttcggcctttgtgggagcaggtccagggcttcagagaggctgtggttcctatcatggccaaggcaccgcaaggagtccacctcatctgttactctcagggaggcctggtgtgccgtgcgctgctgagcgtaatggacgaccacaatgtggattcttttatcagcctgagtagtccccagatggggcagtatggcgatacagactacctcaagtggctatttcccacttccatgcgaagtaatctttacaggatctgttacagcccctggggccaggagtttagcatttgtaattactggcacgacccgcaccatgacgacctgtacctcaatgcatctagttttttggccttaatcaatggcgagagagaccaccccaatgccactgtatggaggaaaaattttctgcgggtggggcacctagttctcatcggcggtccagacgatggggtcattactccctggcaatcatag

SEQ ID NO: 127805 - DNA, 165 bp, synthetic construct
  misc_feature 1..165: note = Description of Artificial Sequence: Synthetic coding sequence
  source 1..165: mol_type = other DNA
tagcacgacgacctgtacttgaacgcctcttctttcttggccctcatcaatggtgagcgagatcaccctaatgctaccgtctggcggaaaaattttcttcgagtgggtcacctggttctaatcggcgggcccgacgacggcgtgataacaccttggcagtcttag

SEQ ID NO: 127806 - DNA, 711 bp, synthetic construct
  misc_feature 1..711: note = Description of Artificial Sequence: Synthetic coding sequence
  source 1..711: mol_type = other DNA
atgcttggactctggggccagcgtctgccagccgcttgggtcctcctgcttcttccattcctccccttgctcctccttgctgcacccgcccctcacagagagtcttacaaacccgtcatcgtggtgcatggattgtttgactcgtcttactcttttaggcaccttttagagtatatcaacgagacccatcctggtaccgtggtaacagtgcttgatcttttcgatggccgcgagtccctgagacctctgtgggagcaggtgcaagggttcagggaagcagtggtgccaatcatggccaaagctccacagggagtacatctcatttgctattctcagggaggattagtgtgccgagccctcttgagtgtgatggacgaccacaatgtggacagctttattagcctgtccagccctcagatgggacagtacggagacaccgactacctgaagtggttgtttcctacatctatgcgtagcaacctttaccggatctgttactcaccgtggggccaggaattctcaatttgtaattactggcatgaccctcaccacgacgacctctacctcaacgcaagcagcttcctggccctgataaatggtgagagggaccacccaaatgcaacggtgtggagaaaaaactttctgagggtaggccacctggtactgatcggggggcctgacgacggtgtcattaccccctggcagtcttag

SEQ ID NO: 127807 - DNA, 909 bp, synthetic construct
  misc_feature 1..909: note = Description of Artificial Sequence: Synthetic coding sequence
  source 1..909: mol_type = other DNA
atgcttggtctgtggggccaacggctccccgctgcttgggtccttctgcttttgcccttcctgcctctgctgctgctcgctgcaccagcccctcatagagcaagctataagccagtcattgttgttcatggtctctttgacagcagctactctttcagacacctccttgaatatattaatgagacccatcctggaaccgtcgtcactgttttagacctgttcgacggccgcgagtccctccggcccctatgggagcaggtgcagggctttcgggaggcagtagtccccattatggccaaagcacctcaaggggtgcacttaatttgctactcacagggggggttggtatgcagagcactattaagcgtgatggatgaccataacgtcgactcctttatcagcctgagcagcccacagatgggacaatacggagatacagactacctgaagtggttgtttcctacttccatgcgctccaacctgtaccgaatctgctacagtccatgggggcaggaattcagcatctgtaactactggcatgatccacatcacgatgatctgtacctcaatgcatcaagtttcctggctctgatcaatggggaaagggaccaccctaatgcgaccgtgtggcgcaaaaacttcctgcgcgtgggacacctagttttgatcggtggaccagatgacggcgtgataaccccgtggcagtcctcgttcttcggcttctatgatgccaacgaaaccgttctggaaatggaggaacagctggtttatctcagagatagtttcgggctgaaaactctgttggcgcggggggctattgtccgttgtccaatggctggaatttctcataccgcctggcacagtaatcggaccttgtatgaaacctgtattgaaccgtggctaagctag

SEQ ID NO: 127808 - DNA, 909 bp, synthetic construct
  misc_feature 1..909: note = Description of Artificial Sequence: Synthetic coding sequence
  source 1..909: mol_type = other DNA
atgctcgggttgtgggggcagagactgcctgccgcttgggtccttcttctcctgccctttctacctcttctgctcttggctgctccggctcctcatagagcctcttataagccagtgattgttgtgcacggattatttgattcttcgtatagcttccgccatctgctggagtatattaatgagacacacccaggaacagtggtgaccgtgctggacctgtttgatggccgggaaagcctgcgccccttgtgggagcaggttcagggatttcgagaggccgtcgtgccaatcatggcaaaggctccacagggagtgcaccttatttgttactcacaggggggcctggtgtgtagggcccttttgagcgtaatggacgaccacaacgtggattccttcatttcgctttcctccccacagatggggcagtacggggacaccgactaccttaagtggttgttccctacttctatgcggtctaatctttataggatctgttattctccctggggccaggagttttccatttgtaattactggcacgacccacaccatgacgacctctaccttaacgccagttcttttcttgccctgattaatggagaaagggatcaccccaacgcaacggtgtggcgaaaaaacttcctgcgcgttggacaccttgtcctgattggcgggccagatgatggagtgataactccgtggcagagtagctttttcggcttctacgatgccaacgaaacagttctcgagatggaggagcaattagtgtacctcagggactcattcggactcaagacccttctggcccgcggcgctattgttcgctgtcctatggcgggaattagccacactgcctggcactccaatcggactctgtacgagacctgtatcgagccgtggctgtcgtag

SEQ ID NO: 127809 - DNA, 909 bp, synthetic construct
  misc_feature 1..909: note = Description of Artificial Sequence: Synthetic coding sequence
  source 1..909: mol_type = other DNA
atgcttggcctctgggggcagcggcttcctgctgcctgggtcctgctgctgctgccgtttctgccactcctgttgctcgccgccccagcaccacacagagctagctacaaacccgtgatcgtcgtccatggtctgttcgactcttcctacagcttcaggcaccttctagagtatattaatgagacccaccccggtacggtggtgaccgtcctcgatctgtttgacggtagggaaagcctcaggccattgtgggagcaggtgcagggattcagggaggctgtcgtgcccatcatggccaaggcccctcagggcgtgcacttgatttgttatagtcaagggggactggtttgccgagccctgctgtcagttatggacgatcacaacgtggactcatttatatctctttcctcaccacagatggggcagtacggcgacaccgattatctaaaatggctgtttcctacctcaatgcgatccaacctgtatagaatctgctattccccctggggtcaggagttctctatttgtaactactggcacgatccccaccacgatgatttgtatctaaacgcaagtagcttcctcgccttaatcaacggggaaagagatcatccaaatgcgaccgtgtggaggaagaatttcctcagggtaggccacctggtacttattggaggtcccgatgatggggtgatcactccttggcagagttcattcttcgggttctatgatgctaatgagacggtcttggaaatggaggaacagctcgtgtatctcagggattcatttggcctaaagacactcctggcgagaggcgccattgtgcgttgccctatggccggaatatcccacaccgcctggcatagtaatcgcactttgtatgaaacatgtatcgagccttggttatcatag

SEQ ID NO: 127810 - DNA, 441 bp, synthetic construct
  misc_feature 1..441: note = Description of Artificial Sequence: Synthetic coding sequence
  source 1..441: mol_type = other DNA
atggatgatcacaatgtggactccttcatttctctgtcctctccccagatggggcagtatggcgacacagactatcttaagtggctctttccaacaagcatgcgatctaatctataccggatctgttattctccatgggggcaggaatttagcatctgtaattactggcatgacccacaccatgacgacttgtacctgaatgctagtagctttctcgccctcattaacggcgaacgagaccatccgaacgcaaccgtgtggcggaaaaactttcttcgggtgggccatctcgttctgatcggggggcccgatgatggcgttataaccccctggcagagtagctttttcggcttttatgatgccaatgagacagtcctcgagatggaagaacaactgcctgtgggaagcagtgtgaaagctaaccatggggtgcagggttag

SEQ ID NO: 127811 - DNA, 927 bp, synthetic construct
  misc_feature 1..927: note = Description of Artificial Sequence: Synthetic coding sequence
  source 1..927: mol_type = other DNA
atgaaaagctgcggttccatgctgggcctgtgggggcaaagacttcccgccgcgtgggtcctgcttctgctcccgttcctacccctgttattactggctgcaccagcaccccacagggcctcctacaagccagtcatagtcgtgcatggtctattcgatagctcctactcatttcgtcaccttttggagtacataaacgagacacatcccgggactgtggtgactgtactggaccttttcgacgggagggaaagtctgagaccactgtgggaacaggtgcaggggtttcgagaggccgtggtgccgattatggcaaaagccccacaaggggtgcatttgatatgctactcccagggaggattggtttgtcgcgccttgttgagcgtgatggatgaccacaatgttgactccttcataagcctgtcttctcctcagatggggcaatacggtgatacagactatttaaaatggttgttcccaacctcaatgcggagcaacctatatcgcatctgctacagcccctggggtcaggagtttagcatctgcaattactggcacgacccgcatcacgacgacctgtacctgaatgccagcagctttctagcgctcatcaacggggagcgagatcacccgaacgctactgtgtggcgcaagaatttcctccgggttggccatttagtgttaataggtggcccagacgatggggtcatcacgccctggcagtcttccttcttcggcttttacgacgccaatgaaacagtgctggaaatggaggagcagttggtttacctgagagattccttcggtttaaaaactcttttagctcggggtgccattgtccggtgcccgatggccggcatctcacacactgcgtggcattcaaaccgtactctgtatgagacctgcattgagccctggctatcctag

SEQ ID NO: 127812 - DNA, 882 bp, synthetic construct
  misc_feature 1..882: note = Description of Artificial Sequence: Synthetic coding sequence
  source 1..882: mol_type = other DNA
atgggttcccgcgcggaactctgcacccttctcggcggatttagtttccttcttctgctaattccaggggaaggcgctaagggtggatcactcagagaatcacaaggagtctgcagcaagcagacactggttgttcccctccactacaatgaaagttacagtcagccagtgtataaaccatacctcacactgtgtgccgggcggagaatctgctccacttatagaacgatgtatagagtcatgtggcgagaggtgcgcagggaggttcagcagactcatgctgtgtgttgtcagggatggaaaaagagacaccccggagctttgacttgcgaagcaatttgcgcaaagccttgtctgaacgggggagtctgtgttcgccctgaccagtgtgagtgcgctccggggtggggcggaaagcactgccacgtcgacgtggacgagtgtcgaacctcaataaccctatgtagtcatcactgtttcaacacggctggcagttttacctgcgggtgcccccatgatctggtgctgggtgtcgatgggcggacctgtatggaaggtagtcctgaacccccaactagtgcctccatcttgagtgttgccgttagggaggccgaaaaggacgaacgcgcgcttaagcaagaaatccatgaacttcggggtcggcttgaaagactcgaacagtgggctggtcaggccggcgcatgggtccgtgcagtgctgcctgtgccaccggaagaacttcagccagagcaggtggcagagctttggggcagaggtgacaggatagagagcttgtccgaccaagtcttattactggaagagaggttgggcgcctgtagctgtgaggataactccctggggcttggcgtgaaccaccggtag

SEQ ID NO: 127813 - DNA, 906 bp, synthetic construct
  misc_feature 1..906: note = Description of Artificial Sequence: Synthetic coding sequence
  source 1..906: mol_type = other DNA
atgcttggactgtggggccagcggttgccagcagcatgggtcctcctcttattgccatttttgccactcctcctgctggcggcgcctgccccccacagggctagctacaagcctgtcatcgtcgtgcacggcctgtttgattcttcttactcatttagacatcttctggaatatattaatgaaacgcatcccggaaccgtcgtaaccgtgctggatctgttcgatggaagggagtcactcagacctctgtgggaacaggtgcagggcttccgtgaagcagtcgtcccgataatggccaaggccccccagggtgttcacttgatctgctatagccagggcgggctggtgtgccgagccctcctgtcagtgatggacgaccataacgtggactcctttatatcactctctagcccccagatgggacaatatggagatactgattacctgaagtggctatttcccacatcaatgagaagcaacctgtaccgaatatgttattccccttggggccaggagttctccatttgcaattactggcatgacccccatcacgacgacctctatctgaacgcctcttcatttctggcactgataaacggggaacgggatcacccaaacgccaccgtctggcgaaaaaatttcctcagagtcggtcatctcgtgctcattggcggacccgacgatggtgtgatcacaccatggcaatcaagcttcttcggcttctatgatgccaacgaaactgtgcttgagatggaggaacaactgcctgccaggcccactcaccagtccgagctacttctgctcaggctcgtctgtctgaagccaccccgcaggaaaaagcctgcatgccgagtccagcgacaatccgagagttggggccctgggctgtcttgtgccctctcgtag

SEQ ID NO: 127814 - DNA, 909 bp, synthetic construct
  misc_feature 1..909: note = Description of Artificial Sequence: Synthetic coding sequence
  source 1..909: mol_type = other DNA
atgcttggactctgggggcaacgactcccagcggcttgggtcttgctactgcttcccttcttaccgctgttgctgctggccgctcccgcccctcaccgcgaaagctacaagccagtgattgtggtccacggcctcttcgatagctcttactcctttcggcatctcctcgagtatatcaatgaaactcatcccggaactgtggtaaccgtgttggacttgtttgatggacgcgagtccctgagaccattgtgggaacaggtgcaggggttcagagaagcggtggtgcccatcatggcaaaagctccacaaggcgtgcacttgatttgctactctcagggcggtctggtctgcagggctttgctgagcgtgatggatgaccacaacgtggactcttttatttccctgtcgagcccccagatgggccagtatggggatacggactacctgaaatggttgttcccgacctctatgcgaagcaatctgtatcgtatctgttacagtccgtggggccaagagttctccatttgcaactactggcacgatccccaccatgacgatttgtacctgaacgcatcatcttttctggccctcattaatggcgagagagatcacccaaatgctactgtctggaggaaaaattttcttagagtgggccatctggtactgattggtgggcccgatgacggggtgataacaccgtggcagtcctctttttttggtttctacgacgccaatgaaacagtgttggaaatggaggaacagttagtctatctcagagactccttcggcctcaaaacactgctggcgcgcggcgccatcgtgcggtgccccatggccggaataagtcacaccgcatggcatagtaaccgaaccctatatgaaacctgcatcgaaccatggctgtcttag

SEQ ID NO: 127815 - DNA, 441 bp, synthetic construct
  misc_feature 1..441: note = Description of Artificial Sequence: Synthetic coding sequence
  source 1..441: mol_type = other DNA
atggacgatcataatgtcgacagtttcatatcactgtcatccccccagatgggtcagtacggggataccgattatctcaaatggctcttccctacatccatgagaagcaatctttaccgaatctgttactccccttggggacaagagtttagtatctgcaactattggcacgatccccatcacgacgacctgtatcttaatgcttcgagtttcttagccctgattaatggcgagcgcgaccatcccaacgcaaccgtgtggcgtaaaaacttcctgagagtcggtcatctggttttgattggtggacccgacgatggtgtcatcacaccttggcagtcatccttcttcggcttctacgacgccaacgagactgttctggaaatggaggagcagctgccagtgggatcttccgtcaaggcaaatcatggggtgcagggttag

SEQ ID NO: 127816 - DNA, 882 bp, synthetic construct
  misc_feature 1..882: note = Description of Artificial Sequence: Synthetic coding sequence
  source 1..882: mol_type = other DNA
atgggcagccgggccgagctgtgtacgctgttaggtgggttttccttcttgcttctccttattcctggagagggggcaaagggagggagtctcagagaatctcagggtgtgtgttctaagcagaccctcgtcgtgcctctccattacaacgagagctatagtcagccagtttataaaccctacctgaccctttgtgccggaaggaggatctgctcaacctatcgcacaatgtaccgggtaatgtggagggaggtgagaagggaagtgcaacagacccacgcggtctgttgccagggatggaagaagagacatccgggagccctgacctgcgaagccatttgtgccaagccatgtctgaatggcggcgtctgtgtccgtccagatcagtgcgaatgtgctccaggatggggcgggaagcactgccatgtcgacgttgacgagtgcagaacttccattacactgtgtagccatcactgctttaatacagccggatcttttacatgcggctgccctcacgacctcgtgttgggagttgatggccgcacgtgcatggaggggtcgccggagccacccaccagcgcctctatcttgagcgtagccgtacgtgaggcagaaaaggatgagcgcgcactgaaacaggagattcatgagctgcgtggccgactggaacgcctggaacagtgggctgggcaagcgggcgcctgggtccgtgcggtccttccggtgcctcctgaggaactgcagcccgagcaggtggcagaactgtggggcagaggcgaccgaatcgaaagcctcagcgaccaggtgctgctcctcgaagaaaggctcggcgcttgctcatgtgaagacaactcacttgggctcggcgtaaatcaccggtag

SEQ ID NO: 127817 - DNA, 906 bp, synthetic construct
  misc_feature 1..906: note = Description of Artificial Sequence: Synthetic coding sequence
  source 1..906: mol_type = other DNA
atgttgggtctctgggggcagcgcctacccgccgcttgggtgctgttactgttaccgttcttgcctcttttactgctggccgcccccgcccctcacagagcctcttataagcctgtgatcgtcgttcatggactttttgatagttcttattcatttcgccacctgctcgaatatatcaatgaaacacaccccgggacggtggtaaccgtgctggacctctttgacggacgagaaagcctgcgccctttgtgggagcaggttcaaggcttcagagaggcagtggttcccattatggctaaggcaccccagggggtgcaccttatctgctactctcagggaggcttggtttgtcgcgcactactgagcgtaatggacgaccacaatgtggactcattcatctctctgagcagtcctcagatgggacagtacggagataccgattacctcaagtggctgtttccaactagcatgcggtctaacctgtacaggatctgttattcgccctggggtcaggagttttctatctgtaactactggcacgatccacatcacgacgacctttacctgaacgcttccagttttctcgcattgattaatggcgaacgagaccacccaaacgctaccgtctggcggaaaaattttctcagagtgggccatctggtcttaattggaggaccagacgacggggtgataacgccctggcagtcttccttttttggcttttatgacgctaatgaaaccgtgctggaaatggaggagcagctcccagctcgtcctacccaccagtccgagttgttgttactccggctcgtatgcctgaaaccgccgcggcggaagaagcccgcatgcagagtgcaaaggcagtctgagtcttggggcccaggcctgagttgcgcactgtcttag

SEQ ID NO: 127818 - DNA, 441 bp, synthetic construct
  misc_feature 1..441: note = Description of Artificial Sequence: Synthetic coding sequence
  source 1..441: mol_type = other DNA
atggatgatcataacgtggatagcttcataagcctgagttctccacagatgggccagtacggtgacaccgattatctcaagtggctgttcccaactagcatgagatctaacttgtatagaatctgctatagcccctggggtcaggagttctctatttgcaactattggcatgatccccaccatgatgatctctacttgaatgccagttcctttctcgcactcatcaatggagaacgggaccacccaaatgccactgtctggagaaagaacttcctgagagtggggcacctggtgctgatcggaggtccagacgacggtgttataaccccatggcagagctctttttttggcttttacgatgcaaacgaaaccgttttggagatggaggagcagctgcccgtcggttcctctgtgaaggctaaccatggcgtgcaagggtag

SEQ ID NO: 127819 - DNA, 906 bp, synthetic construct
  misc_feature 1..906: note = Description of Artificial Sequence: Synthetic coding sequence
  source 1..906: mol_type = other DNA
atgctgggcctatggggtcaaaggctacccgctgcctgggtgttgctgctgttgcccttcctcccattgttgctcctggctgccccggccccccatcgcgcttcatacaagcctgttatagtggtgcatggactttttgactcatcatattcctttcgacatctgctcgagtacataaatgagacccatcctggtacggtggttactgtgctcgacctgttcgatggtcgggagtctctgaggcccctctgggaacaagtgcaaggattcagggaggctgttgtgcccataatggccaaggcacctcagggggtacatctaatatgctatagtcaaggcggtcttgtttgccgagccttgttatctgtcatggacgaccacaacgtggactcatttatttccctcagctcaccccaaatgggacaatacggcgatacagactacctcaagtggctgtttccaacaagcatgcgcagcaatctgtaccggatatgctattctccttggggccaggagttctccatctgcaactactggcacgatcctcatcacgacgatctctatttgaacgcgagttcctttttggccttaattaacggtgagcgggaccatccaaatgccactgtctggcgaaagaacttcctccgtgtgggtcatctcgttcttattggaggcccagatgatggggtgattaccccctggcagagcagtttctttggcttttacgacgccaatgagaccgtccttgagatggaggagcagcttccagcccggcccacgcaccaaagtgagctactgctcctgcgactggtgtgtcttaagccgccgagaaggaaaaagccagcctgcagagtccaacgccagagcgaatcctggggaccaggtttgtcctgtgcactctcatag

SEQ ID NO: 127820 - DNA, 441 bp, synthetic construct
  misc_feature 1..441: note = Description of Artificial Sequence: Synthetic coding sequence
  source 1..441: mol_type = other DNA
atggatgatcacaatgtggactccttcatctccctgagttcacctcagatgggacagtacggagacaccgactatttgaaatggctcttccccacctccatgcgttctaacctgtatcggatctgttacagtccatggggccaagaattttcaatttgcaactattggcacgatcctcaccatgacgacctgtacttgaacgcttcttccttcttggcactgattaatggggagagagatcacccgaacgcaactgtctggaggaaaaatttccttagagtcgggcacctggtccttatagggggtcctgacgacggcgtgatcaccccctggcagagcagcttctttgggttttatgacgccaatgaaacggtgctggagatggaggagcagttgccagtgggctcaagcgtcaaagctaaccacggggtccaggggtag

SEQ ID NO: 127821 - DNA, 882 bp, synthetic construct
  misc_feature 1..882: note = Description of Artificial Sequence: Synthetic coding sequence
  source 1..882: mol_type = other DNA
atgggttctagagctgagctgtgtacgcttttaggcgggttctcgtttctgttattactcatcccaggggaaggcgccaaaggcggatccctgcgggagtcccaaggtgtttgcagcaaacagactctggtcgtgccactccactataacgagagctactctcagcctgtgtataaaccatacctcaccttgtgcgctgggcgacggatctgttcaacctacagaaccatgtatcgcgtgatgtggcgcgaggtgagaagggaggtacagcaaactcatgctgtgtgctgtcagggatggaaaaagagacatcctggtgctctgacatgcgaggccatctgcgccaagccatgtttaaacggcggtgtatgtgttaggcctgatcagtgtgagtgcgctcctgggtggggtgggaagcattgccacgtcgacgtagacgagtgccgaacctctataactctttgctctcatcactgtttcaacactgccggatcctttacctgcgggtgcccccacgacctggtgctgggagtagatgggcgcacgtgcatggagggttccccggaacctcccacctcggctagtatactgagcgtggctgtgcgggaagcagagaaagatgagcgtgcacttaagcaagaaatccacgagctgaggggccgcttagagcggctggagcagtgggctggccaagccggagcatgggtgcgcgctgtgcttccagttccacccgaagaactgcaacctgaacaggtggcggaactgtggggtaggggtgataggatcgagagtctgtccgatcaagttctgctcctggaggaaagactcggagcttgtagttgtgaggacaatagcttgggcttgggcgtgaaccaccgttag

SEQ ID NO: 127822 - DNA, 882 bp, synthetic construct
  misc_feature 1..882: note = Description of Artificial Sequence: Synthetic coding sequence
  source 1..882: mol_type = other DNA
atgggctcacgggctgagctatgcacactcctcggggggttttcgttcttgctgctactcatcccaggcgagggggctaagggtggcagcttgcgggagagccagggtgtctgctcgaaacaaactctggtggtgcctctgcattacaacgagtcttacagtcaacctgtctacaaaccctacctgactctgtgcgcagggcgacggatatgctccacctatcgcaccatgtaccgggttatgtggagggaagtgagacgcgaagtgcagcagacacatgcagtttgttgtcaggggtggaagaagcgacatcccggtgccctcacctgtgaagctatctgtgcaaaaccttgtctgaacggcggcgtctgtgtgaggccagaccagtgcgaatgtgcgcctggctggggtggaaaacactgccacgtggacgtggacgagtgtaggacttctatcaccttatgctcccatcactgctttaatactgccgggtcctttacgtgcgggtgtccacacgacctggtcctcggcgtggatggccgaacctgcatggaggggtcccctgagcctccaaccagtgcgagcatcctgtcagtcgccgtccgagaagccgagaaagatgagagggcgttgaagcaggagattcatgagctgcgtggccgactggagagactggaacagtgggctggccaggccggtgcatgggttcgggcggttctcccagtgccacccgaggaactgcagccagagcaggtcgccgagctgtggggccggggtgatcggatagaatctctttcagatcaggtgttattactcgaggagcgcctgggagcatgcagttgcgaggacaattcactgggattgggggttaaccataggtag

SEQ ID NO: 127823 - DNA, 909 bp, synthetic construct
  misc_feature 1..909: note = Description of Artificial Sequence: Synthetic coding sequence
  source 1..909: mol_type = other DNA
atgttagggttgtggggacaacgactccccgcggcctgggtcctcttactcctacctttcctgccactgctactgctggcagccccagccccgcacagagcctcttataaaccagtgatcgtcgtgcacggcttgtttgactctagttattcattccgtcaccttctcgagtatattaacgaaacacatcccggtactgtggtgactgtgctcgatctgttcgacggccgcgagtccctgcggccgttgtgggagcaagtccagggtttcagggaggcagtcgtccctatcatggctaaagctccgcagggggtgcatctgatctgttatagtcaaggaggtctggtttgtcgggcattgcttagcgtgatggatgaccacaacgtggacagtttcatctctctgtccagcccacagatgggccagtatggtgatacagactatttaaagtggctttttcccacgtccatgagaagcaatctttacaggatctgctacagcccgtgggggcaagagttctctatttgcaattactggcacgacccccaccacgacgacctctacctgaatgctagctccttcctggccctcataaacggggaaagggatcatcctaatgccaccgtgtggcgcaagaatttcctccgggtgggacacctggtcctgatcggaggccccgatgatggagtcatcacaccatggcagtcctcatttttcggtttctacgatgccaacgaaaccgtcttggaaatggaggaacaactcgtgtacctacgagactccttcggactgaaaacactgctcgcccgcggggctatcgtgcggtgtccaatggctgggattagccacaccgcatggcattcaaacagaacgctgtacgagacctgcatagaaccctggctatcttag

SEQ ID NO: 127824 - DNA, 441 bp, synthetic construct
  misc_feature 1..441: note = Description of Artificial Sequence: Synthetic coding sequence
  source 1..441: mol_type = other DNA
atggacgatcacaatgttgattcctttattagtctttccagtccccagatgggacagtacggagacactgattacctcaaatggctgttccctacgtccatgaggagtaacctgtatagaatatgctatagcccttgggggcaggaattctctatttgcaattactggcatgacccacaccacgacgatttgtatctaaatgcttctagctttttagccctgatcaatggcgaaagagaccaccccaacgccaccgtgtggcggaagaactttttgcgcgttgggcacctggttctcataggcggcccagacgacggagtgataacgccgtggcaatcctcattctttggcttctacgacgcaaacgagacagttctggaaatggaggaacagctcccagtgggcagctccgtcaaggcaaatcacggagtacagggttag

SEQ ID NO: 127825 - DNA, 909 bp, synthetic construct
  misc_feature 1..909: note = Description of Artificial Sequence: Synthetic coding sequence
  source 1..909: mol_type = other DNA
atgctcggtctgtgggggcagaggcttcctgcagcctgggtattgttactgctaccatttctcccactacttctgctggccgctcctgctccacatagagcttcctacaaacccgtcattgtcgtccatggactttttgactcgtcttactccttccgccaccttctggaatacatcaacgagacccatccagggaccgttgtaaccgtcctagacttatttgacggaagggaatcattacgacctctgtgggagcaggttcagggattccgggaagccgtggtccccattatggccaaggctccccagggcgtgcaccttatctgttactctcaaggaggactagtgtgtagggccctgttgagcgtcatggacgatcataacgtagacagcttcatcagtctctccagccctcagatgggtcaatatggcgataccgactatttgaagtggctcttccctacctctatgaggagcaacttgtaccgcatctgctatagcccatggggccaggaattcagcatttgcaactactggcacgaccctcaccacgatgatctgtacctcaatgcatctagttttctcgctctgattaacggcgagagagaccaccctaacgccacagtctggcgaaagaacttccttagggtgggacacctggtactgattggcgggcccgatgacggagtgattaccccctggcaatcctccttcttcgggttttacgatgccaatgagactgtgctggagatggaggaacaactggtgtatttacgggactcattcgggttgaagacgctgctggcacgaggcgccatcgtgaggtgccctatggctggaatcagccacacagcttggcacagcaatcgaaccctctatgagacatgcatcgaaccttggctaagttag

SEQ ID NO: 127826 - DNA, 441 bp, synthetic construct
  misc_feature 1..441: note = Description of Artificial Sequence: Synthetic coding sequence
  source 1..441: mol_type = other DNA
atggatgatcacaatgttgattccttcatctcactatctagccctcagatggggcagtacggggacaccgattacctcaaatggctcttccccacatccatgcgaagcaatctgtaccggatctgttactctccctggggacaggagttctccatatgtaactactggcacgatccacatcacgatgacctttacctgaacgcttccagctttctggccctaattaatggagagcgagaccatcccaatgctactgtttggagaaagaattttctgcgcgttggccacctagttctgatcggcggtcctgatgatggggtgattactccatggcagagttcttttttcgggttctacgacgctaatgagacagtgctggagatggaggaacaactcccagttggctcttcagtgaaggcaaatcatggagtgcagggctag

SEQ ID NO: 127827 - DNA, 906 bp, synthetic construct
  misc_feature 1..906: note = Description of Artificial Sequence: Synthetic coding sequence
  source 1..906: mol_type = other DNA
atgctgggattatggggtcagaggctacccgccgcctgggtgttgctgctgttacctttcctacctttactgctgctcgccgctcccgctccccacagagcatcctataagcctgtcatcgttgtacacggactgtttgacagcagctactcatttcggcacctgttggaatacatcaacgagactcatccagggaccgtggttactgtcctcgatctcttcgatgggcgtgagtcgctgcgacctctgtgggagcaggtccaagggtttagggaggcagtcgtgccaatcatggccaaggcgccccaaggggttcatctaatatgctattcccagggaggcctggtctgtcgcgccctcctctccgtaatggacgaccataatgtggactcttttatttctctcagcagtccgcagatgggtcagtacggcgacacagactacctcaagtggcttttcccgacgagtatgcgctcaaacctttataggatttgttacagcccgtggggtcaagagtttagcatatgcaactactggcatgacccacatcacgatgatctctatctcaatgccagctcctttttggctctcattaatggagaacgcgaccaccctaatgccacggtgtggcggaagaattttcttagggttggccatctggtgctgatcgggggcccggacgacggtgtaatcaccccatggcagtcctcattttttggattttacgacgcgaacgaaacagtactcgaaatggaagagcagctgcccgcccggccgacacatcagtccgagttacttttattgcgattagtgtgccttaagcccccaagaaggaagaaaccggcatgccgcgtccagcgccagagcgagtcatggggtccagggctcagctgtgcactgtcatag

SEQ ID NO: 127828 - DNA, 906 bp, synthetic construct
  misc_feature 1..906: note = Description of Artificial Sequence: Synthetic coding sequence
  source 1..906: mol_type = other DNA
atgctcgggttatggggccagagactgccagctgcttgggttctcctgctcttaccatttctgcccctcctacttctggcggctccagccccccatcgagaatcctacaaacccgtgattgtagtgcacggactgttcgacagctcctactctttccgccatctcctagaatatatcaacgaaacccaccccgggaccgtcgtgactgtgctggaccttttcgacggcagagaaagcttgagaccactatgggagcaggttcagggcttcagagaagccgttgtgccgatcatggctaaggccccccaaggcgtccacttaatctgctattcacagggagggctcgtctgcagggcattactaagcgtaatggatgaccacaacgtggactcgtttatctcactgtcttctccccagatgggccagtatggagacaccgactatctcaagtggctgttcccgacttctatgaggtccaacctctatcgcatctgctatagcccatggggccaggaattttctatctgtaattattggcatgacccccaccacgacgatctctatttaaacgcttcatccttcctggcattgataaatggagagagagaccaccccaacgctactgtttggcgtaaaaactttcttcgcgtcggtcatctggtgctcattggtgggccggatgatggagtcattactccatggcaatcctctttcttcgggttttatgatgccaatgaaactgtcctggaaatggaagagcagttgccagccagacccacacaccagtccgaacttcttctactgcgtttagtttgcttgaagcccccccggcggaagaagcccgcatgtcgcgtacagcgacagagtgagtcctggggtcccggattaagttgtgcactaagctag

SEQ ID NO: 127829 - DNA, 906 bp, synthetic construct
  misc_feature 1..906: note = Description of Artificial Sequence: Synthetic coding sequence
  source 1..906: mol_type = other DNA
atgttgggcctgtggggccaacgcctgcccgcagcttgggtgctgctacttttaccgttcctgccactcttactgctggccgctccggcacctcatcgcgcctcttataaacccgtgatcgtcgtgcacgggctctttgactcgagttactcatttcgccacttgctagagtacatcaacgaaactcacccaggtacagtcgtgactgtgcttgacctctttgatggccgggaatccctgcgtccactctgggagcaagttcaggggtttcgcgaagctgtggtaccgattatggcgaaagcgccccagggtgtgcaccttatttgctacagccagggcggactggtctgtcgagcccttctgtcagtaatggatgatcacaacgtagactcctttataagtctttcatcccctcagatgggacagtatggagacactgactacctgaaatggcttttcccaacgtcaatgcggagtaatctctatcgtatttgttacagcccttggggacaggagttttcaatctgcaactactggcatgatcctcatcatgacgatctgtatctgaacgcctccagcttcctagcactcatcaacggagagcgggaccatccgaacgctaccgtttggcggaagaatttccttagggtggggcacttggttctcattggtggccctgatgacggtgtgattaccccttggcagagttccttctttggcttctatgatgctaacgagacagtattagaaatggaggaacagctgcctgcccggcccacccaccagtccgaactgctgctgcttcgcctcgtctgcttgaaacccccacggaggaagaagcctgcatgtagggtacaacgacagagcgagagctgggggccgggcctctcttgcgcgttgtcttag

SEQ ID NO: 127830 - DNA, 909 bp, synthetic construct
  misc_feature 1..909: note = Description of Artificial Sequence: Synthetic coding sequence
  source 1..909: mol_type = other DNA
atgcttggcttgtgggggcagcgcttgccagcggcttgggtgttgcttctgctgccttttctcccccttctgttgcttgctgctcccgcaccgcaccgcgcgagttacaagcctgtcattgtggtacatggcctcttcgactccagttactcctttcggcatctactggagtacatcaacgagacccaccctgggacagtcgtgaccgtcctcgacctgtttgacgggcgggaatccctgaggcccttgtgggagcaggtccaagggtttagggaagctgtggtgcctataatggctaaagccccgcagggggtccatctcatctgttacagtcaaggcggcctcgtatgtagagcactgctcagtgttatggatgatcataatgtcgacagcttcattagccttagctctccccaaatgggacagtatggggatactgactatctgaagtggttgtttcccaccagcatgaggtctaacctgtatcgcatttgttatagtccttggggacaggaatttagcatttgcaactactggcacgatccccaccacgacgatttgtacttaaatgcttcgtccttcttggctctcatcaatggggagcgcgaccacccaaacgcaaccgtgtggcggaagaactttctacgcgttgggcacctggtcctcatcggcggcccagatgatggagttattacaccgtggcaatcaagcttcttcgggttttacgatgccaatgaaacagttctagaaatggaggagcaacttgtgtacctgcgggactcctttggtttaaagactctgctggcaagaggggcaatcgtgcggtgccccatggccggaatctcccacactgcttggcacagtaaccgcaccctgtacgagacgtgcattgagccgtggctctcatag

SEQ ID NO: 127831 - DNA, 3606 bp, synthetic construct
  misc_feature 1..3606: note = Description of Artificial Sequence: Synthetic coding sequence
  source 1..3606: mol_type = other DNA
atgaatttcgaggggttagacccaggccttgctgaatacgcacccgccatgcacagcgcactcgaccctgtgctagatgctcacttgaatccttctctccttcagaacgttgagctggaccccgagggggtggcgctggaggccctgcctgtgcaggagtcggtccatatcatggagggtgtgtacagcgaattgcattccgtggttgctgaagtgggagtgcctgtgagcgtgagccactttgacctccatgaggagatgctctgggtgggatcacacggtggacatgcaactagttttttcggccctgcacttgagcggtattcgagctttcaggtcaatggcagtgacgacatccgccagatccaatccttagagaacgggattttattccttactaagaacaatctcaagtacatggcacggggaggacttataattttcgattacctcttggacgagaacgaagacatgcattcgctgttgctgaccgactcttcaaccttacttgtgggcgggctccagaaccacatcatcgagattgacctcaatactgtgcaggagacccagaagtacgcagttgaaacacccggcgtcactatcatgaggcaaaccaatcggttcttcttttgcggccatacgtcaggaaaagtctccctcagagatctcagaaccttcaaggtggaacacgagtttgatgcattctctgggtctctgtctgacttcgacgtgcatgggaacctgctggctgcatgcgggttttcctcccgtcttactggactagcctgtgaccgctttctgaaggtgtatgatctgagaatgatgagagcgatcaccccgctccaggtgcacgtggatcctgcttttctgaggtttatcccaacatacacaagtcgtctcgccattatcagccagtcgggccaatgtcagttttgcgaaccaaccggactggcgaaccccgccgacatatttcacgtgaacccagtcgggcccttgttgatgacatttgacgtgtcagcctctaagcaagcccttgctttcggcgattcagagggctgtgtgcatctctggaccgacagtcccgagccgagcttcaatccatacagccgggagacggagtttgctctgccatgccttgtggactcgctgcccccacttgactggtctcaggacttgctgccgctctcccttataccagtgccactcacgaccgacacgttgctcagcgattggccagccgcaaatagtgcccctgcccccaggcgcgcgcccccagtggatgccgagattctccgcacaatgaagaaggtaggttttatcgggtacgcccccaaccctcgcactagactaagaaatcagatcccttatcgtctgaaggagtccgacagtgagttcgattctttttcacaggttacggagtcccctgtcggccgcgaggaagagccgcatcttcacatggtatcgaagaagtatcgcaaggtgacgattaaatattccaaattagggctggaggatttcgacttcaagcactacaacaaaacactgtttgctggcctggagccacatattcctaatgcctattgcaattgtatgatccaggttctttactttctcgaacctgtgaggtgtttgattcagaaccatctatgtcaaaaggaattttgtctggcttgtgagctggggttcctgtttcatatgctggacctgtcacgaggagacccatgccaaggcaacaacttcctgcgtgctttccgcactatccctgaagcaagtgcgctgggattgattttagccgattccgacgaggcctccggaaagggaaaccttgccagactcatccagcggtggaaccgcttcattctgactcagctccaccaggatatgcaggaactggagatcccgcaggcctacaggggtgctggtggatctttctgtagttctggcgacagtgttatcggccagctgttctcctgcgaaatggaaaattgcagcctctgtaggtgcggctcagagacagtccgcgcctcctccactttgctatttacattgtcgtacccggacgggagtaaaagcgataagaccggcaagaactacgatttcgctcaagtcctaaagcggagtatctgtctcgaccaaaatactcaggcctggtgcgatacttgcgaaaagtaccagcctaccattcagactaggaacatcaggcacctgcccgatattctcgtcatcaactgtgaagtgaactcgtcgaaggaagctgacttttggcgtatgcaggctgaggtcgcattcaagatggcggttaagaagcacgggggggagataagcaagaacaaagaattcgccctggctgactggaaagagctaggctcacctgaaggcgttttggtttgtcccagcattgaggagttaaaaaatgtgtggctgccctttagcattagaatgaaaatgaccaagaacaagggactggacgtatgtaactggacggatggtgacgagatgcaatgggggcccgcacgagcagaggaggagcacggtgtgtacgtgtacgacctgatggccacagttgtccatatcctggacagccggaccggaggtagcctggtcgcccacattaaggtaggtgagacctatcatcagcggaaagaaggagtgacacaccagcagtggtacctgtttaacgatttcctgatcgagccaattgacaagcacgaggccgttcagtttgatatgaattggaaggtgcctgccatactgtattacgtgaaaaggaatctgaattctagatacaacttaaatatcaagaaccccattgaagcatccgtgctcctggccgaagcctcactggctagaaaacagaggaaaactcacacaacgtttattcccctgatgttgaatgaaatgccccagatcggcgacttagtgggcctggacgccgagtttgtcaccttgaatgaagaagaggcagagttacggagtgacggaaccaaatccactatcaagccctcacagatgtccgtagccaggatcacatgcgtgcgcgggcaaggcccaaatgaaggaataccttttatcgacgactatatatccacacaggaacaggtcgtcgattacctaacacagtattccgggatcaagccaggggatttggatgccaagatttctagcaaacacttaactacattaaaaagcacctacttgaaactgcgctttcttattgacatcggggtaaagtttgtgggccacgggctacaaaaggacttccgagtgattaatcttatggtgcccaaagaccaggtgttggacactgtatacctcttccatatgcctcgcaaacgcatgataagtctcaggtttctcgcatggtatttcttggatctgaaaatacagggcgagactcatgacagtatagaggacgccaggactgcactacagctctatcgtaagtatctcgaactgtccaaaaatgggactgagcctgaatcctttcacaaggtgctgaaaggcttgtatgaaaaaggcagaaaaatggactggaaggtccccgagcctgaggggcagacctcgccgaaaaacgccgccgtgttttccagtgttctggctctgtag

SEQ ID NO: 127832 - DNA, 3609 bp, synthetic construct
  misc_feature 1..3609: note = Description of Artificial Sequence: Synthetic coding sequence
  source 1..3609: mol_type = other DNA
atgaattttgagggcctggatcctggcttggcagagtacgctcctgcaatgcattccgctttggacccagtgctggacgctcatctgaacccatcactgctgcagaatgtagagctcgaccctgagggtgtcgccctagaggctctgcctgtccaagaatctgtccacataatggagggcgtctatagtgagctccactctgtagtcgctgaggtcggggtacctgtatccgtcagccatttcgacctgcatgaagaaatgttgtgggttggaagccatggtgggcatgccacgagtttcttcggtcctgccttagagagatatagttcctttcaggtgaatggctctgacgacattcgccagatccagagcttggaaaatggcattctgtttctgaccaaaaataatttaaagtacatggcccgcggcgggctgatcatattcgactacttactggatgaaaacgaggacatgcacagcttgctgttgaccgatagctcaaccctgctggtgggcggactgcagaatcacatcattgaaattgatttgaataccgtgcaggagacgcagaaatatgctgtggagacaccgggagtgactattatgcggcaaactaacaggtttttcttttgcgggcacacctccggaaaggtctccctccgagatcttaggactttcaaagtcgagcatgaatttgatgcatttagcgggtctctttcggactttgacgttcatggaaatctgcttgccgcctgtggcttttctagcaggctgacgggcctggcatgcgatagattcctcaaagtttatgaccttcggatgatgagagcaataactcctttacaggttcacgtggaccccgctttccttcggttcattccgacctacacaagtagattagccatcatatcacaatctgggcagtgccaattctgcgagcctacgggcctggcgaatcccgcggatatcttccatgtcaatcctgtaggccccttattgatgaccttcgacgtgagcgcaagcaagcaggccctcgcttttggagactccgaaggttgtgtgcacttgtggaccgattcacctgaacccagcttcaatccctactcacgcgaaacggaatttgctctcccatgcctggtggattctttacctcccctggactggtcccaggatctcttacctctgtccctgattcccgtgccccttacaaccgacactctgttatctgattggccggctgccaattcggcccccgctccaaggagagcccctccggtagacgcggagatcctccgcacaatgaagaaggtaggattcattggatacgcacctaatccacggactcgcctaagaaatcagattccttataggttaaaagagtcagactctgagttcgacagcttcagtcaagtaacagagagccccgttggccgagaggaggagccccatctacacatggtgtctaaaaaatatagaaaggtgaccataaagtatagtaaactcggactggaagacttcgactttaaacactacaacaagaccctcttcgccgggttagagccccacatcccaaatgcatattgcaactgtatgatccaagtgttatacttcctggagccagtcaggtgtctcattcagaatcacctttgccagaaggagttttgcctggcctgtgagctcgggttcctcttccacatgcttgatcttagcaggggtgatccttgtcaaggcaataacttcttgagagcctttcgtacaatcccggaggcatctgctctgggactcatcttggctgactccgatgaagcaagtgggaaggggaacctggccaggcttatccagaggtggaatcgatttattctcacacaactccaccaggacatgcaggagttagagatacctcaggcataccgcggcgctggcggaagtagtttctgttcaagcggtgatagtgtaatcggccagctcttttcttgcgagatggagaattgtagcctgtgtaggtgcggcagcgagacagtcagggcaagtagcacactgctgtttaccctatcatatccggatgggtcaaaatcggataagacaggcaagaattacgatttcgcacaagttctaaagcgatcaatatgtcttgaccagaacactcaggcatggtgtgacacttgcgagaagtatcaaccaacaattcaaacacgcaatatcaggcatttgcctgatattctggtgatcaactgtgaagtgaactcctcaaaggaggccgatttctggcgcatgcaagccgaggtcgcctttaaaatggctgtgaaaaaacacggcggcgagattagcaagaataaggagtttgccctagccgattggaaggagctgggcagcccagaaggcgttctggtttgtccctctatcgaggaattaaagaatgtctggcttcctttcagcattaggatgaaaatgacgaagaacaaggggctggacgtatgcaattggaccgacggagatgaaatgcagtggggtccggcccgcgcggaggaggagcatggagtctacgtgtacgacctgatggctaccgtcgtccacatcttagactctaggaccgggggatccttggtggcccacatcaaggttggcgagacttatcatcaaaggaaggagggagtgactcatcagcagtggtatttatttaacgactttcttatcgagcccattgataagcatgaggccgtccagtttgatatgaactggaaagtaccagcgatcttatactacgtgaaacgtaacctcaattcgcgatataacctgaacatcaagaatccaatagaagcctccgtgttactggcagaggctagtctggctcggaagcaacgcaagacccatactaccttcattccattgatgctgaatgaaatgccccagattggggacctagtcggcttggacgccgaatttgtgaccctcaacgaggaagaagccgaactgcggtccgatggcaccaagtctactataaagccctcccagatgtccgtggccagaatcacatgtgtcagaggccaggggccaaatgaggggattccttttatcgatgactacataagcacccaggaacaggtcgtcgactatttaacacagtactctggcatcaaacccggcgacctggacgccaagatctccagtaaacacctcaccacactaaaatctacctatctgaagttgaggtttctgatcgacatcggagtcaaatttgtaggtcacggactccaaaaagacttcagagtgatcaacctgatggtccccaaggaccaggtcctggatactgtatatttgtttcatatgccaagaaagcgaatgatatcactaaggttcctggcctggtactttctggacttaaaaatccaaggtgaaacacacgattcaattgaggatgcccggactgctctgcagctttataggaagtatctggaactgagcaagaatggcacagagcctgagtcttttcataaggttctcaaaggcctgtatgaaaagggacggaagatggactggaaggtgccagaacccgagggtcaaactagtcccaaaaatgccgccgtcttctcctcggtcctcgctctctag

SEQ ID NO: 127833 - DNA, 3597 bp, synthetic construct
  misc_feature 1..3597: note = Description of Artificial Sequence: Synthetic coding sequence
  source 1..3597: mol_type = other DNA
atgaactttgaaggcctggaccctgggctggcagaatatgcccctgccatgcactccgccctggatccagtgctcgacgctcatctgaacccgtccctgttgcagaacgtggaattagaccctgagggagttgcactggaggcactccctgtgcaggaatcggtgcacattatggaaggggtctattccgagttgcattcggttgttgcagaagtgggagtaccggtctccgtgtcacacttcgacctgcacgaagagatgttatgggtggggagtcatggcggacatgccaccagcttttttggccctgccctggaaaggtattctagctttcaggtgaatggaagtgacgacattaggcagatccagagcctggagaatgggattctctttctgactaagaataacttgaagtacatggcccgagggggattgattatattcgattatctgctggacgagaacgaggatatgcattcgttattgctcaccgattcctcaacactcctggtgggcggcttgcagaaccatataattgagatcgatctgaatacagttcaggaaacacagaagtatgcagtggagaccccaggagtgactataatgaggcagacaaatagattctttttttgcggccatacttctgggaaggtgtccctaagggacttgcgaaccttcaaagtggaacacgaattcgatgcgtttagcggcagtctgtctgacttcgacgtgcacgggaaccttctcgctgcctgcgggtttagcagtcgactcactggcttggcatgtgaccggtttctgaaggtttatgacttgcggatgatgcgagctatcacccccctccaggtgcatgtcgatcccgcatttttgagattcattccaacatatacgagtcgccttgccataatcagccagtcgggccagtgccagttttgtgagcctactggtcttgctaaccctgccgacattttccatgttaaccctgtgggccccctcttgatgacctttgatgtgtcagccagtaagcaggcacttgccttcggtgacagtgaaggatgcgtgcatctttggacagacagtccagagccctcgtttaatccatactctagggaaaccgaattcgcactgccgtgccttgtggatagcctgccacccctcgactggagccaggatctgctcccactgagccttattccagtacccctcacaaccgacacactgctctccgactggcctgccgccaacagtgccccggcgccccgaagagctccaccggtggatgcagagattcttagaacgatgaagaaggtcggttttatcggatatgcccctaaccctaggacaagactcaggaatcagatcccgtaccgtctgaaggagtccgactcagagttcgactctttttcccaagtgaccgagtcacccgtcgggcgcgaagaagagccacacctgcacatggtgagcaagaagtatcgtaaggttacaatcaagtattccaaattgggcctggaagatttcgatttcaaacactacaacaaaacactatttgctgggcttgagcctcatatacccaacgcgtactgtaactgcatgatccaggtcctctatttcctggaacctgtccggtgtctgattcaaaaccacctctgccagaaggaattttgtctggcttgtgagctggggtttctgtttcatatgcttgatctcagtcggggggacccatgccagggcaacaactttcttcgagccttccgcactatcccggaggcatcagcactgggcctgatcctggctgattcagacgaggcttccgggaagggcaacctggcccgcctaattcaacgctggaaccgcttcatcctgacacaattacaccaagacatgcaggagttagagatccctcaggcgtacaggggagccggcggctcaagcttctgcagtagcggtgacagcgtgattggacagctctttagttgtgagatggagaactgctctctgtgtcgctgcggctctgaaaccgttcgggcgtctagtaccttactcttcacactgagttatcccgatgataagaccgggaaaaattacgattttgcccaggtacttaaaaggagtatctgtctggaccagaacacccaagcctggtgcgacacatgtgagaaatatcagccaaccatccagacgagaaacattagacatcttcctgatatactggtgatcaactgcgaagttaactcctctaaggaagcggatttctggcgcatgcaagcggaagtggcctttaagatggcggtgaagaaacatggcggcgaaatttccaaaaataaggagttcgcactcgcagactggaaggagctgggctctcccgagggagtgctcgtgtgcccatcaatcgaagaattaaagaatgtttggctcccctttagtatccgcatgaagatgaccaagaataagggtcttgatgtttgtaactggacagacggcgacgaaatgcagtgggggcctgcccgagccgaagaagaacacggcgtgtatgtatatgatttgatggcaactgtggtgcacatcttagactctcgcaccggcggtagtcttgtcgcacacattaaagtcggtgaaacctatcaccaacgcaaggaaggcgtgacgcatcagcagtggtatctgtttaacgattttctgatagagccaatcgacaaacatgaagctgttcagttcgacatgaactggaaggtgcccgccattctctattacgttaaaaggaacctgaattcccgatacaaccttaacattaaaaaccctatagaagcgagtgtactgcttgccgaagcgagcctggccagaaagcagcgtaagacacacacgacctttatccctttgatgctgaatgagatgcctcagataggggatcttgtgggacttgatgccgagttcgtcacactgaacgaagaggaggctgagctgagaagtgacggaacgaagtctaccataaagccttcacagatgagtgtcgctcggataacctgtgtccgcggacagggaccaaatgagggtatcccattcattgatgactacatttctacacaggagcaggttgttgattatcttacacagtattctggtatcaagcccggcgacctagacgccaaaatctcatccaaacacttgaccacgctgaaaagcacttacctgaaacttcgattcttgatagatatcggagtgaagtttgttggccatggactccagaaagacttccgcgtcattaacctgatggtgcctaaagaccaggtcctggatactgtctatttgttccatatgccccgcaagcgcatgatatcactacgcttcttggcatggtattttctcgatctgaaaattcagggggaaactcatgacagcattgaagatgcgaggacagcattgcagctatatcggaagtaccttgaactgtccaagaatgggaccgagccggaatcttttcataaggtacttaaaggcctgtatgagaagggtcggaagatggactggaaggtgcctgagccggagggccagaccagccccaagaacgctgcggttttctcctctgtgttggcgctctag

SEQ ID NO: 127834 - DNA, 3609 bp, synthetic construct
  misc_feature 1..3609: note = Description of Artificial Sequence: Synthetic coding sequence
  source 1..3609: mol_type = other DNA
atgaatttcgagggcctggatcctggccttgctgaatacgctcctgccatgcattccgcactggaccccgtcctggacgcccatcttaacccctccctgctgcaaaatgtagaattagacccagagggtgtggccctcgaggccctacccgtacaagagtccgtacatattatggagggggtatactcagagctgcattccgtggttgctgaggtgggcgtccccgtgtcagtctcccattttgacctgcatgaggagatgctgtgggtggggtcccacggaggccatgccacaagcttcttcgggccagctctcgagaggtattcaagcttccaggtcaatggttctgacgacattcggcagattcaaagcctcgaaaacgggattctttttcttactaaaaataacctgaaatatatggccaggggcggactcattatctttgattacctactggatgagaatgaggatatgcatagcctgcttctaaccgattcatcgacgcttctggtgggcggattacaaaatcacatcatcgaaattgaccttaatactgttcaggagacacagaaatacgcagtggaaacgccaggggtgacgataatgaggcagaccaatagattttttttctgtgggcacaccagtggtaaagtgagcttgcgggacctcaggacgtttaaggtcgagcatgaattcgacgcatttagcggtagtctaagcgatttcgacgtccatggaaatctgctggctgcatgcggtttcagttctcggctgacaggactggcctgcgaccgctttctaaaggtttacgaccttagaatgatgagagccattacccctcttcaggtgcatgtcgatcccgccttcctgcggttcataccaacatatacttcccgattggccatcataagccagtctggacagtgccagttttgcgagccaaccggattggccaatccagctgatattttccacgttaaccccgttggtcccctcctgatgactttcgacgtttccgcctccaaacaggcactggcctttggcgattctgaagggtgtgtgcatctgtggactgacagccctgaaccttcctttaatccctactctcgggagactgagtttgccctgccttgtctggtggatagtttacccccccttgactggagccaggatctcttgcccctgtccctgatcccagtcccccttactactgataccctcctgagtgactggccggctgccaattctgcccctgccccccgtcgggcaccccccgtcgatgctgaaattctgcggacaatgaaaaaggtagggttcataggttacgcccccaaccctaggactaggttgagaaatcagatcccttaccgactaaaagaatcggacagtgagtttgattcgttcagccaggtaaccgagagcccggtcggcagagaagaagagccccatctacatatggtctcaaaaaaataccggaaagtgacaattaaatactccaaactcggcctggaggatttcgattttaaacattataataagaccctattcgcaggacttgagccacacataccgaatgcatactgcaactgtatgattcaggtgctctattttcttgagcctgtgaggtgccttatacagaaccatctgtgccagaaggagttctgccttgcctgcgagctgggcttcctgttccacatgcttgacctatcacgcggagatccttgccagggaaacaactttctgcgcgccttcagaacgattcccgaagcctctgccttgggcctgatcctggcagatagcgatgaagcttctggcaagggcaatctcgccagactcattcagagatggaatagatttatcctgacccagctccaccaagacatgcaggaactggagattccacaggcttatcggggcgccggtggatcaagtttttgttcatccggcgattccgtgataggacagttgttctcctgtgagatggagaactgcagtctctgtcggtgcgggtctgagaccgtcagagccagctctactttactatttactctttcgtatccagacggatcaaaatctgacaaaactggcaaaaattacgatttcgcacaggtactaaagcgatctatctgtttagatcagaacactcaggcgtggtgtgacacctgcgagaagtaccaacccaccattcagactcgaaatattcggcacctgccagatatcttggtcattaattgtgaggttaattcttccaaggaggctgatttttggcgaatgcaggccgaagtcgcctttaagatggccgtgaagaagcacgggggtgagatttctaaaaataaggagtttgcactcgccgattggaaggaacttggatcaccggagggagtgctagtctgtccgagtattgaagaactcaaaaatgtatggctgcctttttctattaggatgaagatgacgaagaacaaggggctagacgtctgtaactggactgatggagacgagatgcagtgggggccagccagggccgaggaagagcatggcgtgtacgtgtacgatctcatggctaccgtcgtgcatatactcgattcgagaaccggcggtagtctggttgctcacatcaaggtgggcgagacgtatcatcaacggaaggaaggagtgacccaccaacagtggtacctgtttaacgatttccttattgaacccattgataagcacgaggcagttcagtttgacatgaactggaaggtgccggctatcctctattatgtcaagagaaacctcaatagcagatataacttgaacatcaagaatcctattgaggcgtccgtgctgttggcagaagcttcccttgcaaggaagcagcgtaagacccataccacattcatcccgctgatgcttaacgagatgcctcaaatcggtgacctagttgggctggacgcggaattcgtcactttaaacgaagaagaggccgaactgcgctctgacggaacaaaatccaccatcaagccttcacagatgagcgtagctcgaatcacatgtgtacgtggacaaggaccaaatgaaggaattcctttcatagatgactatatctctacccaagaacaggtcgttgattatctgactcagtatagtggcattaaacccggcgacctggatgccaagatatctagtaaacatctgaccactttgaaaagtacatatcttaagcttagattcctgatagacattggcgtaaaatttgttggccatggcttgcagaaggacttccgagtcatcaacctcatggtgcctaaggatcaggtgctggacacagtttatctctttcatatgcctaggaagaggatgatcagccttcgtttccttgcttggtactttctcgatttgaagatacaaggggaaactcacgacagcattgaggacgctcgcactgccctgcagctctaccgaaaatatttagaactgagcaaaaacggtactgaaccagaatcctttcataaagtcctgaaggggttatacgagaagggtagaaaaatggattggaaggtcccagagcctgaagggcagacaagtcccaagaatgctgcagtgttcagttccgtgttagccctctag

SEQ ID NO: 127835 - DNA, 987 bp, synthetic construct
  misc_feature 1..987: note = Description of Artificial Sequence: Synthetic coding sequence
  source 1..987: mol_type = other DNA
atggacgccgtgctgctggagcatttcccaggcggacttgatgcttttccatcatcatacttcgatgaggatgacttctttactgaccaaagctctagggatccactggaagatggtgatgaactcttagcagacgagcaggcagaggtcgaattccttagtcatcagctccatgagtactgctatcgggatggcgcctgcctgctgctccagccagcgcccccagctgcccctctggcgcttgccccaccctcttccgggggcttaggtgagcctgatgacgggggaggaggaggatactgttgcgaaactggagcccctcctggcgggttcccctactcccctggctctcccccttcatgcctcgcatacccttgtgccggggccgcagtgctgtcccctggggcccggctcagaggcctgtctggggcagctgccgcggccgcacgtaggcgtcgacgggtgcggagcgaagcagagcttcagcagctgaggcaggcagccaacgtccgcgagcgcaggagaatgcagtccatcaatgatgccttcgaggggttaagatcacatattcccaccctgccgtacgagaaacgcctgagcaaggtggatacacttagacttgcgattgggtacatcaatttcctgtctgagctggttcaggcagacctgcctcttaggggtggtggtgctggaggatgcggcggtcctgggggcggcggcaggctcgggggcgattctcctggttcccaggcacagaaggtgattatctgtcatcgcgggactaggtctccctcacccagtgatcctgattatggcctgccacccttggccggccacagtctctcgtggaccgacgagaagcagctcaaggaacagaatataatacggacagccaaggtgtggacgcctgaggaccccaggaagctcaacagcaagagcagcttcaacaacattgagaacgagcccccatttgagttcgtgtcatag

SEQ ID NO: 127836 - DNA, 852 bp, synthetic construct
  misc_feature 1..852: note = Description of Artificial Sequence: Synthetic coding sequence
  source 1..852: mol_type = other DNA
atgaatggcgaggaacagtactacgcagcaactcaattatacaaggatccctgcgctttccagcgagggcctgctcccgaatttagcgcctcgccacctgcatgtctctatatgggccgccagcccccgcctccacccccacatccttttcccggagctctcggggctcttgagcaaggcagcccaccagatatctccccctatgaagtgcctccactcgcagacgatcccgccgtggcacacctgcatcatcatctgcccgcccagcttgcgctgccccatcctccagccggcccatttccagaaggagccgagccaggagtgctcgaggagcctaatcgagttcaactgccattcccttggatgaaaagtaccaaggcccatgcctggaaggggcagtgggcgggcggagcatacgccgctgagcccgaggagaataaaaggaccagaaccgcttatacaagggcccagctcctggaactcgagaaagagttcctattcaacaagtatatctctcgccctcgccgggtggaactggcagtgatgctgaatctgaccgaacggcatatcaagatttggttccagaatagacgaatgaagtggaaaaaggaggaagataagaaacgcggaggggggacggccgttgggggcggcggagtcgccgagcctgagcaggattgcgcagttacaagcggagaggaattactggcccttccaccccccccccctcccggaggggcagtgccacccgccgcacctgtggccgctcgtgaaggaagacttcctcccggtctcagcgccagtccacagccttcttctgtcgctcctagaagaccccaagaaccccgatag

SEQ ID NO: 127837 - DNA, 1398 bp, synthetic construct
  misc_feature 1..1398: note = Description of Artificial Sequence: Synthetic coding sequence
  source 1..1398: mol_type = other DNA
atgctgcctctctggacactgagcctgctcttgggggccgttgcgggaaaggaagtgtgctacgagcggcttggctgtttttctgatgattccccttggtctggcattacagagagacctctacacattctgccttggtctcctaaagatgttaacacacgatttctgctttacactaacgagaaccccaacaactttcaggaggtggcagccgatagctcatccatctcgggcagtaatttcaaaaccaatcgcaaaacaaggtttattatacatgggtttatagacaagggagaggagaattggctagccaatgtctgcaaaaacctcttcaaagtagagagtgtgaactgtatttgtgtcgactggaagggcggctcaaggacaggctatactcaggcaagccaaaacattcggatcgtgggagcagaggtggcctactttgtagaattcctccagagtgctttcggctattccccatccaatgtgcacgtcattgggcactccttaggagctcacgccgctggagaggctggtagacgcacaaacggcactataggccgcattacagggctggaccccgctgaaccatgttttcaaggaacccctgagttagtcagactcgatcctagcgacgctaaatttgtagatgtgattcatactgatggggcccctatcgtgcccaatcttggattcggcatgtcccaggtggttggtcacctggatttcttccctaatgggggagtagagatgccgggatgtaagaaaaacatactgtctcagatcgtagatatcgatggaatatgggagggcacaagagattttgctgcttgtaaccacctgaggtcttataagtattacactgacagcatcgtgaatccagatggttttgccggctttccatgtgccagctacaacgtttttaccgcgaacaaatgttttccgtgtccctcaggcgggtgccctcagatgggacactatgctgaccgctaccctggcaaaaccaacgatgtgggccagaaattttatttagacacaggagatgcctcgaatttcgctcggtggagatataaggtttccgtgaccttatctgggaaaaaggtgacaggtcatattctggtgagcctcttcggcaacaagggtaattcgaagcagtacgagatcttcaagggcacactgaagcccgattctactcattccaatgagtttgatagcgatgtggacgtgggagatcttcagatggttaaattcatttggtataacaacgtgataaaccctacccttcctagggtcggcgcctctaagattatcgtcgagactaacgttggtaagcagttcaacttctgttcacccgagaccgtaagggaggaagttttactgaccctgactccttgctag

SEQ ID NO: 127838 - DNA, 3372 bp, synthetic construct
  misc_feature 1..3372: note = Description of Artificial Sequence: Synthetic coding sequence
  source 1..3372: mol_type = other DNA
atgaacagcccaaacgaatctgctgacggcatgagcggtcgagagccttctctggagattttgccccgaactagtttgcactcgattccagtaacagtagaagtcaaacctgtacttcctcgtgctatgcccagttctatggggggaggaggaggaggttctccatcaccggtggagctgaggggagcactagtgggcagcgtggatccgaccttgagggagcagcaactgcagcaggagctgctggcccttaagcagcagcagcagctgcagaagcaactactattcgccgaatttcagaaacagcatgaccatcttaccaggcagcacgaagtccagctgcagaagcatctgaaacaacagcaggaaatgctggccgcaaagcagcagcaggaaatgttggctgcaaaacgccagcaggagctggaacagcagcggcaacgcgagcagcagaggcaggaagagctggaaaagcaacgactcgagcaacaactgctgatccttagaaataaggaaaagagtaaagaatctgctatcgctagtactgaggtcaaactgaggctgcaggagtttttgctttccaagtcaaaggagccaactcctggcgggctcaatcatagcctgccccagcaccccaaatgttggggagcccaccacgccagtctcgatcagtccagtccaccgcagagcggaccgcctggcacccctccctcttacaagctacccctgcctggaccgtacgatagtcgagacgattttcccctccgcaagacagcttccgagcctaatctgaaggtgcgtagccgcttaaagcaaaaagtggcagagcgccgatcttcacccctgttgaggaggaaagatggaaccgtgatatcaaccttcaaaaagcgggctgtggagatcaccggtgccgggcccggagcttcttcagtatgcaactccgcccccggttctggacccagctccccaaatagctctcacagtactattgctgaaaacggatttacaggctccgttccgaacataccaactgaaatgctgccccagcatcgggccctcccactcgatagcagcccaaaccagttcagtctctataccagtccaagtttaccaaacatctccctgggtttgcaagccaccgtaacagtaacgaatagccacctcactgcttctccaaaactgagcacacagcaagaggcagagaggcaggcgctgcagtcgttgagacagggcgggacactgacagggaaatttatgtcaaccagcagcattcctggttgccttttaggagtggccctggaaggcgacggctctcctcatggccacgcgagcctgctccagcacgttctgctactcgagcaagcacgccagcagtccacgcttatcgccgtcccccttcacggacagtctcccctagtgaccggcgagcgtgttgcaactagcatgaggacagtgggtaaactgccccggcaccgaccactgagccggacgcagtcttccccgttgccccagtcaccccaggcgctgcagcagctggtcatgcagcagcagcaccagcagtttttggagaaacagaaacagcagcaattacagttaggaaaaatcctgaccaagactggggaactgccacgccaaccaacaactcacccagaggaaacggaggaagaactgactgaacaacaggaagtccttttgggggagggcgctctaacaatgcccagagagggaagcacggaaagtgagagcactcaagaagacctggaggaagaggatgaagaagacgatggcgaggaggaggaggattgcatccaagtcaaggacgaagaaggtgagagtggggcggaggagggccccgatttggaagaaccgggtgctggatacaagaaactgttcagtgatgctcaacccttgcagccgctccaggtgtaccaggctccactgagtctcgcaacagtgccacaccaggcgctgggaagaactcagtccagccccgcagcgccagggggaatgaagagtccacctgatcagcctgtgaaacacttatttacaaccggggtggtgtatgatacatttatgctgaagcatcagtgcatgtgcgggaacacccacgtccacccagagcacgccggcagaatccagtcaatctggtccaggttacaggagacaggcttgctatctaagtgcgagagaattagaggacggaaagccacattggatgaaattcagaccgttcactccgagtaccacaccctgttatatgggacgtctccactcaatcggcaaaagctggactcaaagaaactgctggggcccatctcacagaagatgtacgccgtgttgccttgcggggggattggggtcgacagtgacacggtgtggaacgaaatgcatagctctagtgctgttaggatggctgtgggatgcctgctagagttggcgttcaaggtggcggcaggcgagttgaagaatggattcgccatcatcagaccacctgggcaccacgcagaagaatccacagctatgggtttttgctttttcaactctgtggccatcaccgctaaactgctgcagcaaaaactgaatgtcggcaaggtcctgattgtggattgggacattcatcatggtaatggaacgcaacaagctttttacaatgacccttcggtgttgtatattagcctgcacaggtacgataatgggaatttcttccccgggtcaggcgctccagaggaagtcgggggcggacctggcgttgggtacaacgttaatgttgcttggacagggggagtggacccccctattggggatgtcgagtatctcacagccttccgaactgtggtcatgccaatcgcccacgaattttccccggacgtggtgcttgtctccgccggattcgacgcggtggaagggcatctgagccccctcggcggatattctgtgactgcaagatgctttgggcatctgaccaggcagctgatgacactggcagggggtagggtcgtactggcactcgaaggtggccacgatctgactgcgatatgtgacgctagtgaggcctgtgtatcggcgctgctgagcgtggagctgcagcctcttgatgaagctgtcctgcagcaaaaaccaaatatcaacgccgtcgccacactggaaaaagtcattgagatccagtcaaagcattggtcctgcgttcaaaagttcgccgcaggcctcgggcggtctctgagagaggcccaagcgggtgagactgaagaggctgaaactgtgagtgcaatggcccttctgagcgtgggggccgagcaagctcaggcagcggcggccagagaacactcccctcggccggctgaagaaccaatggagcaggaacccgcgctgtag

SEQ ID NO: 127839 - DNA, 1128 bp, synthetic construct
  misc_feature 1..1128: note = Description of Artificial Sequence: Synthetic coding sequence
  source 1..1128: mol_type = other DNA
atgaatacaagccatcttctggctctgctgctccctaaaagcccccagggggagaaccgatcaaagcccttgggcactccgtataatttctcggagcactgtcaagattcggtcgatgtgatggtgtttattgtcactagctactctatcgagacggtggtgggcgtcctggggaacctctgcctcatgtgcgtgacggtgagacaaaaagagaaagcgaacgttacaaatctcctcatcgcgaaccttgctttctcagattttttgatgtgtctgctctgccagcctctaacagctgtgtacacaatcatggactattggatctttggcgagacactatgcaaaatgagcgcgttcattcaatgtatgtctgtaacagtgtccatactgtctctggttctcgtggcactagagcgtcaccaactcataataaatccgaccggttggaagccgtccatctctcaggcctacctcgggatagtgcttatttgggtgattgcctgcgtgttgtcattgccattcctagctaatagcattcttgagaacgtgtttcataagaatcactccaaagccctcgagttcctggcagacaaagtggtttgtaccgagtcttggcccttagcgcatcaccggactatatacaccacattcctgctgctctttcagtattgtctgccactaggattcatcctggtctgctatgcaaggatttatcggcggttgcagcgtcagggacgtgtgttccacaagggtacctacagtcttcgggcgggtcacatgaaacaagtgaatgtcgtgcttgtcgtgatggtggtggcgttcgcggtgctgtggctgcccttgcacgtgttcaactcgctggaagattggcatcatgaagcaattccgatctgccacggaaatcttatcttcctagtgtgtcatttgctggccatggcatccacatgcgtgaaccccttcatctacgggttcctgaataccaacttcaagaaggaaataaaagctctggtgttgacttgtcagcagtccgcacctttggaggaaagtgaacacttgcctctgtcaaccgtgcataccgaggtcagcaaaggttctttgagactgtctggacggtctaatcctatttag

SEQ ID NO: 127840 - DNA, 1128 bp, synthetic construct
  misc_feature 1..1128: note = Description of Artificial Sequence: Synthetic coding sequence
  source 1..1128: mol_type = other DNA
atgaacacctcacacctacttgcattattactgcctaagtctccccagggcgagaatagatctaagccgctgggcacaccttataactttagcgaacattgccaggacagtgtggatgtaatggtgttcattgtgaccagttactctatcgaaaccgtggtgggagtgctcggcaatctctgcctgatgtgtgtgacggtccgccagaaggagaaggccaacgtaactaacttgctaatcgccaatttagcctttagtgatttccttatgtgtttattatgccagcctctgactgccgtctacacaattatggattattggatcttcggcgagacactctgtaagatgagtgcattcattcaatgcatgagcgtgaccgtttctattctttctctggttctggtcgctctggagaggcaccagttgattatcaatcccactggatggaaaccttccataagtcaggcctacttgggaatcgtgttaatctgggtgattgcatgtgtactctctctgcccttcctggcaaatagtattctcgagaacgttttccataaaaatcactcaaaagccctggaattcctggcagataaggtggtgtgcaccgaatcatggccgctggcacaccacaggacaatatatacaacatttctactgctctttcagtattgtcttcctttggggtttatcctcgtctgttacgccagaatctatcggagactgcaacgacaagggagagtgttccacaaaggcacgtattccctccgggccggtcacatgaagcaggtgaatgtggtcctcgttgttatggtggtggcattcgctgttttatggctgcctctccatgtattcaacagcctggaagactggcaccacgaggcaatcccaatctgccacgggaatcttattttcctggtgtgtcatctattggctatggccagtacttgcgtcaatccgtttatttacggattcctgaacaccaattttaagaaggagatcaaggccctcgtcttgacctgccagcaaagcgcacctctggaggaatcagagcaccttcccctgtcaacagtgcatactgaagtgagcaagggtagtttgagactctccgggcgaagcaatcctatctag

SEQ ID NO: 127841 - DNA, 1797 bp, synthetic construct
  misc_feature 1..1797: note = Description of Artificial Sequence: Synthetic coding sequence
  source 1..1797: mol_type = other DNA
atgctcaagctggttggaggcggcggcggacaggattgggcgtgttctgtggctggcacatcattgggcggagaggaggccgcattcgaggttgccaggcccggagaccagggaaaagcaggcgggggatctcccggctggggctgcgcgggtatccctgactctgctccaggcgcaggggtcctgcaggccggcgcagtgggccctgcgcggggagggcagggtgccgaggaggtgggggagagtgccggcggaggcgaagagcgcagggttcgccacccccaagcacctgctctccgcctgctgaatcgcaagccgcaggggggaagcggggaaatcaaaacaccagaaaacgatctccagcgaggaagactctcacgaggtccccggaccgctccaccggccccaggaatgggagaccggtctgggcaacaggaaaggtccgtaccccatagccctggagcccctgtcggcactagcgcagctgctgtcaacggcctcctgcacaacggcttccaccccccaccagtgcaaccgccccacgtatgctcgaggggccccgtggggggaagcgacgccgcaccgcagaggttgcccttgctccctgagttacagccacagcccctgctaccccagcatgactcccccgctaaaaagtgtcgccttcggcggcgcatggattctggaaggaaaaaccggcccccttttccatggttcgggatggatattggcggtaccctggtgaagttagtttacttcgagcccaaagatattactgccgaggaggaacaggaagaagtagagaatctcaagtccattcgcaagtacttaacaagtaacaccgcctatgggaaaaccggcatcagagacgtacacctggagctgaagaatctgacaatgtgtggtaggaaaggcaacttgcatttcatacgtttccccagttgcgccatgcaccgattcatacagatgggttccgaaaaaaacttcagctccttgcacaccactctgtgcgcaacaggcgggggggccttcaagttcgaggaagacttccgcatgatcgcggatctacaactgcacaaactagacgagctggattgcctaattcagggtctattgtacgtagactcagtgggattcaatgggaagcctgaatgttactacttcgagaacccaactaatccagagttatgtcaaaaaaagccctattgtctggataatccatacccaatgctcctcgtgaacatgggatccggcgtatctatactcgcagtatattcaaaggacaattataaacgcgttacaggcaccagcctgggcggggggacgtttctgggcctgtgctgtctcttgacaggatgcgagacattcgaagaagccctggaaatggccgccaaaggtgattccaccaatgtggataaactcgtaaaggacatttacggcggggactatgagcgtttcggcttgcagggcagcgctgtcgcaagctctttcggcaacatgatgagtaaggaaaagcgcgattctatctcgaaagaagatctggcacgagctacactagtaacaatcaccaacaacattggctctattgcccgtatgtgcgccctgaatgagaacatcgaccgcgtggtgtttgtcggcaattttctcagaattaatatggtgtcgatgaagctcttggcgtacgcgatggatttttggtcaaaaggccaactgaaagcgctgtttctcgaacacgaaggctacttcggcgcggtaggcgcacttctagaactgtttaagatgactgatgacaaatag

SEQ ID NO: 127842 - DNA, 945 bp, synthetic construct
  misc_feature 1..945: note = Description of Artificial Sequence: Synthetic coding sequence
  source 1..945: mol_type = other DNA
atgaagttgatcaatggtaaaaaacagaccttcccctggttcgggatggatattgggggcactctggttaaattggtgtacttcgagcccaaggacatcaccgcggaagaggagcaggaggaggtggaaaatcttaaatcaattagaaaatatctcaccagcaacaccgcctacgggaaaacaggaatacgggacgtgcatctagagttgaagaaccttactatgtgcggcagaaagggaaatctgcactttatcagattcccaagctgcgctatgcaccgtttcatccagatgggatcagagaaaaatttctccagcctgcataccactctctgcgctaccggcggaggggcctttaaatttgaggaggattttagaatgattgccgacttgcaactccacaagctggacgaactggactgtctcatccagggcctactgtatgtagactccgtcggattcaatggcaaacccgagtgctactattttgagaatcccactaaccccgaactgtgtcagaaaaagccttactgcctagataatccataccccatgctgctggtgaacatggggagtggggtgtctatcctagccgtatatagcaaggataattataaaagggtaactggcacaagtttcggaaacatgatgagcaaagaaaagcgcgattccatctctaaggaggatttggccagagccaccctcgtgactataacaaataatatcggctcaattgcgcgaatgtgtgccctaaatgaaaacattgacagagtggtgtttgttggtaattttctaaggatcaatatggtctccatgaagctgcttgcttatgccatggacttctggagtaagggccagcttaaggccctgttcctcgaacacgagggatacttcggtgctgtgggcgcactgctggaactatttaagatgacggatgataaatag

SEQ ID NO: 127843 - DNA, 1122 bp, synthetic construct
  misc_feature 1..1122: note = Description of Artificial Sequence: Synthetic coding sequence
  source 1..1122: mol_type = other DNA
atgaagctgatcaatggtaaaaagcagacttttccctggttcggcatggatatcgggggaactctggtcaaacttgtgtattttgagcccaaggacatcaccgcagaggaagaacaggaggaggtggaaaacctgaagagcatccggaagtacctcacctccaatactgcgtatggcaaaacgggtatacgggatgtacaccttgaacttaagaacctgacaatgtgcggtaggaagggcaacctgcacttcatacggtttccctcatgcgccatgcaccgcttcatccaaatgggttctgaaaaaaactttagcagcctccacactaccctttgtgccactggaggaggcgctttcaagtttgaggaagatttcagaatgatcgcagatctccagctgcacaaactggatgaactcgactgtttaattcagggactgttgtatgtggattctgtgggcttcaatggcaagcccgagtgctactattttgagaatccgacaaatcctgagctgtgtcagaagaagccctactgcctcgacaatccgtacccaatgcttttggtgaatatgggctctggcgtttccatactcgcggtgtacagcaaagacaattacaagcgggtgacaggaacctctctggggggcggcacctttctcgggctttgctgtctattgactggttgtgaaacctttgaggaagctctggaaatggccgctaagggagattccactaacgtagataagctcgtcaaagacatttatggaggcgactacgaacgattcggcttgcaggggagcgctgtggcgtctagttttgggaacatgatgtctaaggagaagcgggatagcattagcaaagaggatctcgcgagggccactctcgttacgatcaccaacaacattggaagcatcgctcgaatgtgtgctctcaacgagaatatcgatcgggtggtgtttgtcggcaactttttacgcattaacatggtgtcaatgaagcttctcgcatacgctatggatttttggagtaagggccagctgaaggcactgtttctggaacatgagggctattttggcgccgttggtgctttgctagaactgtttaaaatgaccgatgacaaatag

SEQ ID NO: 127844 - DNA, 1203 bp, synthetic construct
  misc_feature 1..1203: note = Description of Artificial Sequence: Synthetic coding sequence
  source 1..1203: mol_type = other DNA
atggccaaaagcaagcacgcactgcttccattctgccacggaatgatgcagcaagagggtctccaccaaatgcagtccctcgatctcgggctgctcagccttcaaaacagtttcccctggttcggaatggacatcggaggaacacttgtgaaattggtgtattttgagcccaaagatattacagcggaggaagagcaggaagaggttgaaaatttgaaaagcatccgtaagtatctgacgagcaacaccgcctacggcaaaacagggatccgagacgtccatctggaactcaagaacctgactatgtgtggtcgcaagggaaacttgcacttcatcaggttcccgtcttgcgccatgcaccggttcattcagatgggaagcgagaagaactttagcagcctacacaccaccctttgtgccaccgggggaggggccttcaagtttgaagaggacttccgtatgatcgccgacctacaacttcacaaactggatgagctggattgcctgattcaggggttgctgtacgtggacagcgtagggtttaacggaaagccagaatgttattactttgagaaccctacaaatcccgaactctgccagaaaaaaccctactgcctggataacccctatcccatgttgctggtgaacatgggttccggggtctccattttagctgtgtattcgaaagacaattataagagggtgaccggaacctccctcggcgggggaacttttctgggactttgctgcttattgacagggtgcgagacctttgaagaggctctggagatggcagccaaaggagatagtacaaacgtggataagctcgtcaaagatatctacggcggagattatgaaagatttggcctgcaggggtccgccgtggcctcatccttcgggaacatgatgtccaaagagaaaagagatagcatcagcaaggaagacttggctagagccaccctggttacaattactaataatatcgggtccattgctcggatgtgcgctctgaatgagaacattgatagggtagtgttcgtggggaacttcctgcgtattaatatggtctccatgaaattgctggcctatgctatggacttctggtccaaagggcagttaaaagccttgttcctggagcacgagggctacttcggcgccgttggtgccttgctggaactgttcaaaatgactgatgacaagtag

SEQ ID NO: 127845 - DNA, 1386 bp, synthetic construct
  misc_feature 1..1386: note = Description of Artificial Sequence: Synthetic coding sequence
  source 1..1386: mol_type = other DNA
atgggcgatcgctctggccaacaggaacgatctgtcccccactcccctggagcccccgtcggcacctctgctgccgctgttaatggcctactgcacaatggctttcacccccctcccgttcagcctccccatgtgtgttcaagggggcctgtgggtggtagcgacgccgccccccagagattacccctgcttcctgaattgcagccccaaccactgctccctcaacacgatagcccagcgaaaaaatgccgcttgagaaggagaatggactctggacggaagaaccgtcctccttttccctggtttgggatggatataggaggcactctggtgaagctcgtgtacttcgagccgaaggacataacagctgaggaggaacaggaggaggtggaaaacctgaaatcaattagaaaatacctaacctctaacaccgcttatggaaaaacgggcattagggatgtgcatttggaactcaagaacctgactatgtgcggaaggaagggaaatctgcatttcatccgcttccccagctgcgccatgcatcgcttcatacaaatggggtctgagaaaaacttttcctctctgcatactacgctgtgcgccaccggaggaggtgccttcaagttcgaagaggatttcagaatgatcgccgacctgcagctgcataaacttgacgagctggactgcctgatccagggtctgctatatgttgactctgtgggatttaatgggaaacccgaatgttactacttcgaaaatcctacaaatccagaactatgtcagaaaaagccctactgcctggataatccatacccaatgctgcttgtgaatatgggatctggggtgagcattctggcagtgtatagtaaggataactataaaagggttacaggcaccagtcttggaggagggacattcctaggtctgtgctgtctgctcacaggatgcgagacatttgaggaggcacttgaaatggcagcaaaaggcgactctacgaacgtcgacaaactagttaaggacatctacggcggagattacgaaaggttcggattacagggtagcgccgtcgcttctagtttcggaaatatgatgtccaaagagaaacgtgacagcatatcaaaagaagacctagctagagctaccttggttaccatcacgaataacattgggagcatcgcccgtatgtgcgcgttgaacgagaatatcgacagggtagtgtttgttggaaacttcttaagaatcaatatggtctctatgaagctgcttgcctatgcaatggacttttggagtaaaggccagctgaaagcattgtttctggagcacgaggggtattttggagcagtcggggcacttcttgagctcttcaagatgaccgatgacaaatag

SEQ ID NO: 127846 - DNA, 1713 bp, synthetic construct
  misc_feature 1..1713: note = Description of Artificial Sequence: Synthetic coding sequence
  source 1..1713: mol_type = other DNA
atgcgccgcttaggtcccttccacccccgggtccactgggcggctcctccatccctgtcctccggcctgcatagattgctattcttgaggggcacccgcattccatcctctactaccttaagtcctccacgtcatgactccttgagtctcgacgggggcaccgtcaatccccccagggtgagagagccaactggcagagaggcattcggcccaagtcccgcatcaagtgattggcttcctgcaagatggcggaacgggagaggaggtaggccaagggctcggctttgctctgggtggactgccgctgaggaagcgcgcagaaaccccactctaggtggtctcctcggcaggcagagactgcttttgaggatggggggagggcggctgggcgctccgatggagagacacggccgggctagtgcgacgtccgtgagctcggctggtgaacaagctgcaggcgatccagaagggaggagacaggaacctcttcgaaggcgggcgagttcggcctcggtacctgcggtcggtgcctctgcagaaggcacaagacgcgatcgcctcggatcttactccgggcctacaagcgtctctagacagagagtcgagagcctgaggaaaaagagacctcttttcccctggttcggcctcgatataggagggacattagtgaaattggtttatttcgagcctaaggatatcacggccgaggaggaggaagaagaagtggaaagtctgaagtcaatcaggaaatacctgacttctaacgttgcttacggtagcaccggcattcgggacgtccacctcgaactcaaagacctgaccctgtgtggcaggaaaggtaacctgcatttcattaggtttccgacccatgatatgccagccttcatccagatgggtcgggataagaacttcagcagcctgcatactgtgttttgtgctactggcggcggagcctacaagttcgaacaggactttttaaccataggcgacctccagctgtgcaagctcgacgagctggactgtctgatcaaaggtatcctgtatattgacagcgtgggcttcaatggaaggtcccagtgctactacttcgagaatcccgctgacagtgagaagtgccagaaactgccatttgacttgaagaatccgtatccacttctcttggtcaacattggatccggggtcagcatcttagccgtgtacagcaaggataactataagagagtcacagggactagcctgggtggcgggaccttcttcggcctgtgctgcctgctaacgggttgtactacgtttgaagaagccttggagatggccagccggggggacagcaccaaggtggataaactagttcgggatatttatggcggcgactatgaacggtttggtctccccggatgggctgtggcttcctccttcggcaacatgatgtcaaaggaaaagcgggaggcagtgtcaaaagaagatcttgcaagagccactttaattactattacaaacaatataggcagtatcgcacggatgtgtgctctgaacgagaacattaaccaggtggtttttgtgggtaacttcctcagaattaatactatcgcgatgcggctcttggcttacgccctggattattggtcaaaagggcaactcaaggcactgttcagtgagcacgaggggtacttcggagccgtgggagccctcctggaactccttaagatcccttag

SEQ ID NO: 127847 - DNA, 1161 bp, synthetic construct
  misc_feature 1..1161: note = Description of Artificial Sequence: Synthetic coding sequence
  source 1..1161: mol_type = other DNA
tctggaagagtcaatccagctggggggctcgggtgttctgaatccgggaccttcggtgggccgcctgcgcccatagtatttccatggttcggtctagacataggcggtacccttgttaagctggtatactttgaacccaaggacatcacagccgaagaagaggaagaagaggtcgaaagtctgaagtcaatccgtaaatacttaacttctaacgtggcctacggttcaaccgggattagagacgtgcacctggagcttaaagatctcacattatgtggaaggaaaggaaatctccactttattcgctttcccactcacgacatgccagcctttatccagatgggacgcgacaaaaatttcagcagcttgcatacagtcttctgtgctactggcgggggtgcatataagtttgagcaggactttcttactatcggtgatctccaactgtgcaaactcgacgagctagactgtttgatcaaggggattctttatatcgattccgtgggctttaatggacgctcccagtgctattattttgaaaatccagcagacagtgaaaagtgccagaaactgccctttgacttgaagaatccctatcccctgttactcgtgaacatcggatcaggagtctctatcctcgccgtgtactctaaagacaattacaagcgggttactgggacaagcttgggcggcgggacattctttgggctgtgctgcttactcacgggatgtactacgtttgaggaggccctggaaatggcttctcgcggtgacagcacaaaagtggacaagctggtgcgcgatatctacggtggcgattatgagcgtttcgggcttcctggttgggctgttgcatccagctttggcaatatgatgagtaaagagaaacgggaggcggtgtcaaaagaggatttggcacgcgcgaccctgatcacaataacaaacaacattggaagcatcgcacggatgtgcgcgctgaatgagaatatcaaccaggtcgtctttgtgggcaacttcctccggatcaataccatcgcaatgcggttattggcatatgctctggattactggtccaaaggccagctgaaagccttattttcagaacacgaaggatacttcggcgcggtgggcgcactactggagctattgaagattccatag

SEQ ID NO: 127848 - DNA, 840 bp, synthetic construct
  misc_feature 1..840: note = Description of Artificial Sequence: Synthetic coding sequence
  source 1..840: mol_type = other DNA
atgccagcattcatacagatgggcagggataagaatttcagttccttacatacagtcttctgtgccacaggcgggggcgcatacaagttcgaacaagacttcttaacaatcggagacctccaattatgcaaattagacgaactcgattgcttgattaagggcattttgtacattgattctgtcggattcaatggccggtcccagtgctattattttgagaatcctgcagacagcgagaagtgtcaaaaactgccattcgatctgaagaatccctacccacttctgctcgtcaatataggctccggagtttccatcttggcagtgtattcaaaggacaactacaaaagggttacaggcacttcactgggtggcgggacttttttcggcctatgctgcctgctgacgggctgcactactttcgaggaggctctcgagatggcgagtcgcggggattcgaccaaagtagacaagcttgttcgagatatttacggtggggactacgaacgctttggcctgcctggctgggccgtcgccagcagctttggtaacatgatgtcaaaagagaagcgcgaggcagtatctaaagaggacctggcccgcgcaactctgataacaatcacaaacaatatcgggtcgattgctcgcatgtgcgcgctgaacgagaacataaaccaggtggtgttcgtaggcaatttcctgcgtatcaatactattgcaatgcggctgcttgcttatgctttggattactggtccaaagggcaactcaaggccctattttccgaacacgagggatattttggcgccgtcggagcgctgttggagttgttgaagataccctag

SEQ ID NO: 127849 - DNA, 1113 bp, synthetic construct
  misc_feature 1..1113: note = Description of Artificial Sequence: Synthetic coding sequence
  source 1..1113: mol_type = other DNA
atgaaaatcaaggacgccaagaagccatcatttccttggttcggaatggatataggagggacattggtgaagctgtcatacttcgaacccatcgatatcactgctgaagaggagcaggaggaagtcgagtctctcaagagcattaggaaatacctgacttccaatgtcgcttacggcagcactggaatccgtgatgtccacctcgagctgaaagacctcacactctttgggagaaggggcaacttgcacttcatccgattcccgacacaagatctgcccacattcattcagatgggaagggataagaatttttcaactctgcaaacggtgttgtgtgctacgggtgggggcgcttataagtttgaaaaggattttcggacaataggcaatctgcacctccacaagctggatgagttagactgcctggtaaagggccttctgtacatagattccgtaagcttcaacgggcaggccgaatgttattatttcgccaacgcaagtgaacccgagcgctgccaaaaaatgcctttcaacctagacgatccataccctctactggtcgtgaatatcggtagcggggtgtcaatcttagctgtgcacagcaaggataactataagcgcgtgactggtacaagtcttggcggaggaacttttctcgggctctgctcccttctaacggggtgtgagtcattcgaagaggccctggagatggctagcaagggcgacagtacacaggccgataaattggtgcgcgatatatacgggggggactacgaacgtttcgggcttccaggttgggccgtagcttcttcctttgggaatatgatttacaaggagaaacgtgagtcagtttccaaggaggatctggctcgggccacactggttactatcaccaataatatcggttctgtggctaggatgtgcgccgtgaatgagaaaatcaatcgagtggtgtttgtcgggaacttcctaagagtgaatacactgagcatgaagttgctggcttatgccctcgattattggtccaaaggacaactgaaggccttgttcttggaacacgaggggtatttcggagctgtcggcgcattactaggcctccccaacttctcctag

SEQ ID NO: 127850 - DNA, 2322 bp, synthetic construct
  misc_feature 1..2322: note = Description of Artificial Sequence: Synthetic coding sequence
  source 1..2322: mol_type = other DNA
atggccgaatgcggggcttccggaagcggcagcagcggggacagtctcgacaaatccatcacccttccccctgatgagatcttcagaaacctcgaaaatgccaaacgcttcgctattgacattggtggatcactaacaaagttagcctattactctacagtgcaacacaaggtggctaaggttcgctcttttgaccattccgggaaggataccgaacgagagcacgaacccccctacgagatctctgtgcaagaggagattacagctcgtctacacttcatcaagtttgagaatacttacatagaggcatgcctggactttattaaggatcacctcgttaacacggagaccaaggtgatccaggccactgggggcggcgcttacaagttcaaggatctgattgaggagaagttgcgacttaaggtagacaaagaggatgtcatgacatgtctgatcaaaggctgtaatttcgtgcttaagaacattccgcacgaagcctttgtgtaccagaaggactccgatccggaatttcggttccagactaaccatcctcacatattcccttatctgctggtgaatatcggcagtggagtatcgatagtgaaagtagaaaccgaagatcgttttgagtgggttggcggaagctccattggcggcggtacattctgggggctaggcgcactgctgactaaaaccaaaaagtttgacgaattgcttcacctcgccagccgtggccagcatagtaacgtggacatgctcgttcgagatgtctatggtggggctcaccaaacgctgggactgtctgggaatcttatagccagttctttcggcaagagcgcgacagctgatcaggagtttagtaaagaagacatggctaaaagcctcctgcatatgatctccaacgacattgggcagctggcatgccttcatgccagactacattcacttgatcgcgtttattttggcggtttcttcatcagagggcaccctgttactatgaggactattacatacagcatcaattttttcagtaaaggggaagtgcaggcactgttcttgcgccacgaggggtacctcggggcaattggggcttttctgaaaggcgcggagcaggacaatccaaaccagtactcttggggggagaactatgccggcagttcagggctgatgagcgcctctccggagctggggccggcacaaagggcccggtcagggactttcgacttgctagagatggataggctagaacgacctctcgtggacctgcccctgcttctagacccgccatcttatgtgcccgatactgtcgaccttactgacgatgcactggcgcgcaagtactggcttacgtgctttgaagaagcccttgatggggtggtcaagagagccgttgcaagtcagccagactctgtggacgcggccgaaagggccgagaagttccgtcagaaatactggaacaaacttcagactctgcggcaacagccattcgcgtacgggacgcttaccgtcaggtctctgctggatactcgcgagcactgcctgaacgaattcaacttcccagacccctattccaaagtgaagcaacgggagaatggcgttgcacttcgctgtttccctggcgtcgttcgatccctggatgcgctcggttgggaggaaaggcagctggcattagtgaaaggactccttgctggaaatgtgttcgattggggggcaaaggccgttagcgcagtcctggagagcgatccatactttgggttcgaagaagcaaaacggaaactacaggagaggccttggctagttgactcttattccgagtggcttcagagacttaagggccccccccacaaatgcgctctgattttcgccgacaactcaggcattgacatcattttgggcgtgttcccattcgtccgcgagttactgctgagaggcaccgaggttatcctcgcttgtaattctggacctgctctgaacgacgtgacacacagcgaatcccttattgtggccgaaagaatcgctggaatggatcccgtcgtgcactcagccctgcaagaggaacggctgctcctggtgcagaccggcagctcaagcccctgtctggatctctcccgcctggataagggcctcgcggccctcgttcgggagcgcggcgctgacctggtggtgattgaagggatgggtagggctgtgcacaccaactatcatgctgccctgcggtgcgagtcactgaaacttgccgtgataaagaatgcctggttggctgagcggcttggcgggaggctgttcagtgtgatattcaaatacgaggtcccagcagagtag

SEQ ID NO: 127851 - DNA, 1455 bp, synthetic construct
  misc_feature 1..1455: note = Description of Artificial Sequence: Synthetic coding sequence
  source 1..1455: mol_type = other DNA
atgttcccaaattcaatccttggtaggcccccgttcaccccgaaccatcagcaacataacaatttcttcaccctgagtcccaccgtgtattcccaccagcagttaattgacgcccagtttaacttccaaaacgctgacctgtccagggctgtttcattacagcagctgacgtacggtaacgtttcaccaattcagacctcagctagtccgttatttagaggccggaaaaggctgagcgatgagaagaacttgcctctcgacggtaagaggcagaggttccattcccctcaccaggaacctaccgttgtgaaccagatcgtccccttaagcggagagaggcgctattctatgcctccactctttcacacacactacgttccagacatagtgcggtgtgtgccgcctttcagggaaattgctttcctggagccccgcgagattactcttcctgaggccaaggataaattaagtcaacagatactggagctttttgagacctgccagcaacagatctcagatctcaagaagaaagaattgtgccgaacgcagttgcagcgggagatacagctgctgtttcctcagtctcgcctgttcttggtcggaagtagtctgaatggatttggaacaaggagtagtgacggcgacctgtgcttggtcgtcaaggaggaaccatgtttctttcaggttaatcagaaaaccgaagcccgccacatccttacactggtacacaaacacttttgcacccgactgagcggctacattgagcgacctcaattgatcagagccaaagttcctatcgttaagttccgggataaggttagctgtgtcgaattcgatctcaacgtgaacaacatcgtgggcattagaaatacctttttattgcggacatacgcgtaccttgaaaacagggttcggccactggtcttggtgatcaaaaaatgggcctctcatcaccagatcaacgacgccagcagaggtacgctgtcttcctacagtttggttctaatggtgcttcattacttacagaccctccctgaacccatcctgccctccctccagaagatctatcccgaaagcttctcccctgctatacaactccacttggtgcatcaggccccctgcaacgtgccaccttatctcagcaagaatgaaagcaatctgggtgatctgctgctcggattcctcaagtactatgcgacagaattcgactggaacagtcaaatgatcagcgtgagagaggcaaaggctatcccgcgccccgatggtatcgaatggcggaataaatacatctgcgtcgaggaaccgttcgatgggactaacacggcacgcgctgtacatgaaaaacaaaagttcgacatgatcaaggatcagtttctgaaatcttggcatcgcctcaaaaataaacgtgacctgaactcgatcttgcccgtgcgggcagccgtgctgaagagatag

SEQ ID NO: 127852 - DNA, 1443 bp, synthetic construct
  misc_feature 1..1443: note = Description of Artificial Sequence: Synthetic coding sequence
  source 1..1443: mol_type = other DNA
atgtttcccaactccatcctgggtaggcccccattcacaccaaatcatcagcagcacaacaacttctttaccctcagtccgactgtctacagccatcagcagctgatcgacgctcaattcaactttcagaacgccgacctgtcacgcgctgtctcgctccaacagctgacatacggaaatgtgtctcctatacagacttccgcttcccctctttttcggggtaggaaacggctgagcgacgagaaaaatctgccactggatggaaagagacagagatttcactcgccacaccaagagcctactgtggtcaatcagatcgtaccgctatctggagagcgccgatatagtatgccgcccctcttccacactcattacgtgcctgatatcgtgcgatgtgtcccgcctttccgcgaaattgccttcttggaaccaagagaaattaccctgccggaggcaaaggacaagctttcacaacagattctggagttgtttgaaacctgccaacaacagatcagcgatcttaagaaaaaagagttgtgccgcacccaactgcaacgcgagattcagctgctctttcctcagtccaggctttttctggtcggatcctcacttaacggcttcggcacaaggtcctccgatggtgacctgtgtctagtagtaaaagaggagcctgttaaccaaaagaccgaagcgcgacacattctgaccctggttcacaaacatttttgtacacgcctgtccggatacatagagcgtccacagctgatacgagctaaagtgccaatcgtcaaattcagggacaaggtgagctgtgtagagtttgatttgaatgtgaataatatagtgggcatcaggaacactttcttgctgcgtacatatgcctatctggaaaaccgcgttcgccctctggtcctggtgataaagaaatgggcatcccaccatcagataaatgacgcttccagaggcaccctgtcttcatactcactggtcctgatggttctgcactacttgcagacactgcccgaaccaattctaccatccttacagaaaatttatcccgaatctttcagccctgctatccagctgcatcttgtccaccaagccccatgcaatgtgccaccttacttaagcaaaaacgagtccaacttgggcgacctcctcctgggattcctcaagtactacgctacagaatttgactggaatagccagatgatttctgtgagggaagccaaagccatcccaaggcctgatggtattgagtggagaaataaatacatctgcgtggaagagccattcgatggcaccaacaccgcgcgcgcggtccacgagaaacaaaaattcgatatgattaaggaccagttcctgaaaagctggcataggttaaaaaacaaacgggacctcaattctatcctgcctgtaagagccgcggtgctcaaacggtag

SEQ ID NO: 127853 - DNA, 1455 bp, synthetic construct
  misc_feature 1..1455: note = Description of Artificial Sequence: Synthetic coding sequence
  source 1..1455: mol_type = other DNA
atgttccctaactctatattgggacggcctcctttcactccgaatcaccaacagcacaacaatttctttactctctccccaaccgtgtactcccatcagcagcttattgacgcccaattcaattttcagaatgccgacctgtctcgtgctgtctcactgcagcaattaacatacggcaatgtgtcgccaatccaaactagcgcctcccctctattccgcggcaggaagcgcctgtctgacgaaaagaacctgcccttagatggtaagaggcagcgctttcactcaccacatcaagaacccacagtggtcaaccagattgtccctctgtcaggtgaacgccggtatagcatgccacctctgtttcacacccattatgtccctgatatcgttaggtgtgtgccccctttcagagaaattgcattccttgaaccaagagaaattacattacccgaggctaaggataaattaagccaacagattcttgaactgtttgagacctgccagcagcaaatttctgacctcaagaaaaaagaactttgtcggactcagctgcagcgcgaaatccagcttctttttccccaaagtagactttttcttgtgggctcttcccttaacgggttcggcaccagatcatcagacggagacctgtgtttagtggttaaggaggagccatgtttctttcaggtgaaccaaaagacagaagcacggcacatcttaacattagtgcataagcatttttgtacccgcctgtctggatacatagaacggccacagctgatccgcgccaaggtcccaatcgtgaaattcagagataaggtgtcttgcgttgaattcgacttgaacgtgaacaatatcgtggggatccggaatactttcctgctccggacttacgcctacctggagaaccgagttaggcctctggtgttggtgattaagaagtgggcatctcatcatcaaatcaatgacgcttcccgcggtaccctcagtagctacagtctggtcctgatggtactgcactacctccagaccttaccggaaccaatcttgccctctctccagaaaatataccctgaatcattttcccctgctatccagttgcacttagtgcaccaggctccgtgtaacgtcccaccgtatctgtctaaaaatgagtccaacctgggagatctgttactgggatttctgaaatactacgccacggagtttgactggaacagccagatgatatccgtgcgggaagccaaggccatccccaggcccgacggcatcgaatggcgaaataaatacatttgtgtggaggagccattcgacgggacgaacactgcaagggccgtgcacgaaaaacagaagtttgatatgattaaagatcagttcctgaagtcttggcaccgcttaaagaacaaaagggacctaaacagtattctcccagtgcgggccgccgtgttaaagcgatag

SEQ ID NO: 127854 - DNA, 1455 bp, synthetic construct
  misc_feature 1..1455: note = Description of Artificial Sequence: Synthetic coding sequence
  source 1..1455: mol_type = other DNA
atgttccccaattccattttggggaggcctccatttaccccgaaccatcagcaacacaacaattttttcacactcagccccactgtgtactcacaccagcaactaattgatgcccaatttaattttcaaaatgccgatctctcacgggcagtgtctctgcagcaactgacctacgggaatgttagccctatccagacgtcggccagtccacttttcaggggccgcaagcgcttgagtgatgaaaaaaatctccctctcgatggaaagaggcagcgatttcacagccctcatcaggagccgacagtggtcaaccagatagtccccctttctggggagcggaggtatagtatgccgcctctgtttcatacccactatgtacccgacatagtgaggtgcgtgcctcctttccgggagattgcatttctggagccacgagaaatcacactaccggaagctaaggataagctgtctcaacagatactcgaactgttcgagacttgccagcagcaaattagtgacctgaaaaagaaggaactatgccggactcagctccagcgcgagatacaattgctgtttccccagagccgtcttttcctcgtcggcagctccctgaacggattcggaactagaagctccgatggcgatctttgccttgtggtgaaagaggaaccatgtttctttcaggttaaccagaaaactgaagcacggcatattctgactctagtgcataaacacttctgcactagactgtcaggctacattgagcggcctcagttgatccgagcaaaggtgcctattgtcaagttcagagacaaggtctcttgcgtcgagttcgaccttaacgtcaacaatatcgtcggtattcgcaacaccttcctactgcggacttatgcatacctggaaaacagggtgcgccccttagtgttggtgattaagaagtgggccagtcaccaccagattaacgacgcaagtaggggaaccctgagtagctacagtctggtgctcatggttctccattatctacagaccttgccggagcctattttgccctccctccaaaagatctacccagaaagctttagccctgccattcagctgcacctggtgcaccaggcaccttgcaacgtgccgccgtacctgtcaaagaacgaaagcaatcttggagaccttttattagggtttcttaagtattacgccacggagtttgactggaactcgcagatgatttcagtacgagaagcaaaggcgattccacgaccggatggcatcgagtggcgtaacaagtatatttgcgtcgaagagccattcgatgggacaaataccgcccgggccgtgcacgaaaagcagaagttcgacatgattaaggaccagttcctgaagagttggcatcgcttgaagaacaaacgcgacctcaactcgatcctgccagtgcgtgctgccgtgctaaaacgatag

SEQ ID NO: 127855 - DNA, 1476 bp, synthetic construct
  misc_feature 1..1476: note = Description of Artificial Sequence: Synthetic coding sequence
  source 1..1476: mol_type = other DNA
atgtcactggtggcttacgcgagttctgacgaaagtgagcctgatgaggccgagcccgaaccagaagaggaggaggcggtggcacccacctctggtcctgcactgggcgggctcttcgcctcactccccgctccaaagggaccagccctccttcctcctcctcctcagatgctagcccctgcctttccgcctccattgctgctcccaccgccaacaggcgatcctaggctgcagccgcctccaccactacctttcgggctgggggggtttccccccccaccaggtgttagccccgcggaagcagctggagttggcgaaggcctgggcctaggactgcccagcccccgagggccaggtctgaacctaccaccccccatcggtggtgctggacctcctctcggtctcccaaagccaaaaaaaagaaaagagcccgtgaagatagccgcccctgagttgcacaaaggggacagtgatagcgaggaggacgagcctacaaaaaaaaagactatcctccagggtagttcagagggcacgggcctttctgccttgctccctcaacctaaaaatttgactgtcaaggagaccaatcggctcctactgccccacgccttttcccggaaaccctcggacggatcccctgacaccaaaccaagccggctggcctccaaaacgaaaaccagtagtctagctcccgtggtaggtacaaccacgactaccccttctccgagtgcaatcaaggccgcagcaaaatctgccgccctgcaggtgacaaagcaaatcactcaagaggaggacgacagcgacgaagaagtagctcccgaaaacttcttctctctgcccgagaaggccgaacctccgggtgtcgaaccctatccttacccaatccctactgtccctgaagagctccctcccggcacggagcctgaacctgcctttcaggatgatgccgccaatgcccccctagagttcaagatggcagctgggagttccggagctccatggatgcccaagcccggtgatgattacagttacaatcagttctcaacttacggagacgccaatgccgcaggggcttactatcaagactattatagcggcggctactaccccgctcaggaccccgcgctcgttccccctcaggaaattgcccccgacgctagctttattgacgacgaagccttcaaaagattacaggggaaaagaaacaggggtagggaggaaattaatttcgtagaaatcaaaggagacgatcagcttagcggtgcccagcagtggatgaccaagtctttaaccgaggagaagaccatgaaatccttcagtaagaagaagggagaacaacccactggacagcagcgacggaagcaccagatcacctacctgattcaccaagctaaggagagagagctcgagctgaaaaacacgtggagcgaaaataagttgtcgcgccggcagacacaggctaagtacggattctag

SEQ ID NO: 127856 - DNA, 1380 bp, synthetic construct
  misc_feature 1..1380: note = Description of Artificial Sequence: Synthetic coding sequence
  source 1..1380: mol_type = other DNA
atgtcactggtggcttatgctagttccgacgagagcgaacccgacgaagctgaacctgaacctgaggaggaagaagctgtggctccaacaagtgggccagcactcggggggttattcgctagtctgcccgcaccaaaaggtccagctctactgcctcccccaccccagatgctcgcaccagcgtttcccccgcctctgttactacctcctcctactggcgatccccggctgcagccccctcccccactccccttcggactggggggattccctccgccccctggggtgtcaccggcagaggcagcaggtgtcggtgagggtctcggcctgggacttcccagtccccggggccctggactgaacctgccgcctcctataggaggggctggtcctcctctgggtctgcccaagcccaagaaacgtaaagagcctgtgaagattgctgccccagagctccataagggcgattccgactccgaagaggacgagccgactaagaagaagaccatcctgcaggggtcaagtgaaggcacgggtctatctgcgttactgccacaacccaaaaatctgaccgtgaaagagactaataggctgttgttgcctcacgccttttctcggaaaccttccgacggtagtcccgataccaagccttctcggcttgcatctaagactaagacaagcagtctggcgcccgtagtcggaactactactacaactccctcaccctcagcgatcaaggctgcagccaaaagcgccgctttgcaggtcacaaaacagatcacacaggaagaagacgactccgacgaggaggtggctccagagaatttcttctcactccctgagaaagccgaacccccgggggttgagccgtatccctacccgatcccgactgttccagaggaactgccccccggtactgagcctgagcctgcttttcaggacgatgccgccaatgccccgctggagtttaagatggctgcaggatcaagcggggctccttggatgcccaaaccaggcgacgactatagttacaaccagttttctacctatggcgatgctaacgcggctggagcttactatcagttcaagcggctgcaaggcaaacgaaaccgcgggcgcgaggagataaattttgtcgagataaagggggatgaccagctgtcaggtgcacagcagtggatgacaaagagcctcacagaggagaaaaccatgaaaagcttttccaaaaaaaaaggtgagcagcccaccggacagcagcgccggaaacatcagataacctatttgatccaccaagccaaagaacgggaactcgagttgaaaaacacctggtctgaaaacaaactttctagacgtcagactcaggcaaaatacggcttttag

SEQ ID NO: 127857 - DNA, 1404 bp, synthetic construct
  misc_feature 1..1404: note = Description of Artificial Sequence: Synthetic coding sequence
  source 1..1404: mol_type = other DNA
atgttagcaccagcattccccccacctctgttactgccgcctcccaccggcgatccccgactccagccacctcctccactgccatttggcctgggtggattccctcctcccccaggagtatcccctgccgaagcagcaggggtgggagagggccttggcctcggtttgccttctccgcggggtcctggcttgaatcttcccccacctattggaggggcgggtccccctctggggttgcccaagcccaaaaagcggaaggagccggttaagattgccgcgcctgagctgcataagggtgactcagacagcgaggaggacgagcccaccaaaaagaagaccattttacagggcagtagcgaggggaccggcttgagcgccctgttgccgcagccgaagaatcttacagttaaagagaccaatagattactcctgccacatgcgttctcaaggaaacccagtgacggcagcccggacaccaaacctagtcgactggcctccaagacaaagacctcaagcttggctcctgtcgtgggcactactacaaccaccccatctcccagcgctatcaaggcagcagcgaagtccgccgcactccaggtcaccaagcagatcactcaggaggaagatgattcagatgaagaggtggccccagagaatttcttttcattgccggagaaggccgagccccctggagtggagccttatccttacccaatccctactgtgcctgaagagctcccgccaggcaccgaacccgagcccgctttccaggatgatgctgctaacgcgccgctcgagttcaaaatggctgctggatcatctggtgccccatggatgccaaagcctggagacgattatagttacaatcagttttctacctacggagacgcgaatgcagctggcgcctactaccagggcttacagcagcatctgggacatagtcccctgaggggaatcatgcgatttctcaattcaaagtccggtaagagaacttgcttcgtgccgagttttgattactacagcggaggatattacccggcacaggatccggccctggttcccccgcaggaaattgctccggacgcaagctttattgatgacgaagccttcaaaaggctccaggggaagcgcaacagaggccgggaagagataaatttcgttgagattaagggagacgatcaattatctggggctcagcagtggatgaccaagagtctgaccgaggagaagacaatgaaaagcttcagcaaaaaaaagggagagcagcctacgggacaacagcgcaggaaacatcagatcacttatctgatccatcaggccaaggaacgggagctcgaactcaaaaacacatggtcagagaataagctgagccgccggcaaacacaggcgaagtacggcttttag

SEQ ID NO: 127858 - DNA, 3096 bp, synthetic construct
  misc_feature 1..3096: note = Description of Artificial Sequence: Synthetic coding sequence
  source 1..3096: mol_type = other DNA
atgaaagtgaccgtttgctttggaagaactcgggtagttgtgccatgtggagacggccatatgaaagtttttagccttatccagcaggccgtgacccgatatcggaaagctatcgcgaaagaccctaactactggattcaggtgcaccggttagagcacggagacgggggcatcctggacctcgacgacatcttatgtgacgtcgctgatgacaaagaccggttggtcgcagtgtttgatgaacaggatccacatcacgggggtgatgggacgagtgcctcctcaactggaacacagagccccgagatttttggatcagagttaggcactaacaacgtgagcgctttccaaccttaccaggccacgtctgaaatcgaggtcactccttcagtgctgcgagccaacatgcccctccatgtgcggaggtcctctgacccggctttgatcggcctctccacatcagtttccgactcgaacttttcctcggaggagccctctcggaaaaatcctacccgctggtccactactgctgggttcttgaaacagaacacggcagggtctccaaagacctgtgatcgcaaaaaggatgaaaattaccgcagccttccccgtgacacctccaattggtccaaccaatttcagcgtgataatgccaggtcctccctgagtgccagccaccccatggttggcaagtggctggagaagcaggaacaggatgaggacggaacagaggaagataacagtagagtggagccggtaggacacgcggatactggcctggagcatattcccaattttagccttgacgatatggtaaagcttgttgaagtccctaatgatggaggacctctagggatccatgttgtccccttctccgcacggggtggccgcacattggggctgctcgtgaagagactcgagaaaggcgggaaggccgagcatgaaaatctattcagggaaaatgattgcatcgttcggatcaacgatggagacctcagaaaccggcgatttgaacaggcccagcacatgtttagacaagccatgcgcacccccattatctggtttcatgtggtcccggcagccaataaagagcagtacgaacagctgagccagtccgaaaagaacaattattactcatctcgatttagtccagacagtcagtacattgataatagatcagtgaattccgcagggttgcacacagtgcaaagggctccacgcctgaatcacccaccagaacagattgacagccattctaggcttcctcatagtgcgcatcctagtggcaagccccccagtgcacctgcgtctgcacctcagaatgtgtttagcactaccgtgagtagcggttacaacaccaaaaagattgggaagaggctcaatatccagctgaaaaaaggcaccgaaggcttgggcttctcgataactagtagagacgtgacaataggaggctctgctccaatctacgtcaaaaatatccttcctaggggggccgctatccaagatggccggcttaaggcgggcgacaggctcattgaagtcaatggcgtggacctcgtggggaagtcccaagaagaagtggtctccttgctccgctcgaccaagatggaggggaccgtatcactgctagtgtttcggcaggaagatgcattccaccctcgcgaactgaacgctgagcccagccagatgcaaattcccaaggaaacaaaagctgaggatgaggacatcgtgctgactcctgatggcaccagagaattcctgacatttgaagtgccactcaacgattcagggtcagccggacttggtgtgtccgtaaagggcaaccggtcgaaggaaaaccacgccgacctaggcatcttcgtgaaatccatcataaacggaggggccgcaagcaaggacggaagacttcgggtcaatgaccagctgattgcggtgaacggggaatcgttgctgggcaaaactaaccaagacgcgatggaaacattacgtcgctctatgagcaccgagggcaacaagcgggggatgatccagctcatcgtggcgcgccggatatctaaatgtaacgaacttaagagtccgggaagcccacccggtcccgaacttcctatcgagacagccctcgatgacagggagagaaggattagtcacagcttgtattctggaatagagggactggacgagtcacctagccgcaacgctgctctctcgcggattatgggtaagtatcagctttctcccacggtcaacatgccccaggatgacaccgtaatcatcgaagacgatagactcccagttttgcctccccacctgtctgaccagtcctctagctcttcccatgatgacgttggctttgtgaccgcagatgctggtacctgggctaaggctgcaatcagtgactccgcagattgttccttgtcccctgatgtcgatcccgtgttggccttccaacgcgagggttttggacggcaatcaatgagcgagaaaagaacgaagcagtttagtgacgccagtcagctagacttcgtcaagaccaggaagtctaagagcatggacctcgggatcgcagatgagacaaagctgaacacagtagacgaccaaaaggccggaagtccgagccgggatgtgggaccaagtctcggacttaagaaatcttcttctctagagagtctgcagactgccgtagctgaagtaacacttaatggcgatattccctttcacaggccacggccacgcatcatcaggggaagggggtgcaacgaatcttttagagctgctattgataaatcctacgataaacccgcggtcgacgacgatgacgagggcatggaaaccctcgaagaggacaccgaggaatcatcacggtcaggtagagagtccgtatcaaccgcaagcgatcaaccgagtcatagtctggaacgccaaatgaatgggaatcaggaaaaaggagacaaaacagatcggaagaaggataagaccggtaaggaaaaaaagaaagaccgggataaggaaaaagataaaatgaaggctaagaagggcatgctcaaagggctcggtgatatgttctcacttgctaaattgaagcccgagaaacggtag

SEQ ID NO: 127859 - DNA, 3960 bp, synthetic construct
  misc_feature 1..3960: note = Description of Artificial Sequence: Synthetic coding sequence
  source 1..3960: mol_type = other DNA
atgaaggtaacggtatgcttcggcagaactagagtggtggtgccgtgtggagacggccacatgaaagtcttcagcctgatacagcaagcggtgactaggtacagaaaagccatcgccaaggacccgaattattggattcaagtgcatcgtcttgagcatggagatggcgggatcctggatctggacgacatactctgtgacgtggccgacgataaggaccggctggtggcagttttcgacgaacaggatcctcatcacggtggcgacgggacttccgcctcctccaccggcacccagtcccctgagatttttggatctgaactgggcacgaacaatgtatcagcattccagccttaccaggcaacctcagagatcgaggtgacaccctcagtcctgagggccaatatgcccttgcacgtgaggagatccagcgaccctgctctcatcggcttaagcacctctgtttcagattctaacttctcctcagaggagcctagtcgaaagaatcccactaggtggagtactaccgccggctttctgaaacagaacacagctggcagtcccaagacctgcgaccgcaaaaaggatgagaattaccggagtcttcccagggacacatctaactggtcgaaccaattccagagagacaacgcacggtcatccctctcggctagtcatcccatggtcggtaagtggctcgagaagcaggagcaagatgaggatgggacagaggaagataatagccgcgtcgaacctgtcggccatgcagatactggtctggaacatatccccaatttctcactcgatgatatggtgaagcttgtggaggtacctaacgacgggggaccactaggcattcacgtcgttccattttctgcccggggggggagaacattaggactgctggtcaaaaggctggaaaaaggggggaaagcagagcatgaaaacctatttcgcgagaacgattgcatcgtccggataaacgatggggatcttaggaaccggaggtttgaacaggcccaacacatgtttcgacaggccatgaggacccctataatttggtttcacgtcgtgcctgccgccaacaaggagcagtacgagcagctgagtcaaagcgagaagaacaactattactcttccagattttctcctgatagccagtatatcgataaccggtctgtgaacagcgcgggtttacatactgttcagcgcgctcccagactaaaccatcctcccgagcagatagattcacatagtcggcttccgcactctgcgcacccttcagggaaacccccgagcgcacctgccagtgcgccacagaacgtgttttccaccacagtgtcaagcggatataacaccaagaaaattggaaagagacttaacatacaactgaagaaaggcactgagggacttggcttctcgatcacatcacgagacgttaccattgggggaagtgcccccatttatgtgaagaatatccttcctagaggagccgccatccaggacgggcggctgaaggccggggatcggctgatagaggtgaacggcgtggaccttgtcggtaaaagccaagaggaagtggtcagcctgctgcgcagtacaaagatggaaggtaccgttagcctgctggtgtttaggcaggaggatgctttccatccccgcgagcttaacgccgaaccttctcaaatgcagattcccaaggagactaaagcggaggatgaagacatagtcctcactcccgacgggacaagagaatttctaacttttgaagtgcccctcaatgacagtggatccgccggtttgggtgtgtccgtgaagggcaaccggtccaaggaaaaccacgccgatctggggattttcgtgaaaagcatcatcaatgggggcgctgcctccaaagatggaagattgcgcgtgaacgaccagctgatcgcagttaacggagagagcctgctgggcaagacaaatcaggatgccatggagaccctcagacgatctatgagcactgaaggaaacaaacgaggtatgatccagctaatcgtcgcccgacggatcagtaaatgcaacgagctaaagagtcctgggtctcctcccggcccagagcttcctatcgaaactgctctggatgaccgcgagcggagaatttcccattccctctactctgggattgaagggttagatgaaagcccttcacgcaatgcggcgctgtcacggatcatgggtgagtccggcaaataccagctctctcctaccgtcaatatgcctcaagatgataccgtcatcatcgaggacgacagactgcccgtcttgcccccacaccttagcgaccagtcatcttcctcctcgcacgacgacgtgggcttcgttacagcggacgcgggtacgtgggctaaggccgcaatttcagattctgccgattgcagcctgagccccgacgtagaccctgtcttggcgtttcagagagagggattcggccgccagagcatgtcggagaagcgaacaaagcagttcagtgacgcatctcagctggatttcgtgaagacaagaaagtcgaagtcaatggacctggggattgctgacgagaccaagcttaacacagttgatgaccagaaagctggaagtccctcccgtgacgttggcccttcactcgggctgaaaaagtcatcttcgctcgagagtctccagactgccgtcgccgaggtcactctgaacggcgatattccctttcataggccaagacctcgaattatacgtggccgcgggtgcaatgagtcatttagagctgcaatcgataaaagctatgataagcctgcagtggacgatgatgacgaaggaatggagaccttggaagaagacactgaagagtcgagtcggagtggtcgggagagtgtttccaccgccagcgatcaacctagccatagcttagaacggcagatgaacggaaaccaggagaagggtgataagaccgacaggaagaaagataagacaggcaaggaaaagaaaaaagacagagacaaggagaaggacaagatgaaggccaagaaagggatgctcaagggccttggagacatgttcagaatccaggccaagactcgggaattccgcgagcgccaggccagagaacgagactatgccgagattcaggacttccatcgcacttttggctgcgacgacgaactgatgtatggaggcgttagcagctacgaggggtcaatggccctgaacgcccgaccacagagtcctagggagggccacatgatggatgccctatacgctcaggtgaagaagccacgaaattcaaagcctagtcccgtggacagtaatagaagcaccccctccaaccatgaccgtattcagcggctccgtcaggagttccagcaggcaaaacaagacgaagatgtggaggacagaaggcgcacatatagtttcgagcagccatggcctaacgccagacccgcgacccagagtggcagacactctgtctctgtggaggtgcaaatgcaacggcagcggcaggaggaaagggaaagctctcaacaagcgcaaaggcagtacagtagcctgccccggcagagtcgcaaaaacgcctcctctgttagccaggattcgtgggaacagaactactctccgggcgaaggttttcagagcgcaaaggaaaatcccagatactcatcttatcaggggtcgcgcaatggctacttgggaggacacggtttcaacgcgagggtaatgctggagacacaggagctgttacggcaggagcaaaggcgaaaggagcagcaaatgaagaaacaaccgccaagcgaaggcccttcaaactacgattcctacaaaaaggttcaggacccctcttatgcccctcctaagggcccattccgccaagatgtccccccatctccctcccaagtggcaaggttgaatcggcttcaaacgccagaaaaaggaagaccattctatagctag

SEQ ID NO: 127860 - DNA, 3933 bp, synthetic construct
  misc_feature 1..3933: note = Description of Artificial Sequence: Synthetic coding sequence
  source 1..3933: mol_type = other DNA
atgaaggtaacagtttgttttgggagaactcgggtggtagttccgtgtggcgatggccatatgaaggtattcagtctgattcagcaagccgtgacaagatataggaaggcgatcgctaaggatcccaactattggatacaggtgcaccgtctggagcatggggacggaggaatcttggacctggatgacatcctgtgcgatgtcgccgacgacaaggaccggttagtcgctgtgttcgatgagcaggacccgcaccatggtggcgatggtacgtcagcctctagcacaggcacgcagtcccccgaaatttttggttctgagctgggcactaataatgtgtccgcttttcaaccctaccaggcaacctccgagatcgaagtgacacccagcgtgctgcgggctaacatgccactccatgtgagaagatcatcggaccctgctctcatcggcctctcaacatctgtatctgactccaatttcagcagcgaggagccctcgcggaaaaatcctacacgatggtctacaactgccggttttttaaagcagaacactgctgggtcccccaagacttgtgatcgtaaaaaagatgaaaactaccgtagtctgcctagagatacttccaattggtcaaaccaatttcagagggataatgcgcgatctagtctctcggcctcacacccaatggtgggaaaatggttggagaaacaggagcaggatgaggacggaaccgaggaagacaacagcagggtggagcccgtgggccacgccgatactggactagagcacatacctaatttctcattggacgacatggtcaaattagtggaggtgcctaacgatggaggtccgcttggaatccatgtcgtgcccttctccgccaggggcggacgcaccctgggccttctggtgaagcgcctcgaaaaaggggggaaagccgaacatgaaaacctgtttcgggagaacgactgtatagtaagaattaacgacggggatttgcgaaatcggcggttcgagcaggcccagcatatgttcagacaagccatgcggacacccatcatctggttccacgtcgtgccagctgcaaataaggaacagtacgaacagttgtcacagagcgagaaaaataactactactcaagcaggttttcaccggatagccagtacatcgacaacaggtccgtcaattcagcaggtctgcacactgtgcagcgcgcgcccagactcaaccatccacccgaacagattgactctcattctcggctccctcatagcgcacacccctccgggaagccacccagcgcccctgcgagtgcaccacagaacgtgttctccaccaccgtgagctcaggctataatactaaaaaaattggtaaaaggctgaatatccagctcaaaaaggggacagagggtctgggcttcagtatcacctcacgagacgttaccatcggaggctcagcaccaatctacgtgaaaaatatcctccctaggggggccgccattcaggacgggagactcaaagctggtgaccgcctgattgaggtgaacggcgtagaccttgttgggaaatctcaggaagaggtggtctctctgcttcggagcaccaaaatggaaggtacagtatccctcttggtttttcgccaagaggatgctttccatccacgggaactcaaggccgaggacgaggatattgtgttgacacctgacggaactagggagtttctaacttttgaagtccctctgaacgacagcgggtccgctggcctcggcgtctctgtgaaaggcaaccgctccaaagagaaccacgccgacctaggcatcttcgtgaagtcaattattaatggaggggccgcgagcaaggacggtcgcctgcgcgtgaatgatcagctgatcgcagtgaacggtgagagtttgttaggaaagaccaaccaagatgcgatggagacgctccggcgcagcatgtctaccgaaggcaacaagagaggcatgatccagctcatcgtagcgcggaggattagcaaatgtaatgagttgaaaagccctggaagcccccctgggcctgagttgccgatcgagactgcactagacgacagggagagacgaatcagccatagcctgtacagcggtatcgaaggtctcgatgagtctcctagtcgtaatgccgctttatcgcggattatgggtaagtaccagctgtctcctacagtcaacatgccgcaggacgacacagtgattatagaagatgatcggcttccagtcctgccaccccacctgtccgaccagagcagttccagtagccatgacgatgtggggtttgtaactgccgatgctgggacctgggctaaggctgctattagcgacagcgccgactgtagcttgagtccagacgtggatccggtactagcgttccagcgggaggggttcgggagacagatcgccgatgaaaccaaacttaacacagttgatgaccagaaagcagggagccccagcagagacgtcggtccaagcctcgggttgaagaagtcaagcagtttggaatcgctccaaaccgcggttgctgaagttactctcaatggagacatcccttttcacagaccaagacccagaattatcaggggtcgcggttgtaatgaatcattccgagccgccatcgataagtcttatgataaacccgcagtagatgatgacgacgaagggatggagacgcttgaggaagataccgaggagtcttccagaagtggccgcgaaagcgtgtccaccgccagcgaccaacctagccacagcctggaacggcagatgaacgggaaccaggagaagggcgataagactgaccgaaaaaaggacaaaacggggaaggaaaaaaagaaggatagagataaggagaaggacaagatgaaagcaaagaaaggcatgctgaagggcctcggggatatgttcaggtttggtaaacacagaaaggatgacaagatagagaaaacagggaagattaaaatccaggagagcttcacttccgaagaagaacggattcgcatgaagcaggaacaggagagaatacaggccaaaacaagggaatttagagagagacaagctagggagagagactacgccgagatccaagacttccacagaacctttggctgtgacgacgaacttatgtatggcggcgtaagctcgtatgaaggttctatggctctgaatgcccggcctcagagccctagggagggacatatgatggacgcgttatatgcccaggtgaaaaagcctaggaacagtaaaccaagccctgtagattcaaataggtctaccccatcgaatcatgataggatccagaggctgaggcaggagtttcaacaagctaagcaggatgaagacgtggaggacagacgcagaacgtactcgtttgagcagccttggccaaacgcccgtcccgcaacccagtccggccggcacagtgtctccgtagaagtacagatgcagcgtcagcgtcaggaggagcgggaaagctcccaacaagcccaacgacagtacagctctctccctagacagtctaggaagaacgcttcaagtgtgtcgcaggactcttgggagcagaactacagtcctggggaaggctttcagtcagcaaaggagaaccctaggtacagtagctaccaggggagtagaaacggctacctgggcggacatgggtttaacgcacgtgttatgttggagacccaggaacttctgagacaggaacagcgacgtaaggagcagcaaatgaaaaaacaacctccctctgaaggaccctccaactatgattcatacaagaaagtacaggatcccagctacgcccccccaaagggcccctttcggcaggatgtcccccccagcccgtcccaagtggcgcgactgaatcgactccagacccctgagaaaggcaggcccttctatagctag

SEQ ID NO: 127861 - DNA, 540 bp, synthetic construct
  misc_feature 1..540: note = Description of Artificial Sequence: Synthetic coding sequence
  source 1..540: mol_type = other DNA
atgcagattcccaaggagaccaaagccgaggacgaagatattgtgctcacacccgacggaaccagagagttcctgactttcgaagtacccttaaacgatagtggaagtgccgggcttggggtgtcggtcaaaggcaatcgcagtaaagagaaccacgccgaccttggcatattcgtgaagagcatcattaatggtggagccgcctctaaagacggccggctgcgggtgaatgatcagctcatagctgtgaacggcgaaagcctgctcggaaagacaaatcaagacgccatggaaactctgagacggtctatgagcacagagggaaataaacgcggaatgatccagctgatagtggccagaagaatctctaagtgcaatgagctgaagtcgccagggagtccgcccggccctgagcttcccattgagacagccctcgatgacagggagaggaggatttctcattccctctattctggaattgagggactggatgagagcccatctaggaatgctgctctatcccgtatcatgggcacctag

SEQ ID NO: 127862 - DNA, 3006 bp, synthetic construct
  misc_feature 1..3006: note = Description of Artificial Sequence: Synthetic coding sequence
  source 1..3006: mol_type = other DNA
atgaaagttacagtctgtttcggaaggactcgggtagtggttccgtgcggagacgggcatatgaaggtgttttctctcatccagcaggctgtcacacggtaccggaaagcaatcgccaaagatcccaactattggattcaggtacaccggctagagcatggagatggcggcattctcgacttagacgatatattatgcgacgtcgctgatgacaaggatcgcctggtggctgtatttgatgagcaggacccccaccatggtggtgacggtacatctgccagtagtacaggaacacaatcaccagagattttcggaagcgaactggggactaacaatgtttccgcctttcaaccttatcaagctaccagcgaaattgaggtgacaccatcagtactcagagctaatatgccgctccatgtgagaagaagctctgatcccgctcttattgggcttagcaccagcgtgtcagactcaaactttagctcagaggagccatcccgtaagaatcccacccgttggagtactacagccggatttctaaaacagaataccgccggctctcctaaaacctgcgatagaaaaaaagatgaaaattacaggtccttacctagggacaccagcaactggtctaatcagtttcaacgcgataacgctaggtcaagcctaagtgcctcccaccccatggtgggtaagtggttggagaaacaggagcaagacgaggatggtaccgaagaagacaatagccgtgtcgagccggtgggccatgccgatacgggattagaacacatacctaatttcagcttggatgatatggttaagttggtagaggttccaaacgatggtggacctttggggatccatgttgtccctttcagcgcccggggcgggaggacactggggctactcgtgaagcggctggaaaaaggcggcaaagccgaacacgagaatctctttcgggaaaatgactgtatcgtaagaatcaatgatggggacctaaggaatcgacgctttgagcaggcccagcacatgttccgccaagctatgagaacgccgattatctggttccacgtcgtccccgccgcgaataaggaacagtacgaacagctgtcacagtctgaaaaaaacaactattattcctccagattctcccccgattctcagtacatcgacaacagatcagtcaatagcgcgggcctccacaccgtgcagcgggcaccccggcttaatcatccccctgaacagatcgactcacactctcggctccctcactctgctcacccctccggaaaaccgccttcggcacccgcgtcggcacctcagaacgtattcagtaccacagtgtcctcaggctacaataccaaaaagataggaaagaggttaaatattcagctgaagaagggcaccgaaggcctgggctttagcatcacgagcagagacgttactatcgggggctctgcacctatctacgtcaagaacatcttgcctcggggggctgccatccaggatggtcggctaaaagccggagaccgcctcatagaggtcaacggggtggacctggtcggcaagagccaggaagaagtcgtctccctccttaggagcacaaagatggagggcaccgtctccctcctggtgttcaggcaagaggacgcctttcaccctcgtgagctgaatgcagagcctagccaaatgcaaatacctaaggagacaaaggccgaggacgaggatattgtgctaacgccggacggtactagggaatttttgacgttcgaggtgccactcaatgatagtggctcggccgggctgggcgtgtccgtgaaggggaatcgctctaaagaaaatcacgcagacttggggatctttgtgaagagcatcataaacgggggtgcagctagtaaggatggccggctccgggtaaatgaccagttgatcgctgtgaatggggagtctctccttggtaagactaaccaggacgcaatggagactttaaggaggagcatgtccaccgagggcaacaagaggggaatgatccagctgattgttgcacggcgaatttccaaatgcaatgaactcaaaagtccggggagcccaccagggcctgagctgccaatcgaaacagcactggatgatcgcgaaaggagaataagtcatagcctctatagcggcatagaaggactggacgaatccccgagtagaaacgccgcactctcccgcatcatggggaagtatcagctatcaccgactgtgaatatgccccaagacgacacagtgataattgaggacgatagactccctgtcttgccgccccatttaagcgaccagtcttcgtcttcctctcacgacgatgtgggcttcgttaccgctgacgccggtacatgggccaaagccgccatcagtgattctgccgattgcagcttatccccagacgtggaccccgtgctggcatttcagagggagggatttggccggcaaatcgccgatgagacgaagctgaacactgtcgatgatcagaaggcaggcagcccgtccagagacgtggggccatctctgggactcaagaagtcaagcagcctagagagtttacaaacggccgtagccgaggtgactctcaatggcgatattccatttcatcgtcctaggccccgcattatccgggggcgggggtgtaacgagtcttttcgcgccgctatagataagagctatgataagccagccgtggatgatgacgacgagggcatggaaacactagaggaggatactgaggagtctagcaggagcggtagagagtcagtttccacagcatctgaccaaccctcacacagtctagagcgtcaaatgaacgggaatcaggaaaaaggcgataagacagataggaagaaagacaagacaggaaaggagaaaaaaaaggaccgtgacaaagagaaggacaagatgaaggctaaaaagggaatgctcaaaggactgggcgatatgttctcattagcaaagctgaagcccgagaagcggtag

SEQ ID NO: 127863 - DNA, 2967 bp, synthetic construct
  misc_feature 1..2967: note = Description of Artificial Sequence: Synthetic coding sequence
  source 1..2967: mol_type = other DNA
atgaaggtcaccgtgtgcttcggccggacaagagtggtggtcccgtgtggagacggtcacatgaaggtcttctccctgattcaacaggcggtaacccgatataggaaggctatagcaaaagaccctaactactggattcaggtgcacagactcgagcacggagatggtgggatattagatttagatgatattctgtgcgatgttgccgacgataaagatcggttagtcgcagtattcgatgaacaggatccgcatcacggtggcgacgggaccagcgcttcctccacgggaactcagtctcccgaaatatttgggtcagagctcggcaccaataacgtgtccgcgttccaaccgtaccaggccacaagcgagatcgaagtcaccccctccgtgctgagagcaaacatgccgttgcatgttcggcgtagtagcgatcccgcactgatcggtttgagcactagtgtttccgactccaatttttctagcgaggaaccatcacgcaaaaatcctaccaggtggtccacgacagctggctttctcaagcagaacacagccggctcacctaaaacgtgtgatagaaagaaggacgaaaactacaggtccctcccacgtgacaccagtaattggtccaatcagttccagagagataacgccagaagctcactgtcagcctctcacccaatggttggcaagtggctggaaaaacaggagcaggacgaggacggaacagaagaagataatagccgcgtggaaccagtcgggcacgcggacaccggcctggaacatatcccaaatttcagcctcgatgacatggtcaaactggtggaagtgcctaacgacggaggacccctgggaattcatgtagtacccttcagcgctcgcggtggtagaacattgggcctccttgtcaagagactagagaaaggcggaaaagccgaacatgagaatctgttccgggaaaacgattgcatcgtgcgaataaacgacggagacctgcgaaatagacggtttgagcaggctcagcacatgttccggcaggcaatgcggacccctattatctggttccacgtagtgcccgcggccaataaagaacagtatgagcagctgtcgcagtccgagaagaataactactactcgtcacgcttcagccctgattctcagtacatcgataatcgctcagtgaattctgcaggcttacacaccgtacaacgcgcgcctaggttaaatcaccctccggaacaaatcgatagccattcacgacttccccactctgctcacccttcaggcaagcctccttctgccccagcatcagcgccccagaacgtcttcagcactaccgtgtctagtgggtataacaccaagaaaatcggcaaacgcctgaacattcagctgaaaaaaggcactgagggactcgggttctctattacctcccgcgacgtgaccatcggagggagtgcaccaatctacgtgaaaaatatcctccctcgtggggctgcaatacaggatggccgccttaaagctggagacagactgattgaagtcaacggagtggacctggtggggaagagccaagaggaagttgtgtccctgctccgcagtactaaaatggaaggcactgtgagcttgttagtttttcgtcaggaggacgccttccatccacgggagctgaaggcggaggatgaggatatcgtgctcacacctgatgggacgcgggagtttctcacatttgaagtgcctcttaacgatagtggctctgctgggctcggagtgtcagttaaaggaaatagatctaaagagaatcacgctgatttaggaatcttcgttaaatcgattatcaacggaggagcggcatctaaggacggccgcctccgggtgaacgaccagttgatagcggtgaatggggagtctctactgggcaaaaccaaccaagacgccatggagacactccgccgtagcatgtctacggaagggaataagcgcggaatgattcaactcattgtagcgcggaggatttcaaaatgcaatgaactaaaatcacccggaagcccgcccggcccagagctccccatcgagacagccctcgacgacagggagaggcggatctctcattctctctactcaggtattgagggcttggacgaaagtcctagcaggaatgctgccttatctaggatcatggggaaataccagctgagcccaaccgtgaatatgcctcaggatgacaccgtgataatcgaggatgatcgattaccggtcctgccgcctcacctgagcgatcaatcttcctctagcagccatgacgacgtaggtttcgttactgccgacgcaggaacttgggcaaaagccgcgatatccgacagcgcagattgctcgctctcgccagacgtggatcctgtgctggcctttcagagagagggcttcgggaggcaaatcgctgatgagactaaattaaacaccgtggatgatcagaaggctgggtccccttcccgcgatgtagggccgtccctcggtctcaaaaagtcatctagtttggagtcactacagactgctgtcgccgaggttactctgaatggcgatatcccattccatcgccctagaccaaggattatccgcgggcgcggatgcaatgagagctttcgggctgcaatagacaagtcctatgacaaacctgctgtcgacgacgatgatgaggggatggagaccctcgaagaggatacagaagagtcctcaagatccggtcgagagtccgtgtctacagcgtctgatcagccctcgcattccctggaaagacagatgaatggcaatcaggagaaaggggacaaaacagaccgtaagaaggataaaaccggtaaggagaaaaagaaggatcgggataaagagaaggacaaaatgaaagctaaaaagggaatgctcaagggcctgggggatatgttcagcctggccaaactcaaaccggagaaaagatag

SEQ ID NO: 127864 - DNA, 4062 bp, synthetic construct
  misc_feature 1..4062: note = Description of Artificial Sequence: Synthetic coding sequence
  source 1..4062: mol_type = other DNA
atgaaggtcactgtttgttttggccgaaccagggtggtggtaccctgcggagatggccatatgaaagtctttagcctgatacaacaggccgtgacaagatacaggaaggcaatcgccaaagatcccaattactggatccaggtccatagattggagcacggtgatgggggaatccttgacctagatgatatcctttgtgatgtcgccgacgacaaagatcggctcgtggccgttttcgatgagcaggatccccatcatggcggggacggcaccagtgcctcttcaactggcacgcagtcccccgaaatcttcgggtccgagctgggtactaacaatgttagcgcctttcagccttatcaggctactagcgaaatagaggtgaccccatcagtgctgagggctaacatgccgctgcatgtccggagatccagcgacccagctctgatcggactcagtacctccgtgagtgatagcaatttctcttcagaggaacccagcaggaagaaccccacgcgatggtcaaccacagctggttttctgaaacaaaatactgccggtagccctaagacctgtgaccgcaaaaaggatgagaattatagatctttgcccagagatacatccaattggagcaatcagtttcagcgagacaacgctcggagtagccttagcgctagccacccgatggtcgggaaatggctcgagaagcaggaacaggacgaagacggcaccgaggaagacaactccagagtggaacccgttggccatgccgatacgggcctggaacacattcccaacttttcacttgacgacatggtaaagctagtagaagtccctaacgacggtggtcccctggggattcacgttgtgccattcagcgcgagaggaggacggaccctgggtttgctcgtcaaacgcctggagaaaggcggcaaggccgaacatgagaatctgttccgcgagaatgattgcatcgttcgtattaatgacggcgacttacggaaccgccgctttgaacaggcacagcacatgtttaggcaggctatgcgtacccccataatatggtttcatgtcgtgccagcagccaacaaggagcaatatgaacagctgtcacagtcagagaaaaataactactactcctctaggttcagtccggacagtcagtacatcgacaatcggagtgtgaactccgctggcctacataccgtgcagagggcaccccgcctaaatcaccccccagaacagatcgattcccacagtcggttgccccattccgcacaccctagtgggaaacctccctccgcacccgcatcagctcctcagaacgtgtttagcaccactgtgagcagcggatacaatacaaaaaagattgggaagcggcttaacatccaattgaagaaggggaccgaggggttggggttcagtataactagcagagatgtgacgattggcggatcagctcccatttatgttaagaacatcctccccagaggggccgccatccaagatgggcgcttaaaggccggggaccgcctgattgaggttaacggtgtagacttggtaggtaagtcccaggaagaggtggtatcactactgcggagcacaaaaatggaggggactgttagtctgttagtgtttcggcaggaagacgctttccatcctagagagctgaatgcagagccgtcacagatgcagattcccaaggagactaaagctgaggacgaagatatcgtgctgacccccgatggtacccgagaattccttacgttcgaggtgcctcttaatgacagcggttccgccgggttaggcgttagtgtaaagggaaatagaagcaaggaaaaccacgctgatttgggtattttcgtgaagagcatcatcaatggtggcgccgcgtctaaggacggacgcctgagagttaacgaccagttaatcgcagtgaatggcgaaagtctgctaggaaagacgaaccaggacgctatggagactctgagacgctcaatgtccacggagggaaataagagaggaatgatccagctgatcgtggctagacgtataagtaagtgcaatgaactcaaatcccccgggagtcctccaggccccgagcttcccattgagaccgccctggatgaccgggagaggcggatctcccattcactctactcaggcatagaagggctggacgagagcccctctcgaaacgcggcgcttagccgcataatgggaaagtaccagcttagccccaccgtgaacatgccgcaggatgacaccgtcattatcgaagatgacagattgcctgtcttgcctccacatctgtctgatcagtcctcatccagcagtcacgatgatgttggttttgtaaccgctgacgccggtacttgggctaaggctgctattagcgatagcgccgattgcagcctgagccccgacgttgaccctgtattggcttttcaaagggagggcttcggacgccagtcaatgtctgaaaagcgcactaaacagttcagtgatgctagtcagctcgatttcgtgaaaaccaggaaaagcaaatcaatggatttaggaatagccgatgagacgaaacttaacaccgtggacgatcaaaaagcagggagcccttccagggatgtggggcccagtttggggttgaagaaatcctcctcactggaatctctccagaccgctgtcgccgaggtgaccctgaacggagatatcccattccatagacccaggccccgcatcattagagggagaggctgtaacgagagcttcagagcggcgatcgataaaagttacgataagccggccgtggacgacgatgatgaaggaatggaaacactggaagaggatacggaagaatctagccgatcaggacgcgagtctgtctccaccgcctccgatcagccttcgcacagtctggagcggcagatgaatggtaaccaggagaaaggggacaaaaccgatcggaaaaaagataagaccggaaaggagaagaagaaggacagggataaagagaaggacaagatgaaggccaagaaaggcatgctgaaaggtctgggagatatgttccggtttgggaagcatagaaaggacgacaagatcgagaaaaccgggaaaattaaaatccaggagagctttacaagcgaggaagagcgtatccgcatgaagcaggagcaggaacgcatccaggccaagactagagaatttcgtgagcgccaggcccgcgaaagggactacgcggagattcaggactttcaccgtactttcggttgtgatgatgagctaatgtacggaggagtatcctcctatgagggatcgatggcacttaacgcaagaccccagtctccaagggaagggcacatgatggatgcactgtatgcacaggtgaagaaacccaggaactctaagcccagccctgtggactccaaccgctcaactccatcaaaccacgacaggatccaacgcttgcgccaagaatttcaacaggccaaacaggacgaggacgtggaggaccggagaagaacctactctttcgagcagccctggcccaatgcccggcctgccacacagtccggccgacactccgtgtctgtggaggtccagatgcagcgccagcgccaagaggagagggaatcatcgcaacaagcccagcgccagtactcttcacttccccgccagtcacgtaaaaacgcgtctagtgtgagccaagactcttgggagcaaaattactctccaggagagggttttcaatccgctaaagaaaaccctcggtactccagttaccagggttctagaaatgggtatctgggtggccacggttttaacgccagagtcatgctcgagactcaagagctgctgcgacaggaacagcgccgcaaagagcagcaaatgaagaaacagccccctagcgagggtccttcgaattatgacagctataagaaagtgcaggacccaagttatgcacctcccaagggacccttcaggcaggacgtgccaccgagtccctcacaggttgcaaggcttaatcggttgcagacccctgaaaaggggcgccccttttacagttag

SEQ ID NO: 127865 - DNA, 4071 bp, synthetic construct
  misc_feature 1..4071: note = Description of Artificial Sequence: Synthetic coding sequence
  source 1..4071: mol_type = other DNA
atgaaagtgacggtctgctttggcagaactagggtcgtggtgccatgcggggatggccacatgaaagtgtttagcctaattcagcaagccgtcactcggtacaggaaagcaattgcaaaagacccgaattactggatacaagtgcaccgcctggagcacggcgatggaggcattttagatctggatgacatattgtgcgacgtcgcggatgataaagaccggctagtggcagtgtttgatgagcaagatccccatcacggaggggatggtacctccgccagcagcacaggcacgcaatcacctgaaatctttggctctgagttaggtaccaataacgtgtctgcttttcaaccttaccaggccacctcagagatcgaggttacaccgtccgttctcagagctaatatgcctctgcacgttcgacggtcctctgaccccgcccttatcggtctttccacttctgtgtctgattccaattttagctctgaggagccctccaggaagaacccaactcgatggtcaactaccgccgggttcctgaagcagaacacagccggatctccaaaaacttgcgaccgaaagaaggatgaaaattatagaagtctgcctagagacacgtcgaactggagcaaccagttccaacgggacaatgcacgaagtagtctctctgcctctcatccaatggtaggaaaatggctggagaagcaggaacaggatgaagatgggacggaagaagataactctcgggtcgagcccgtggggcacgccgataccggcctggagcatatcccaaactttagtcttgacgacatggttaagcttgtagaggttcctaacgatggtggcccattgggtatccatgtggtgccattttccgcccgtggcggaaggacactaggactgctggtgaaaaggctagaaaaaggtggcaaagcagagcatgagaatctcttccgggaaaacgactgtattgtcaggatcaatgatggcgatcttcggaatagaagattcgagcaggctcagcacatgttcagacaggcaatgcgcacccctattatttggttccacgtagtaccggccgcaaacaaagaacagtatgagcaactgagccagagtgagaaaaataactactattcttccaggttctcacctgacagccagtacatagataatagatctgtcaatagtgccggcctgcacacagttcaacgtgctcccagactcaaccaccccccagaacagattgacagccactcccgccttccacacagtgcccacccatctgggaagccaccttctgcccctgcctcagccccccagaacgtattctcaacaactgtgagcagcggctataataccaagaagatagggaagcgtcttaatattcaactgaagaaaggaacagaaggtctgggattctctattacgtcaagggatgttacgattggcgggagcgccccgatctatgtcaaaaacatcctcccacgcggggccgccatccaggatgggagattgaaggccggtgaccggttgattgaagtaaacggagtagacctggttgggaagagtcaggaggaagtggtttctctactgcggagtactaagatggagggaaccgtgagcctcctcgtgttccgccaggaagatgcctttcatccgagagagctgaatgccgaaccaagtcagatgcagataccaaaagagaccaaagccgaagacgaggacatcgtactgacccctgatggaactagggaattcctaacctttgaggtgccactgaatgattcgggcagcgccggcctcggagtgagcgtcaagggcaatcgcagcaaggaaaaccatgctgacctgggcatattcgtgaagtctatcataaatggcggggccgcctccaaagatggaaggctaagagtgaatgaccaactgattgccgtcaatggcgaaagcctgctcgggaaaaccaatcaggatgccatggagacgcttaggcgcagcatgtccactgagggtaataagcggggtatgatacagcttatcgttgcgaggaggattagtaaatgtaacgaactcaagtctcctgggtcacctccaggcccagagcttccaattgaaaccgcgctggatgacagggaaaggaggatcagccactccttatattcaggcatcgaagggttggatgagagccccagcagaaacgctgccctgtccagaattatgggcgagtctgggaagtatcagctgtctcctaccgttaatatgccacaggacgatacagtgataatcgaagatgatcgtctaccggtcttgcctccacacttgagtgaccaatcaagctcctcctcccatgacgacgtggggttcgtgaccgcggacgccggaacatgggccaaggcagccatcagcgactccgccgactgttctctcagccccgacgtagaccccgtcttagctttccagcgcgaagggttcggacgacagtctatgtccgaaaaacgcacaaaacagttttctgatgcctcccagctcgactttgtgaaaacacggaaatccaagtccatggatctcggaatcgccgatgagacaaaattaaacaccgtagacgaccagaaggcagggtccccttctcgcgatgtggggccttcactaggcctgaagaagagctcttctttggaatcgctgcagactgcagtggcagaagtaactctgaacggagacattccctttcaccggcctagaccaaggatcatccggggccgcggatgtaatgaatccttcagggctgccatagataagtcatacgataagcctgccgtggatgacgacgatgaaggaatggagacactggaagaagatactgaggaaagtagtaggtccggtcgtgaaagtgtgtctacagcttccgatcagccttcccatagcctggagcgccagatgaatggcaatcaagagaaaggggataagactgatagaaaaaaggacaagaccggcaaagagaaaaaaaaggaccgtgataaggaaaaagacaagatgaaggcaaagaaggggatgctgaaagggctcggtgacatgtttagattcggaaaacatcgaaaggacgacaaaatcgaaaagacaggtaagattaaaatccaagaatctttcacatcagaggaggagaggattcggatgaagcaggaacaggagcgcattcaggcaaagacgcgagaatttcgagagaggcaggctagggagcgcgactatgctgaaattcaagatttccacaggacttttggttgcgacgacgaattaatgtatggtggcgtcagctcttatgagggctccatggccctgaatgcccgtccccaaagtccacgggaaggtcatatgatggacgccctctacgcacaggtgaagaagcccagaaactctaaaccttcaccagtggatagcaaccgctctactcccagcaatcacgataggatccaacgcctgcggcaggagtttcagcaggccaaacaggacgaggatgttgaggacagacggcgaacctattcctttgaacaaccctggccgaacgcacggccagcaacacagagtggtagacactccgtctcagtggaggtgcagatgcagagacagagacaggaagaaagagagtctagccaacaggctcagagacaatactcctcactgcctcgccagagtcggaaaaatgcctcctccgtgagtcaggactcgtgggaacagaactactcgcccggggagggattccagagcgccaaagaaaacccacgatatagttcttatcaagggagtagaaatgggtacttgggcggccacgggttcaacgcaagggtgatgttagaaacgcaagagctgctccgtcaggagcagcggaggaaagaacaacagatgaaaaagcagccgccttctgagggcccctcaaattacgattcctataagaaagtgcaggacccgtcctacgccccaccgaaaggaccattccgacaggatgtacctccttcacctagccaggtcgcgagactaaatcgtttgcagacccccgagaagggccgccctttctatagttag

SEQ ID NO: 127866 - DNA, 3891 bp, synthetic construct
  misc_feature 1..3891: note = Description of Artificial Sequence: Synthetic coding sequence
  source 1..3891: mol_type = other DNA
atgaaggtgaccgtctgtttcgggcggacacgggtggtggtcccatgcggcgacggtcacatgaaggtgtttagcctgattcagcaggccgtgaccagatacagaaaagccatcgccaaggatcccaactactggatccaagtgcacaggctagaacacggggatggagggattcttgatctcgatgatatcttgtgcgatgtggcagacgacaaggataggctggtcgcagtttttgacgaacaggacccacatcacggcggtgacggtaccagtgcctcctccactggcacccagtcgcctgaaattttcggtagcgaactgggtaccaacaacgtaagtgcttttcagccctaccaagcaaccagtgagattgaggttactcccagcgtgctgagagccaatatgccactccacgtgcggaggtcttcagacccagcgcttatagggctgtctacttcagtctccgacagcaactttagctccgaagaaccttcacgcaagaaccccacaagatggagtacaacagccggtttcttgaagcagaataccgcaggaagcccaaaaacatgcgaccgcaaagacgaggatgggactgaggaggataatagccgcgtagagcccgtgggacatgctgacaccggccttgagcacatccctaacttcagcttagacgatatggtcaaactcgtggaggtgccaaatgatgggggcccgctgggaatccacgtcgtgccatttagcgcaaggggcgggcggaccttaggcctcttggtcaagcggcttgaaaaaggtggaaaagccgagcacgaaaacctgttcagagagaacgattgcatcgtgcgcattaacgatggggatttgcggaatcggagattcgaacaggcgcagcacatgttccggcaggcaatgcgcaccccaattatatggttccatgtagttcccgccgcgaacaaggaacaatatgaacagttaagccagagcgagaagaataattattactcatcacgcttctctccggattcccagtatattgacaaccggtccgtgaacagcgccggtctccacacagtgcagcgagcacctaggttgaaccaccctcctgagcagattgatagccactctaggctgccacacagcgctcatcctagcgggaaacccccatctgcgcccgcgtcggcaccccagaacgtgttctccactacggtgtctagcggatataatactaaaaaaatcgggaagaggctgaacatccagctgaagaaagggactgagggcttgggcttctccattacatctagggacgtcaccatcggcggctctgcgcccatctatgtgaaaaatatcttgccccgcggcgccgctattcaggatggcagactgaaggccggggatagactcattgaagttaatggcgtagacctcgtaggtaaatcccaggaggaagttgtgagccttctgcggtccacaaagatggagggcacagtgagcctgctggtgtttaggcaagaggacgcgttccatccaagggagctcaaagcagaggacgaagatatcgtcttaacaccagacggaaccagggagtttttaaccttcgaggttcctctgaacgatagtggttcagccggcctgggagtgtcagtaaaagggaatcgctctaaggaaaaccacgcagatcttggtatcttcgtcaaatcgataattaacggcggtgccgccagcaaagacggccgcttgcgggtcaatgaccagctgattgccgttaatggcgaatcgttgttgggtaaaaccaatcaggatgccatggaaacactcagacggtctatgagcactgagggaaacaagagagggatgattcagttgatagtagcgcggcgaattagcaaatgcaatgaactgaaatcacccggctccccccccggcccagagttgccgattgagacagcactcgacgatcgagagagacgcatttcacacagtctgtactctggtattgaagggctggatgaatctccatccaggaacgcagccctgtcacgaattatgggcaaataccagctctctcccactgtgaatatgccacaggacgacacagttattatcgaagatgataggctgcctgtgctgccaccacacttatcagaccagagttcttcttcaagtcacgacgacgtgggatttgttaccgctgacgccggtacctgggccaaggcagctatttccgactcggctgactgctctctgtctcccgacgtggaccctgtactggcctttcaaagggaaggcttcggacgacaatctatgtccgaaaaacgcactaagcaattcagtgatgcttcacagctggatttcgtgaagacccggaaatctaaaagcatggatctaggcattgccgatgagacaaaactgaataccgtggacgatcaaaaagctggatccccctctcgtgatgtgggccccagcctggggctgaaaaaaagctcttcattggagtcattgcagaccgctgtggccgaggtgaccttaaacggggatataccatttcacagaccccgccctcgcattatccggggacgcggatgcaacgagagtttccgcgccgcaattgataaaagttatgacaagccagccgtcgatgatgacgatgaaggcatggaaactctggaggaagacaccgaggagagtagcagaagcgggcgcgagagtgtttctaccgcatccgatcagccttctcacagtctcgaaaggcagatgaacggtaatcaagagaaaggcgataagacagacagaaaaaaggacaaaaccggaaaagaaaagaaaaaggaccgcgacaaagagaaagataagatgaaagccaagaagggtatgctgaaaggtttgggcgacatgtttcggtttggcaagcacagaaaggacgataaaatcgaaaagacgggcaagattaagattcaggagtctttcacatccgaggaagagcggatccgaatgaaacaggagcaagagaggatacaggcaaagacgcgcgaattccgagagagacaggcacgcgagcgggactacgcggaaattcaggatttccaccgcactttcgggtgcgatgatgagctgatgtacggaggcgtgagctcttatgaaggcagtatggcacttaacgctcgaccacagtcgcctcgggaggggcacatgatggacgctctctatgcccaggtaaagaaaccaaggaattccaagccctcccccgtcgacagcaacagatctacaccttcgaaccacgacaggattcagcgactgaggcaggagttccagcaggccaagcaggacgaggatgtggaagaccgcagacgcacctattctttcgaacagccatggcccaacgcaaggcccgcaacacagtcagggcgccattccgtctctgtggaggtccagatgcaacggcagcgtcaggaggagcgcgagtcatcccagcaggcccagaggcagtatagcagcctacctcggcagtctcgcaaaaatgccagttcagtgagccaagattcatgggaacagaactattcaccaggggaggggttccagagcgcgaaggagaatccccgctattcctcgtaccagggatccaggaacggatacctcgggggacacggcttcaacgctcgagtgatgttagaaactcaggagttgctgcggcaggaacagcgaaggaaggaacagcagatgaagaagcagcctcccagcgagggcccctctaattacgatagctataagaaagtgcaagacccatcttacgctcctcctaagggaccctttagacaggacgttcctccgtccccctcacaagtggctagactgaacaggttgcagactccagagaaggggcggccattttatagttag

SEQ ID NO: 127867 - DNA, 3735 bp, synthetic construct
  misc_feature 1..3735: note = Description of Artificial Sequence: Synthetic coding sequence
  source 1..3735: mol_type = other DNA
atgaaagtcaccgtttgcttcggccggaccagggtcgtggttccgtgcggcgatggacacatgaaggtgtttagcctaatccagcaggccgtgacaaggtaccgaaaagcaatcgccaaggaccctaactactggatccaggtccaccggctcgaacacggagatggaggaattctggatctggatgatatcctgtgcgatgttgctgatgacaaagaccgtcttgtggcggtcttcgatgaacaggacccacatcatggtggcgacgggacaagcgcctcctccacaggaactcagtccccagagatatttggcagcgagctggggactaacaacgtctccgccttccagccatatcaggcgactagcgaaattgaagtcaccccatccgtattaagagcaaatatgccgctccacgtcagaaggagcagcgacccggcactgattggcttgtcgaccagcgtgtcagatagcaactttagttctgaggagcctagtcgcaagaatccgactcgctggtcgacgacagctggattccttaaacagaacaccgccggatcaccaaagacctgtgacaggaaggatgaagatggcacagaggaggataacagtcgtgttgagcctgtggggcacgccgacacggggctggagcacatccctaatttcagtctggacgatatggttaagctagtcgaggtgccgaacgatggtggtcctttaggaatacatgtcgtcccattcagcgccagaggcgggagaaccctcgggctgttagtgaagcgcctagagaagggcgggaaggcagagcacgaaaacctgtttagagagaatgattgcattgtgcggatcaatgacggggacttgaggaaccggcggttcgaacaagcccaacacatgttccggcaagccatgaggacccctatcatttggtttcatgtggtccctgccgcgaacaaagagcaatatgaacagctctcacagagtgaaaagaataactactacagtagtcgcttcagtcctgatagccagtatatcgacaaccgatctgttaactcagctgggctccacaccgtccagagggctccacgcctgaaccacccccccgaacagattgatagccatagccgccttcctcactccgctcatccgtctggtaaaccgccgtccgcccctgcaagtgccccacagaatgtgttctctacaaccgtgtcaagcgggtataatacaaagaagatcggaaagagactaaacattcagctcaaaaagggaacagagggcctggggttcagtataacaagcagagacgtgactatcgggggctccgctccaatctacgttaaaaacattcttccacgcggtgccgcgatccaagatggacgccttaaggctggagatagacttattgaggtaaacggtgtggatttagtgggaaagtctcaggaggaagtggtgtctctgctccgctctaccaaaatggaggggactgtgtcgctccttgtgtttagacaggaggacgctttccaccctagggaactgaaggcagaagatgaggacatagtcctgacacctgacggcactagagagtttctgacattcgaggtgcccctgaatgactctggctctgcaggattgggcgtgtcagttaagggaaatcggtccaaagaaaaccatgccgatttaggcatttttgtgaaatctatcattaatggcggagccgcatctaaggatggtcgactcagggtgaacgaccagctcatagccgttaatggcgagtcattgctcggcaaaaccaatcaggatgcgatggagactctaagacggagtatgagcaccgaggggaacaagcgtggcatgatacaattgatcgtggccagaaggatttcaaagtgtaacgaacttaaatcaccaggcagcccacctggcccagagcttccgatcgagactgcattggacgaccgtgaaaggcgaatctcgcattcgctttacagcggtatcgagggcttagacgagagtccaagccggaacgccgctcttagccggatcatggggaaatatcaattgtctcccacagtcaatatgccccaagatgacactgtaattattgaggacgatcgcctgcccgttttgccaccacatctttcagatcagtcatcctcctcctcgcatgatgacgtgggatttgtgacggcagatgctgggacttgggcaaaggccgccataagcgacagcgcagactgctcattaagcccagatgtggatccagtgctcgcatttcaacgtgaaggattcggaagacagagcatgtctgagaaacggactaaacaattcagtgatgctagccaacttgatttcgtaaagactagaaagtccaagagcatggacctgggttccagccccagccgggacgttggtccctcactgggattgaagaagtcgagctcactggaatcactgcagactgccgttgctgaggttaccctcaatggggacataccattccaccgacctcgtcccaggatcatccggggcaggggatgtaacgagagcttccgcgcagccattgataagtcatacgataagccagctgtggacgatgacgacgagggaatggaaactctcgaggaggacacagaggagtcctccagatcagggcgcgaatctgtctccaccgcctccgaccagccctcccacagtcttgagagacagatgaatggcaaccaagagaagggtgacaaaactgacaggaagaaagacaagacaggaaaggaaaagaagaaggaccgtgacaaggagaaggacaagatgaaagctaagaaagggatgctcaagggcctgggcgacatgttccgaattcaggcgaagaccagggagtttagggagcgacaggcccgggagcgtgattacgcagagattcaggactttcacaggacttttgggtgtgacgatgagctgatgtacggaggggtaagcagttacgagggctcaatggccctcaacgcaaggcctcagtcaccccgcgaaggacacatgatggacgctctgtacgctcaggtcaagaaaccacgcaattcaaaacccagtcctgttgattcaaaccggagcaccccatctaatcatgaccgcattcagcgactcagacaggagttccaacaggctaaacaggatgaagacgttgaggaccgccggcggacttattctttcgaacagccctggcccaatgcgaggcccgccacgcagagcggccgccactccgtgtctgtggaagtccaaatgcagagacaacggcaggaagaacgggagtcgtctcaacaggcgcagaggcagtactcgtcgctacctcggcagagcagaaagaacgcatcatccgtctcccaggacagctgggagcagaactactcccccggcgaaggctttcagtcggctaaagagaatccacggtattctagttatcaaggaagcagaaacgggtatctgggcgggcatggtttcaacgcacgtgtcatgctcgagacccaggagctgcttcgacaggagcaacgacgcaaggagcagcaaatgaaaaagcagccaccctcggaggggcccagtaactacgactcatacaaaaaggtgcaagatccaagctatgctccacccaagggtccttttagacaggacgtcccaccatcgccttcccaggtggctaggttaaatcggctccaaacacctgaaaaaggtcgccctttctacagctag

SEQ ID NO: 127868 - DNA, 2244 bp, synthetic construct
  misc_feature 1..2244: note = Description of Artificial Sequence: Synthetic coding sequence
  source 1..2244: mol_type = other DNA
atggtaaaattggtggaggtgccaaacgacggaggtcccctcggaatccacgtggttcccttctctgccaggggaggcaggaccctgggtctcctggtcaagcgtcttgaaaaagggggtaaagcagagcacgagaacctgtttagagaaaacgattgcatcgtgcgcatcaatgacggtgatctcagaaatcgcaggtttgagcaggcccagcacatgtttcgacaggccatgcgaacacctatcatctggtttcatgtggtccccgccgccaacaaagaacagtacgagcaactgagtcagagtgagaagaacaactactactcatcccggttctccccagatagtcagtacattgacaatcggagtgtgaactccgctggacttcatacagtccagagggcccctaggctgaatcacccacccgaacagattgacagccattcccgccttccacactccgcccatccaagcggcaaacccccttctgcccccgcttccgctccccagaatgtgtttagcacgaccgtgtcttccggctataataccaagaaaatcggaaaacgcctcaatattcagctgaagaaaggcacggagggacttggattttctataacctctcgtgacgtgaccatcgggggttccgccccaatttatgtcaagaacatcctcccccgcggggctgccattcaggacggccggttgaaggccggagaccggttgatagaggtcaatggcgtcgatttagtcggcaaatctcaggaggaggtggtcagcctgctccgttccactaagatggaaggcacagtgtctctgttggtgtttagacaagaggacgcttttcacccacgcgagctgaaagctgaggatgaggacattgtgctcacccctgatggcacacgggaatttcttacgttcgaggtgccactgaatgacagcggaagtgctggacttggcgtgtccgtgaagggaaatcggtctaaagaaaaccacgccgatttgggtatcttcgtgaagagcattatcaacggcggcgccgcctctaaggacggacggttgcgggtcaatgatcagctgattgccgtcaatggcgagagcctgctgggcaaaaccaaccaagacgctatggagactctcagaagaagcatgagcactgaggggaataagagaggcatgatccagctgatcgtggccaggcgcatttccaagtgtaacgagctcaaatcaccaggcagccctcccggaccagaactgcccattgaaacagcacttgacgatcgcgagcggcgcatctcgcactccctctattctggtatagagggattagatgaaagcccttccagaaatgcagctctttccaggatcatgggcaagtaccaactgtcacctactgtgaacatgcctcaagatgacactgttatcattgaagacgaccgcctgccagtgctgccaccccacttatctgatcagtctagcagctcatctcacgatgatgtgggattcgtaaccgcagacgccggtacttgggccaaagccgctattagcgattctgccgactgttctctctcgccagatgtggatccagtcctggcgtttcagagggagggcttcggcagacagtcaatgagcgagaaaagaaccaagcaattcagtgatgcatcccagctggatttcgtgaagacgcggaagagcaagagtatggatctcgtagcagacgagaccaaactgaacaccgtcgacgaccaaaaagctggctccccatctagggacgtggggcctagtctgggcttgaagaagtcaagctccttggaaagcctccaaacagccgtggccgaagtgaccctgaacggcgatatcccttttcatagaccaagaccacgtattattagagggcggggctgcaacgagtccttccgcgcagctatcgacaagtcctacgacaaaccagctgtcgacgacgatgatgaaggcatggagaccctggaggaggacaccgaggaatcctcccggagcggcagggaatctgtgtccaccgcctccgaccagccctcccactcattagagcggcaaatgaacggtaaccaggagaagggcgacaagacagacaggaagaaggacaagaccggaaaggagaagaagaaagaccgagataaggaaaaagacaaaatgaaagcgaagaaaggcatgctcaagggactgggagatatgttttccctcgctaagctgaagcccgaaaagcggtag

SEQ ID NO: 127869 - DNA, 3801 bp, synthetic construct
  misc_feature 1..3801: note = Description of Artificial Sequence: Synthetic coding sequence
  source 1..3801: mol_type = other DNA
atgaaggtaaccgtgtgttttggacgtactcgggtggtggtgccctgcggcgacggccacatgaaagtcttttcactgattcagcaagcggtcacccggtataggaaggccatcgcaaaggatccaaactactggatacaggttcaccgcctggaacatggtgatggggggatcctggatttagatgacattctgtgcgatgtggcagacgacaaggataggctggttgcagtgttcgacgagcaggatcctcaccatggaggggacggcacaagcgcttccagtactggcacgcagtcccccgagattttcggtagcgagcttgggactaataacgtgtcagcatttcagccgtaccaggctacttccgaaatagaagtgaccccaagcgtcctgagagccaacatgccgctccatgtccgtcggtcgagcgatccagcgctcatcggcttatcaacctctgtgagtgactccaacttctctagcgaggagccgtctcgaaaaaatccgactcggtggtcaacgactgctggctttctgaagcagaacactgccggcagtccaaaaacttgtgacagaaaggatgaggacggcactgaagaggataattcacgggtagagcccgtaggacatgctgacacaggcttggagcatatccccaacttctccctggacgatatggttaaactcgtagaagttccaaatgacgggggcccccttgggattcacgtggtcccattctcagcccgcggggggcgcactctgggcctgctcgttaagagactcgagaaggggggtaaggcggagcatgaaaatcttttccgcgagaacgactgcatcgttcgcatcaatgatggggatctgaggaataggaggtttgagcaagcccaacacatgttccggcaggctatgcgaacaccgataatatggttccacgttgtgcctgcagccaacaaagaacagtacgagcagctgtcccagtccgagaagaataactattatagctcccgcttttctcctgacagccaatacatcgacaacaggtctgtaaactccgcagggctacacaccgttcagcgagcccctaggcttaatcatcctccagagcagatcgacagccactcacgactccctcactcagcacacccgagcgggaagcctccgtctgctcctgcttccgcaccccagaatgtgtttagcacaacagtcagcagcggctataacaccaagaagataggaaagcggttgaatattcaactcaaaaagggcacagagggcctgggctttagcattacatcgcgtgacgtgactattggaggcagcgcacctatttatgtgaaaaatattctgccacgaggagccgctattcaggacggaaggctcaaagccggcgatcgtctcattgaagtgaatggagtggacctggtcggcaaaagccaggaggaagtagtctctctgctcaggagcactaagatggagggaactgtgtcgctgttggtgttcagacaggaagatgccttccaccctcgcgaattaaaggctgaggatgaggacatagtcctgacacccgacggcacccgtgaattcttaacgtttgaagtgcctctcaacgatagcgggagcgctgggttaggagtatcagttaaaggaaaccgatccaaagagaaccatgcagatctgggaatcttcgtgaaatctatcataaacggtggggctgccagtaaggatgggaggctccgtgtcaatgaccagctgatagcggtcaatggcgaatctctgcttggtaagacaaatcaggatgccatggaaaccttgaggaggtcaatgagcaccgagggaaataaaagggggatgatccagttgatagtggcacgccggatcagcaaatgcaacgagcttaagtccccgggcagtccaccggggccggagctgccaatagaaacagccctcgacgacagggagagacggatttctcatagcctctattcagggatcgagggcctggatgagtccccctcccggaatgctgcgttgagccggataatgggtaaataccagttatccccaacagtaaacatgcctcaggatgatacagtcatcatcgaggacgataggcttccggttctgcctccccacttgtctgatcagtccagcagctccagccacgatgacgttggttttgtaacagccgatgccggcacttgggcaaaggcagctatctcagatagcgccgattgttcgttgtccccggacgtggaccccgtgctagctttccagcgcgagggtttcggccggcagattgccgatgagaccaaactgaatacagtcgacgaccagaaggctggctcaccttccagggatgtaggaccttcgttgggcctgaaaaagtcaagttcactggaatctctgcagacagcagtggccgaggtgacgttgaacggcgatataccatttcacaggccgcgtcctcgcatcatccgggggcgaggctgcaatgagtccttccgggcggccatcgataaatcatacgataagcctgccgtcgacgacgatgacgaggggatggagaccctggaggaagacaccgaggagagttcccgcagcggccgggagtcagtgtccacagcaagtgatcaacccagtcattccctggaaagacagatgaacggcaaccaagagaaaggggacaaaacagatagaaagaaggataagacaggaaaagaaaagaagaaggatcgggataaagagaaggacaagatgaaagccaaaaagggcatgctcaagggcctcggggacatgttcaggttcggcaaacaccgcaaggacgacaaaattgagaagacaggtaaaattaaaatacaggagtccttcacctcggaggaagaaagaatcagaatgaaacaggaacaagaacggatacaagcaaaaacacgtgaattcagagagcggcaagcccgggagcgagactacgccgagattcaggatttccatcgaacttttggctgtgatgatgaactgatgtatggcggagtgtcatcgtatgaggggagcatggctttaaacgctagaccccagtcccctcgggagggacatatgatggatgctctatatgcccaggtaaagaaaccacggaacagcaagccttcacccgttgacagcaaccggagcacgccatcaaaccacgatcggatccagagactcaggcaggagttccagcaggctaaacaggacgaggatgtcgaggaccgaagacgaacgtattcctttgaacaaccttggcccaatgctaggcccgctactcagagcggtagacactccgttagcgtggaggtccagatgcagcgacagcgtcaagaggaaagagagagctcacagcaagcacagcgtcagtattcttctctgcctaggcagtctaggaagaatgcaagcagtgtaagtcaggatagttgggagcagaattactcccctggagaaggtttccagagtgcgaaggagaacccaaggtatagtagttatcaaggtagtcgtaacgggtacctaggcggccatggatttaacgcacgggtcatgctagaaacacaggaactgttgcgccaggagcagcggcgcaaagagcaacagatgaaaaagcagccaccctcagagggtccctctaattatgatagctataagaaggtacaagatccatcttacgccccacctaaaggaccatttaggcaagacgtgccacctagcccatcacaggtggccaggttgaacaggcttcagactcccgaaaagggaaggcctttctactcttag

SEQ ID NO: 127870 - DNA, 4023 bp, synthetic construct
  misc_feature 1..4023: note = Description of Artificial Sequence: Synthetic coding sequence
  source 1..4023: mol_type = other DNA
atgaaggttacggtgtgcttcgggagaactcgagtggtggttccctgtggagatggccatatgaaggtgttttcactgatccagcaggccgttacccgttacaggaaggcaatcgcaaaggatcctaactattggatccaggttcatcggctggaacatggggacggcggcattctggacctggacgatattctctgtgacgtggccgacgataaggaccggctcgtggccgtgtttgatgaacaggatccccaccacggaggggatgggactagcgctagttcaactggcacacagagccctgagattttcggttcagagctgggtacaaataacgtttctgctttccagccctaccaggccaccagcgagattgaggttaccccctccgtcctgagggcaaacatgccactccatgtgaggcgaagcagcgacccagcactaattgggctcagcaccagcgtgtccgactcaaactttagctccgaggagccgtctaggaagaatccaaccagatggtccacaacagcgggattcctgaaacaaaataccgcgggttccccaaaaacctgtgaccgcaagaaagacgagaattatagaagccttcccagggacacaagcaactggagtaaccagtttcaaagagacaacgctcggagttccctttcagcttcccaccctatggtgggaaagtggttggaaaaacaggagcaagacgaagacgggaccgaggaagataactcacgggtcgagccagtcggccatgcggataccggcttagagcacatccccaacttctcactggacgatatggtcaagttggtagaagtaccaaacgacgggggccctctgggaattcacgtcgtgccattcagtgccagaggagggaggacactcggactgctggtcaagagactggagaaggggggcaaagccgagcacgagaacttatttcgagagaatgactgcatcgtgagaatcaatgatggggatctgcggaacaggagatttgagcaggcacagcacatgttcagacaggctatgaggacacccattatctggtttcatgtcgttcccgccgcaaacaaagagcagtacgagcagctcagccaatcagagaagaacaattactactcatccaggttcagtcccgactctcaatacatcgataaccgatccgtcaattctgcaggtctgcataccgtgcagcgcgccccccgactcaatcatcctcccgaacagattgactctcactcccgcctccctcattccgctcatccctcaggcaaacctccatcagctcccgcttctgcgcctcagaacgtattcagcaccaccgtgagctccggatacaataccaaaaaaattgggaaacgcctcaacattcagcttaagaagggtactgagggcctcgggttctctatcacatctagggacgtgaccatcggaggtagcgcgcccatttatgtgaaaaatattctgccgaggggcgcagctatccaggacggaagactgaaagcaggcgatagacttatcgaggtgaatggagtcgacctggtgggaaagtcgcaggaggaagttgtgagcctcctccggagtaccaaaatggaaggaacagtgtcactgctagtttttcgacaggaggatgctttccatcccagggagttgaaagccgaggatgaggatattgtcctaacacccgacgggactcgcgagtttctgaccttcgaggtacctcttaacgacagtgggagcgctgggcttggcgtttctgtgaaggggaacaggtccaaagaaaaccatgctgacctgggcatctttgtgaaaagtataatcaacggcggggctgcatctaaggatggtcggctccgcgtgaatgaccagttgatcgctgtcaatggggagtcactgctaggaaagacgaaccaggatgcgatggaaaccctcagacgcagtatgagtactgaaggaaataagagggggatgattcagctgattgtggcacggagaatctccaagtgcaatgagttaaaatcgcctggctcacctccgggcccagaactccctattgaaactgctctcgacgacagagagcgtaggatctcgcattctctctactcaggaattgagggactggacgagtccccgtcccggaatgcagccctctcccgcattatgggaaagtaccagctatcaccaaccgtcaatatgccccaggatgacacagtgattatagaggacgatagacttcctgtgctcccccctcatttaagcgatcagtcttctagcagtagtcatgatgatgtgggcttcgtgaccgccgacgccggcacttgggccaaggcagctatttcagattcggccgattgctccttgagcccagacgttgatccagtgcttgcgttccagcgggagggttttggccgacagagcatgtcagagaaaagaacaaagcagttcagcgacgcatctcagcttgattttgttaagacgcgcaaatcaaaatctatggaccttggcatcgccgacgaaactaaactgaacactgtcgatgaccaaaaggctggaagcccttccagggatgtgggtccatctttgggccttaaaaaatcctccagcctcgaatccctccagaccgccgtggcagaggtcacgttgaatggagacattccattccatagacctagaccaagaatcatccgtgggcggggctgtaatgagagcttcagagcggccattgacaagtcttacgacaagcctgccgtggatgatgatgatgagggaatggaaacgctcgaggaggatacagaagagagcagtcgatcaggccgggagtctgtgtctacggcctccgaccagcctagtcacagcttggaacgtcagatgaatggcaaccaagagaaaggtgacaagactgaccgcaaaaaggacaagactggcaaggagaagaagaaggatcgtgacaaggagaaagataaaatgaaggctaaaaaaggcatgctgaagggactaggcgatatgttcaggtttggcaagcacaggaaagacgataaaatagaaaagaccgggaagataaaaattcaggaatcatttaccagcgaagaggaaagaatcagaatgaagcaggaacaagagaggattcaggcaaagaccagggagttccgcgagcggcaagcccgtgagagggattacgcagagattcaggatttccaccggacattcggatgtgacgatgagttgatgtacggaggagtatcttcatacgaagggtccatggccctgaatgctaggcctcagtctccgcgcgaggggcatatgatggacgcgctgtacgctcaggtgaagaaaccaaggaatagtaagcccagccctgtcgattccaaccgctcaacccccagcaaccatgataggatccagcgtctcagacaggaattccagcaggcgaaacaggatgaagacgtggaggaccggagaagaacttactccttcgaacaaccatggccgaacgccagacccgccacgcaaagcggtagacattcagtgtccgtcgaggtgcagatgcagcgacaaaggcaagaggagcgagaatcttcacaacaggcccaacggcaatacagcagcctgcctaggcagtcgcgcaaaaatgcctcttccgtgtcacaggattcttgggagcaaaactactcccccggcgaggggtttcagagcgcaaaggaaaaccctcgctactcctcttatcaaggttcccgtaatggatacctgggaggacatggcttcaacgcccgtgttatgctggagacacaggagttgctgagacaagaacaacgccggaaggaacagcagatgaagaaacagcccccaagtgagggtccttctaattacgatagttacaagaaggtgcaggatccatcatacgcgccccctaaaggaccctttcggcaggacgtgcccccaagcccgagtcaggtcgctagactgaacaggcttcagacacccgaaaaaggccgccccttttactcttag

SEQ ID NO: 127871 - DNA, 1119 bp, synthetic construct
  misc_feature 1..1119: note = Description of Artificial Sequence: Synthetic coding sequence
  source 1..1119: mol_type = other DNA
atgaatcgctcacatcgccacggcgccggcagcggctgcctaggaaccatggaagtgaaaagcaagtttggagcagagtttagaagattctctctggagcgcagtaagcccggcaagtttgaagaattctacggtttacttcagcacgtccataaaatccctaatgtcgacgtcttagtcggctatgcagacatacatggcgacctgctgcctatcaataacgatgacaattatcataaagccgtatctaccgccaatcccctgttgaggatcttcattcaaaagaaggaagaggcagactatagcgctttcggcaccgatacacttatcaaaaaaaagaatgttcttactaacgtgcttagaccagataatcatcgcaaaaagccacacatagttatctccatgccacaggattttaggccagtgtcttccatcatcgacgttgacatactgccagagacccaccgccgagtcaggctttacaaatatgggacagagaagccactgggcttttatataagggatggcagctcagttagagtcaccccacacgggcttgaaaaggtaccgggaatttttatcagtcgcttagtgccaggaggattggcacagtctacagggctgctggcagtcaatgacgaagtgctggaggtgaacggtatcgaagtcagcggtaaatcgctcgaccaggtcactgacatgatgattgcaaatagtcgcaacctgataatcacggttcggccggctaaccaacgcaataatgtagtgaggaattcccgaacttcaggtagttccggccaaagtaccgacaactctttgctgggttatccccagcaaatcgagccctcattcgaacccgaggacgaggactccgaggaggatgacattattatcgaggacaacggtgtgccgcagcagattcccaaggccgtgcctaacaccgagtctttagagagcctcacacagattgaactatcattcgagtctggccagaacggattcatcccgagtaatgaagtcagtttggcggcaatcgcgtcctcttcgaacaccgagttcgaaactcacgccccggaccagaaactgcttgaagaggatgggactattatcacattgtag

SEQ ID NO: 127872 - DNA, 1131 bp, synthetic construct
  misc_feature 1..1131: note = Description of Artificial Sequence: Synthetic coding sequence
  source 1..1131: mol_type = other DNA
atgaaccggtcattccacaagtctcagacactccgattttacgattgtagcgcagtggaggtcaagtccaagtttggcgctgaattccgacgattcagtctggaccggcacaaacctggcaaatttgaggacttctataagcttgtcgtgcacacgcatcacatctctaatagtgacgtgactattggttacgccgatgtgcacggtgacctcctacctattaacaacgatgataacttttgcaaggcggtgtcttctgccaatcccttattgcgcgtattcatacagaagcgcgaggaagcagagaggggcagtttgggcgccggcagtttgtgccgaaggagaagggcactgggggcactgagagacgagggccctcggcgcagggcacacctcgatattggactgcctagggattttagacctgtgtcgagtattatcgacgtcgatctggtccccgaaacccacaggagagtgcgactgcatcggcacggctgcgaaaaaccgctgggtttttatattagggacggggccagcgtcagagtcacacctcacggcttggagaaggtccctggaatcttcatttccagaatggtgcccggaggacttgccgagagtactggtcttctcgctgttaatgacgaggttcttgaggtgaacggcatcgaggtggccggcaagacactcgaccaggtgacggacatgatgatcgcaaatagtcataatcttatcgtcacagtcaagcccgcaaatcaaagaaacaacgtagttagaggaggccgggcgcttgggtcttcgggcccaccctcagatgggactgccggtttcgtggggcctcccgcaccccgcgttctccagaatttccatcctgatgaggccgaaagcgacgaggacaatgacgtggtgatcgaaggtaccttggaaccagcccggccaccgcaaacccccggcgctccagccggaagtctgagcagggtgaacggggcaggcctggcgcagaggctgcagcgcgacttggcgcttgacggcggtttgcagagattactgtcatccttgcgagctgatccacggcattctctggcactccccccgggcggagtagaggagcacgggccagcagtgaccctttag

SEQ ID NO: 127873 - DNA, 1236 bp, synthetic construct
  misc_feature 1..1236: note = Description of Artificial Sequence: Synthetic coding sequence
  source 1..1236: mol_type = other DNA
atggctgaggctgagctccacaaggagagactgcaggcgatcgccgaaaagcgtaagcgacagaccgaaatcgaaggcaaaagacagcagctcgatgagcagatccttctgcttcagcacagcaaaagtaaggtgctgagggagaaatggcttctgcaggggatacctgccgggaccgcagaggaggaggaggcccgccgccggcagtctgaagaggacgagtttagggtgaaacagctggaagataatatacaaagactcgaacaggagatacagacgctggaaagcgaagaaagtcagatatctgctaaagaacagataatcctggaaaagctgaaggaaactgaaaaaagcttcaaggacttccaaaagggattctcgtctactgatggagatgcagtgaactatatatcgtctcagttacctgacctacctattctctgttcaagaacggcagaaccatcacctggccaagacggtacctccagagccgcggcagtgtacgctatggagatcaatgtggaaaaggataagcagacgggagaaactaagattctttccacatcgaccatagggcccgagggtgtgcaccaaaaaggagtgaaagtctacgacgacggaacgaaggtcgtatacgaagttagaagtggcggaaccgtcgtggagaatggcgtgcataagctgtccacaaaggatgtggaggagctgatacagaaggcgggacagagttccctgggtggcgggcatgtctcggagcgcacggtgatcgctgatggatcactttctcaccctaaggagcatatgttgtgcaaggaggccaagttagagatggttcacaaatccagaaaagaccacagcagtggtaaccctgggcaacaagcccaagcacccagcgccgcaggccctgaggccaaccttgaccaaccagtaacaatgatttttatgggatatcaaaacatagaagacgaggaagaaaccaagaaagtgctgggctacgatgaaaccattaaagccgaactggtactgatcgatgaggacgacgaaaagagtctcagagaaaaaacggtcacagacgtgtccactatcgacgggaatgccgccgagcttgtgagtggacggccagtgagtgatactaccgagccaagttccccagaggggaaggaggaaagcctggctaccgagccagctcctggcacgcagaaaaagaagcgctgtcagtgttgcgtggtgatgtag

SEQ ID NO: 127874 - DNA, 1140 bp, synthetic construct
  misc_feature 1..1140: note = Description of Artificial Sequence: Synthetic coding sequence
  source 1..1140: mol_type = other DNA
atggagatggctgaggcggagctgcataaggagagacttcaagccatcgctgaaaaacggaagaggcagacggagattgaaggcaagcggcagcagttggatgaacaaatcttactgctacagcatagcaaatctaaggtgctgcgtgagaaatggctgctgcagggcatccccgctgggacagcagaagaagaagaagcacgcagacggcagtctgaagaggacgaatttagggtgaagcaattggaagataatatacagaggctggaacaggaaatccagaccctcgaatcagaggaaagtcagatctcagcgaaggagcagatcatcttggagaagctcaaggaaacagagaagtcattcaaagatttccagaaaggcttctcatctaccgacggggcagtgtatgcaatggagattaacgttgagaaggataagcagaccggggagaccaagatcctgtcaacatctactataggtcctgagggtgtgcaccagaagggcgttaaggtttatgacgacggcacaaaagtagtttacgaagtacgttccggcggcactgtggtcgaaaatggtgtgcacaaactgtctacaaaggacgtcgaagaattgatccagaaggcgggacagtcatcactgggcggaggtcatgtgtccgaacgcaccgtgatcgccgacggaagtctgtcccacccaaaggaacacatgctctgtaaggaagctaagctggaaatggttcataagtcccggaaggatcacagttctgggaaccctggacagcaggctcaggcacccagcgctgctggccccgaggcaaacctagaccagccggtgacaatgatattcatgggatatcagaacatagaagacgaagaagaaacgaagaaagtgctgggatacgatgagacgatcaaggcagagctggttcttattgatgaggatgacgagaagagtctgagggagaagacggttaccgacgtgagcaccattgacggcaatgccgccgagctggtgtctggccgaccagtcagtgatacgaccgagccatcttcaccagaggggaaggaagagagcctggcgactgagccggcacctggtacgcagaagaaaaaacggtgtcagtgttgtgtcgtgatgtag

SEQ ID NO: 127875 - DNA, 1242 bp, synthetic construct
  misc_feature 1..1242: note = Description of Artificial Sequence: Synthetic coding sequence
  source 1..1242: mol_type = other DNA
atggaaatggcagaggccgagctccataaagagcggttacaagccatcgctgagaaaaggaagagacagacggagatagaagggaagcgccagcagctggacgagcagatcctacttttacagcatagtaaaagtaaagtgctccgcgaaaagtggctactgcaaggaattcctgctgggacagccgaagaggaggaggccaggagaagacaaagcgaagaggatgaattccgtgtgaaacagcttgaagataatatacagagattggaacaagagattcagactcttgagtcagaagaatcccagatttcagcgaaagagcagatcatcctggaaaagctgaaggaaacagagaagtcatttaaggatttccaaaagggtttttcctccacggatggagacgcggttaattacattagctcacaactgcctgacctgccaatactatgttcccgaaccgcagaaccttctccaggacaggatggcacaagtagggcagctgctgtgtatgcaatggagatcaatgtagagaaggataagcagaccggcgaaaccaaaatactgtctacctcaaccatcgggccagagggggttcatcagaagggagttaaggtctacgacgacgggactaaagtagtctatgaagtaagatctggaggtactgtggtcgagaatggggttcacaagctgtctaccaaggacgtggaggaactcatccaaaaagctggccagtcctcacttggcggcggacatgtgagcgagaggactgtgattgctgacgggtccctgtctcaccccaaggagcacatgctatgtaaagaggccaagttagagatggtgcataaaagtcgtaaggatcatagttcaggtaaccccggccaacaggcccaggcaccctctgccgcaggccctgaagctaacttggatcagccggttactatgatctttatgggttatcaaaacatcgaagacgaggaggaaacaaagaaagtcctgggctatgatgagaccattaaagccgaattagtgctcatcgacgaggacgacgaaaaaagcttgagggaaaagaccgtgactgatgtaagtaccatcgatggaaatgccgccgaactggtatctggtcgtcccgtgtccgacacaacagagccatcgtcaccagagggtaaggaagaatccttggcgacagaaccagcccctgggactcaaaagaaaaaacgttgccagtgctgcgtagtcatgtag

SEQ ID NO: 127876 - DNA, 1167 bp, synthetic construct
  misc_feature 1..1167: note = Description of Artificial Sequence: Synthetic coding sequence
  source 1..1167: mol_type = other DNA
atgggcagggctaggaggtttcaatggcccttactgctcctctgggctgctgccgcgggacctggtgctggtcaggaggtacagactgagaatgtgacagttgcggagggcggggtagctgagatcacttgtaggctccaccagtatgatggaagtatcgtcgtgattcagaatcctgccagacagaccctgttcttcaacgggacccgagcgctgaaagatgagcgctttcaactcgaggaatttagccctagaagagtgaggatccgcttgtccgacgctcggcttgaagatgagggtggatatttctgtcagttgtataccgaagacacgcatcaccaaatcgctaccctgacagtcctggtggcccctgagaatcctgtagtagaagtgcgggaacaggccgtcgaaggcggggaggtagaactcagctgcctggtgcccagatcgaggccagccgccacgctgcgctggtatagggaccgaaaggagctcaagggagtatcttcatcccaggagaatggcaaggtgtggagcgtggcctcaacagtccgttttagggtggaccgtaaagatgatggagggatcattatttgtgaagcccaaaaccaggccttgccctccggccatagtaagcagacacagtacgtcttagatgttcagtacagcccaactgcgcggattcacgccagccaggcagtggtccgagaaggagacaccctcgtcctgacctgtgccgtaactggcaacccacggccaaatcagataaggtggaaccggggcaacgagtcgctgccagagagagcagaggctgtcggtgagacactcactcttcccgggctggtctccgctgataacggtacttacacttgcgaggcttctaacaagcacggccacgcccgcgcactttatgtgttggtggtctatgatcctggagcagtggtggaggcccagacatctgttccgtacgctatcgtcggtggaatactggctctgcttgtttttctgataatctgcgtgttggtcgggatggtctggtgctccgtccgccagaaaggaagttatctcacgcacgaggcatctggactcgacgaacaaggcgaggcaagagaggcgttcctaaacggatccgacggccacaaaaggaaggaggaattttttatttag

SEQ ID NO: 127877 - DNA, 1068 bp, synthetic construct
  misc_feature 1..1068: note = Description of Artificial Sequence: Synthetic coding sequence
  source 1..1068: mol_type = other DNA
atgggcaagctggtcgcattggtgctgctcggcgtcggcctcagtttggtcggtgagatgtttctggcattccgggaaagagtgaacgcaagccgcgaggtggaaccggtcgagcccgagaactgtcatctcattgaagaacttgaaactggcagcgaagacctggaaattttacccaacggtctggcctttatctctagcggtctgaagtatccgggcataaagtcattcaacccaaactctcctgggaaaatcctccttatggacctgaacgaggaagaccctaccgtactggaactgggcatcaccgggtctaaatttgacgtgagttctttcaatccccacggtataagcacatttacagacgaggataacgccatgtatctgctcgtggtaaaccaccctgatgccaagagcaccgtcgagttattcaagttccaggaggaggagaaaagtttgctgcatctcaagactataagacataagctgctccccaacttaaatgacattgtcgctgttggcccggagcacttctatggtaccaacgatcactactttctcgacccgtacctgcaaagctgggagatgtatctaggtcttgcctggagctatgtggtgtactactcaccttcggaagtgcgtgtggtggccgagggcttcgacttcgctaacggcattaacatctcccctgacggcaagtatgtttatattgctgaactcctagcccataagatccatgtgtatgagaagcacgctaattggactctgacgcccctgaagtccctagatttcaatactcttgtggacaatatatcagtggacccagagacaggggacttatgggtagggtgccacccaaacggtatgaaaatctttttttatgattccgagaatcctcccgcctccgaggttctacgcatccaaaacattctgacagaggaacctaaggtgactcaggtctatgctgaaaatggaactgtcttgcagggctcaactgttgcctcagtgtataaggggaagctcctgattggcaccgtgttccataaagcattgtactgtgaactgtag

SEQ ID NO: 127878 - DNA, 1017 bp, synthetic construct
  misc_feature 1..1017: note = Description of Artificial Sequence: Synthetic coding sequence
  source 1..1017: mol_type = other DNA
atggccgcgggatgctccgaggcaccccgcccggctgcagccagcgatggctcactggtgggacaggcaggcgtactaccttgtctggaactgcctacttatgctgcagcttgtgccctcgttaacagccgctattcgtgcctggtagctggccctcatcagcggcacattgcactgagccctcggtacctgaataggaagcggacaggtataagagagcaactcgatgccgaactgctgcggtattctgaatcactactgggtgttcccatcgcttatgataacattaaagtggtcggcgagctgggtgacatctacgacgaccagggtcatattcacctgaacattgaagccgatttcgtaattttctgccctgaacctggccagaaactcatgggtattgtaaacaaggtgtcttcatcccacattggctgcctcgtgcacggatgtttcaacgcgagcatcccaaaacctgaacagctgtccgctgagcaatggcagacaatggaaataaacatgggagatgagttggagttcgaggtttttaggttagacagcgacgccgccggagtattctgtattcgagggaagctgaatataacatctctacagttcaaacgcagcgaggtgtcagaggaggtcaccgagaacggaacagaagaagccgccaaaaagcctaagaaaaagaagaagaagaaagatcccgaaacctatgaagtggactcaggtaccaccaagctcgctgacgatgccgacgacaccccaatggaagagagcgcacttcaaaataccaacaatgcaaacggaatctgggaagaagaacccaaaaaaaaaaaaaaaaagaaaaagcaccaggaagtccaagatcaggacccagtttttcagggctctgacagttccggttatcaatctgatcataagaagaaaaagaagaagaggaaacacagtgaagaggctgaattcacccctccacttaagtgcagccctaagcgtaaagggaagtcgaatttcctttag

SEQ ID NO: 127879 - DNA, 1059 bp, synthetic construct
  misc_feature 1..1059: note = Description of Artificial Sequence: Synthetic coding sequence
  source 1..1059: mol_type = other DNA
ggagctgctgggggatgcggactggcgggcgaccgcgcaggcctaggcgagcgcctgctcgctctgcggaacagactcaaggctagccgcgaggtggaatcagtagacctcccccattgtcatttaatcaagggtatcgaggcgggcagcgaagacatcgatatactgcccaacggcctggccttcttttcagtcgggctgaaattccccggactccacagcttcgcccctgacaaacccggaggcatcctcatgatggatctcaaagaagagaaaccccgtgcaagagaactccgaataagccgtggcttcgatcttgcaagcttcaatccccacggaatcagcacatttatcgacaacgacgatactgtgtatctgtttgtggtcaaccaccccgaatttaagaatacagttgagatattcaagttcgaggaagctgagaactccctgctgcacctgaagactgtgaaacatgaattactgccttctgtcaatgacattaccgccgtggggcctgcccatttctatgccaccaatgatcattattttagcgacccctttctcaaatatctcgaaacttacctcaacctgcattgggccaatgtggtgtactactctccaaatgaagtgaaggtggtcgcagagggatttgacagtgccaacggcatcaacattagccccgatgacaagtacatctacgtagcggacattctggctcacgagatacacgtgttggagaagcataccaacatgaatctgactcaacttaaagtgttggaactggacactctggtggacaatctcagtatagatccttcatccggcgacatctgggtcgggtgtcacccaaacggccagaaactgttcgtctatgacccaaataaccccccctcctccgaggtgctacggatccagaatattctgagcgagaagccaaccgtaacaactgtctatgccaacaatgggagtgtgctgcaggggtcaagcgtggcctcagtgtacgatggcaaactcctgatcggcactctctaccaccgtgcattgtattgcgagctctag

SEQ ID NO: 127880 - DNA, 1128 bp, synthetic construct
  misc_feature 1..1128: note = Description of Artificial Sequence: Synthetic coding sequence
  source 1..1128: mol_type = other DNA
atggctccccccacagagctgctggcacgtcctgagaggggctccgctcccggcagtagggcgatgggccggctggttgcagttggtctccttggcatagcacttgcgttgctgggcgaacgtctgctggccctgcgtaatcgactgaaggcatcacgagaggtcgaatcagtggaccttcctcattgtcacctgatcaagggcatcgaggccggatcagaggatattgacattttacccaacggcttagcatttttttcagtgggactgaaattccccggcctgcacagcttcgcgcccgataagccgggtggcatcttgatgatggatctgaaagaagagaagccgagagcccgagaacttcgcatctccaggggctttgacttagcgtccttcaatcctcatggtatttctaccttcatcgataacgacgacactgtctacttgtttgtcgttaatcatccagaattcaaaaacaccgtggagatctttaagttcgaggaggccgaaaacagtctgctgcacttgaaaacagtaaaacacgagctgctgccatcagtgaacgatataaccgccgtgggccctgcccacttttatgccaccaacgaccattactttagtgatccctttctgaagtatttagagacctacttgaatctgcactgggcaaacgtggtatactactcacctaacgaagtcaaggtcgtcgcggagggattcgactccgctaatggtattaatatttccccagacgacaaatatatttacgtcgccgatatcctggcccacgaaattcatgtgcttgagaagcacacaaacatgaacttgacccagctgaaagtgctggagcttgacacactggtcgacaacctgtccatcgatccctcctcaggagatatctgggttggttgccaccctaatgggcaaaagctgtttgtctatgatcccaataacccaccatcgagtgaagtcctgagaatccagaatatactgtcggaaaagccaaccgttactacagtgtacgccaacaacggctcagtgctccagggttctagtgtggcctccgtatatgatgggaagcttctgattggtaccctgtatcacagggccctatactgtgagctatag

SEQ ID NO: 127881 - DNA, 1029 bp, synthetic construct
  misc_feature 1..1029: note = Description of Artificial Sequence: Synthetic coding sequence
  source 1..1029: mol_type = other DNA
atgggcagactggtggccgtcggcctgctggggattgcattagccttactgggcgaaaggcttctggccttacggaacagactcaaagcctctcgcgaagtcgagtcggtggacttaccgcactgccatctcatcaaaggtattgaggccgggagtgaggacattgatatcctgcctaatggactcgccttcttctccgtcgggctgaagttccccggacttcacagtttcgcccccgataagcccggcggcattttgatgatggatctgaaggaggagaaacctcgagcccgagagctgcgcatctcgcgaggcttcgatttggcgtccttcaacccacacggtatcagcactttcattgacaacgaattcaagaataccgttgaaattttcaagtttgaagaagcagaaaatagtttactgcaccttaagacagttaagcatgagctgctcccctccgttaatgatattaccgctgttggccctgctcacttttatgcgacgaacgatcactacttttccgacccatttctcaagtatctggaaacatatttgaaccttcactgggctaacgtggtgtactattcccctaatgaagtcaaggttgtcgccgaggggtttgactccgcgaatgggatcaacatttcccccgatgacaagtatatttatgtggcggatatcctcgctcatgagattcacgttctcgagaagcacactaacatgaatctgacccaactgaaagtgttagaacttgacaccctagtggataacctttctattgatccttcaagcggtgacatctgggtggggtgtcatcccaacggccaaaagctcttcgtgtatgacccaaacaatcccccttccagcgaagtcctgcggattcagaacatactatctgagaagcctactgtgaccactgtgtacgcgaacaacggctcggtgctgcaagggtcgagtgttgcctcggtgtacgacggaaaactcttaatcggtactctgtaccatcgcgcattgtactgtgagttatag

SEQ ID NO: 127882 - DNA, 1065 bp, synthetic construct
  misc_feature 1..1065: note = Description of Artificial Sequence: Synthetic coding sequence
  source 1..1065: mol_type = other DNA
atgggcaagctcgttgccttggttctgttgggcgtaggcctttctctcgtgggagagatgtttctcgctttcagggagagggttaacgcgagtagggaggtggaacctgtggaaccggaaaactgtcacttaatcgaagaattagagtcaggcagcgaagatatcgacatcctgccatcgggccttgccttcatctccagcgggttaaaataccccgggatgcccaattttgccccagatgagcctggaaagattttcctcatggatctgaacgagcagaaccctagagctcaggcactggaaatcagcggaggtttcgacaaggaattgtttaaccctcacgggatttcaatctttattgacaaagataatactgtgtacttgtacgtggttaatcaccctcatatgaaaagcaccgtcgaaatttttaagtttgaggagcagcagagaagcctagtgtaccttaaaacaatcaagcatgagctcttgaaaagcgtaaacgacatcgttgtgctgggtcccgaacagttttatgccaccagagaccactactttactaacagtctgcttagcttttttgaaatgattcttgatctacggtggacctatgtactgttttacagccctcgcgaggtcaaagtcgtggccaaggggttttgcagtgccaatggcattactgtgtctgcagatcagaaatacgtctacgtggctgacgtcgctgcaaagaacatccacattatggagaagcacgacaattgggatctcacccaactgaaggttatccaactgggcacattggtggataatttgacagtggacccagccactggggacatactcgccggttgccacccaaaccctatgaagctgctcaattataaccccgaagatccccctggatccgaggtgctccgtatacagaatgtgctgtcagaaaagcctcgcgtttcaaccgtgtacgcaaacaatggcagcgtgctgcagggcaccagcgttgccagtgtttaccacggcaagatactaatcggaaccgttttccacaaaaccctctactgtgaactgtag

SEQ ID NO: 127883 - DNA, 1572 bp, synthetic construct
  misc_feature 1..1572: note = Description of Artificial Sequence: Synthetic coding sequence
  source 1..1572: mol_type = other DNA
atgatgcttcgtggcaaccttaagcaggtcagaatagagaaaaacccagcaagacttcgagcactggaatccgctgtcggagaatcagaaccagcagcggccgcagccatggccttagccttggccggcgagcccgccccacccgcacccgctcccccagaagaccaccccgatgaagaaatggggtttactattgatatcaagtctttcctgaagcccggtgaaaagacctacacacagcgatgtaggctgttcgtgggtaacctcccgacagacattactgaagaagacttcaagagactgtttgaacgatacggcgagccgtcggaggtgttcatcaaccgggatcgagggttcggctttatacggttagaatcccggacgcttgccgagatcgccaaggctgagctggacgggaccattctgaaatcgagacctctcagaatacgctttgccacccacggtgccgccctgaccgtcaagaatctttcccccgttgtgtcaaatgaactgctggagcaagcatttagccagttcggacccgtggagaaggcagtggtggtggtggatgaccgcggtagagcgactggcaagggattcgtggaatttgccgcaaaacccccggccagaaaggccctcgaaagatgtggggatggggcctttctgcttactaccacccctcgccccgtgattgtggagcccatggagcagtttgacgatgaagatggcctgcctgaaaaactcatgcagaaaacacagcagtaccataaggaacgcgagcagccccctagattcgcacaaccgggaacgttcgaattcgagtatgcatccaggtggaaggccttagatgaaatggagaaacagcagcgcgagcaagtcgatcggaatataagagaagctaaagagaagttggaggctgagatggaggccgcccggcacgagcatcagctaatgttgatgcgtcaagacctcatgcgacgccaagaggagctgagaaggctggaggaactacggaaccaggagctgcagaagcgtaaacaaatccagctgcgccacgaggaagaacaccgccggagagaggaagagatgatccgccaccgagagcaagaagaactgagacgccagcaggaaggatttaaacctaactatatggaaaacagagagcaagaaatgcgtatgggcgacatgggaccccgcggcgccatcaacatgggggacgcattctcccccgctcccgcgggaaatcagggccctcctcctatgatgggcatgaatatgaataaccgggccacaatcccaggcccaccaatggggccaggccccgccatgggtcctgaaggggccgctaacatgggcactccaatgatgcctgacaacggtgctgtccacaacgatcggttcccccaggggcccccatcccagatgggatcacctatgggctcccgtactggaagcgaaacaccacaagcccctatgtccggagtaggtccggtatccggagggcccggcgggttcggtaggggatcccagggaggaaatttcgagggacccaacaaaaggcggagatactag

SEQ ID NO: 127884 - DNA, 1392 bp, synthetic construct
  misc_feature 1..1392: note = Description of Artificial Sequence: Synthetic coding sequence
  source 1..1392: mol_type = other DNA
atgggctttaccatcgacatcaagtcctttctgaagcctggggagaaaacgtatacacaacggtgtaggcttttcgtggggaatttgcctaccgacatcacagaagaggactttaagagactctttgaacggtacggggagccttctgaggtgtttattaaccgagatcgaggatttggttttataagacttgagagccggaccctcgccgaaattgctaaagccgagctggatggaactattctgaagtctagacctctcaggattcgcttcgcgacccacggcgcagccctcaccgttaagaacctgagcccggttgtaagcaacgaactcctcgaacaggccttttctcagttcgggccagtcgaaaaggccgtcgtggtggtggacgacagaggccgggccaccggaaaggggttcgtggaatttgcggccaaacctccggcaagaaaggcattagaaaggtgcggagatggggcctttctgctaaccacaactccaaggcccgtgatagtggagccgatggaacagtttgacgatgaggacggcctgcccgagaagctcatgcaaaagacccagcaatatcacaaggaacgcgaacagcctccacggttcgctcagcctggaacattcgaattcgagtatgcttctagatggaaggccttagacgagatggaaaaacagcaaagggagcaagttgatcggaatatccgggaggcgaaagagaaacttgaagccgagatggaagcagcccggcacgagcaccagctcatgctgatgagacaagatttaatgcgcagacaagaggaactcagacggctggaggaactacggaaccaggaactccagaagcgcaagcagatacaactgagacatgaagaagagcaccgaaggcgtgaagaagaaatgatacgccatcgggagcaagaggagctcaggcggcagcaggagggattcaaacccaattacatggaaaaccgggaacaggagatgagaatgggagatatgggacccaggggagcaattaatatgggagatgccttctctcctgcccccgcaggcaatcaaggtccccccccaatgatggggatgaacatgaataaccgggccacgataccagggccgcccatgggcccaggtccagccatggggccggaaggggcagcaaacatgggaacccctatgatgcctgacaatggggctgtccataacgacagatttccacaaggcccaccaagtcaaatgggctcccctatgggatctcggacaggctctgaaaccccgcaagctccgatgtccggggtaggcccagtgtccgggggacctggcggctttggcaggggatcacagggcggtaactttgaaggaccaaacaagagacgcagatactag

SEQ ID NO: 127885 - DNA, 747 bp, synthetic construct
  misc_feature 1..747: note = Description of Artificial Sequence: Synthetic coding sequence
  source 1..747: mol_type = other DNA
atgatgttacgcggtaacctgaaacaggtgcggatcgaaaaaaatcccgcccgcttgcgcgcacttgagtccgctgtcggggaatctgaacctgcggccgcagcagctatggctctggcgctggccggagagcccgcaccccctgcaccagctccgcctgaagatcacccagatgaggagatggggttcactatagacattaaaagttttctgaaacctggtgaaaaaacttatacacaacggtgcaggttatttgtggggaacctgcccaccgacatcaccgaagaagactttaaacgcctgtttgaacggtacggcgaaccgtcggaggtgtttattaatagagaccgcgggttcgggtttatcaggctggagagtcgtacgttagccgaaattgcaaaggcagaattagacggaactatcctgaaaagtcgccccctgcgaattcgattcgccacacacggtgccgccctgaccgttaagaatctatctcctgtcgttagtaacgaactgctggagcaggccttctcacagttcgggcccgtggagaaggccgtcgtcgtcgtcgatgatcgcggtagggcaacaggaaagggattcgtagagttcgctgcaaagccacccgctagaaaggccttggaacgctgcggcgacggagcttttcttctgaccactactcccagaccagttatcgtggaacccatggagcagttcgatgatgaagatggcttaccagagaaactgtag

SEQ ID NO: 127886 - DNA, 309 bp, synthetic construct
  misc_feature 1..309: note = Description of Artificial Sequence: Synthetic coding sequence
  source 1..309: mol_type = other DNA
atgtctgaaaagagtgtggaagctgctgccgaactttccgcaaaagacctgaaagaaaaaaaggaaaaggtggaggagaaggcttctagaaaggagaggaagaaggaggtcgttgaggaagaagagaacggcgcagaggaagaagaggaggagaccgctgaagatggagaggaggaagatgagggagaggaagaggatgaggaggaagaggaagaggacgacgaaggtccagccctgaagcgcgccgcggaagaagaagatgaggctgacccgaagcgccagaaaacagagaatggcgcaagtgcatag

SEQ ID NO: 127887 - DNA, 315 bp, synthetic construct
  misc_feature 1..315: note = Description of Artificial Sequence: Synthetic coding sequence
  source 1..315: mol_type = other DNA
atgtctgagaaatctgtagaggctgccgccgaactgtcagctaaggacctcaaggagaagaaagagaaggtggaagaaaaagcctcccgtaaggagcggaagaaagaggtcgttgaggcaccagtgccactcgtggtcatggtgggtaaagcctgcagccagccagaggctacccccagccccgggccacaccggaggcggcgcacagggctcaggagaaaaaagaagaagctgcccagaatggagcggcggaaaatgaagggcaaaaaaaagatgcgcaagaaaaagaaacggatgatgaagggcccccgttag

SEQ ID NO: 127888 - DNA, 306 bp, synthetic construct
  misc_feature 1..306: note = Description of Artificial Sequence: Synthetic coding sequence
  source 1..306: mol_type = other DNA
tcccgcgaccctgcttgcagagcagctgagctctccgctaaagacctcaaagaaaagaaggagaaagtcgaggaaaaggcatctcggaaggagaggaaaaaggaggtggtcgaggaggaggaaaacggcgcagaggaggaagaggaagagaccgccgaggatggggaagaggaggatgagggagaagaagaagatgaggaggaagaagaggaggatgatgaagggcccgcccttaagcgggccgctgaggaggaggacgaggctgacccaaaacggcagaagacagagaatggtgcttccgcctag

SEQ ID NO: 127889 - DNA, 528 bp, synthetic construct
  misc_feature 1..528: note = Description of Artificial Sequence: Synthetic coding sequence
  source 1..528: mol_type = other DNA
atgcagcgcaggttggtgcaacagtggagcgtggcggtgtttttgctgtcttacgctgtgccatcctgcggaagaagtgtggaaggcctctcacgccggctgaaacgcgcagtatccgagcatcagctgctacatgataagggtaaatctatccaggacctgaggagacgatttttcctgcaccatttaatcgccgaaatccacactgccgaaataagggccacctcagaggttagcccaaacagcaagccttctcctaacactaaaaaccatcccgtgcggtttggttccgatgacgaagggcggtatttaacacaggaaacaaacaaagtggagacttataaggagcagcccctgaaaacgccagggaagaagaaaaaagggaagccaggcaaaagaaaggaacaagagaagaaaaaaaggaggacgcgatcagcctggcttgactccggcgtgacaggtagcggcctcgagggagaccacctgtccgacacctccaccacctcactggaactggacagcaggtag

SEQ ID NO: 127890 - DNA, 630 bp, synthetic construct
  misc_feature 1..630: note = Description of Artificial Sequence: Synthetic coding sequence
  source 1..630: mol_type = other DNA
atgcaacgacgcctcgttcaacaatggagcgttgctgttttcctgttatcatatgccgtgccatcctgtgggcgatccgttgaaggtttgagccgaaggctgaagagggcagtttccgaacaccagcttctccacgataaggggaagtcgattcaggacctcaggcgtagatttttcctccaccatctgatcgctgagatccacactgccgagatcagggccacctccgaagtgtcccccaactcaaagccctcaccgaatactaagaaccatcctgtacgcttcggctccgatgacgaggggcggtacttaacacaagagacgaacaaggtggagacctacaaagagcagcctctgaagacccccggaaagaaaaagaagggaaagcccggcaagcgaaaggaacaagagaaaaagaagaggagaacccgttctgcatggctggacagtggtgtgactggcagcgggttggagggtgatcatctgagcgacactagcacaaccagcctcgaactggactctcgaactgcattgctgtggggcctgaagaagaagaaagagaacaaccgacgcactcaccatatgcagctgatgatctctctgtttaaaagtccactccttttactgtag

SEQ ID NO: 127891 - DNA, 528 bp, synthetic construct
  misc_feature 1..528: note = Description of Artificial Sequence: Synthetic coding sequence
  source 1..528: mol_type = other DNA
atgcaacggcggctggtccaacagtggtcagttgcagtgttcttactctcttatgcagtcccatcgtgcggccggagtgtggaaggactgtcacgcagacttaaacgtgctgtgagtgagcaccagcttcttcatgataagggtaaatctattcaggatctccgtagaaggttcttcttgcaccacctcattgccgagattcataccgccgaaatacgagccactagcgaggtctcgccgaacagcaaacccagccccaataccaagaaccaccctgtgcgctttggttccgacgacgaaggtcgatatctaactcaggaaacaaacaaggtggaaacatataaagaacagccccttaaaaccccggggaagaaaaaaaaagggaagcctgggaagcggaaagagcaggagaagaagaaaaggcgaacacggtctgcatggctcgactctggggtcacgggcagtgggctggagggcgaccaccttagcgatacgagtaccacttctcttgagctcgattcacggtag

SEQ ID NO: 127892 - DNA, 534 bp, synthetic construct
  misc_feature 1..534: note = Description of Artificial Sequence: Synthetic coding sequence
  source 1..534: mol_type = other DNA
atgcagaggaggctagtgcagcaatggagcgtcgccgtcttcctgctgagctacgctgtcccatcctgcggccggtctgtcgagggcctgagccgccggttgaagcgcgccgtgtcggagcaccagttactgcatgacaaaggcaagtctatccaggaccttagacgacgcttcttcctccatcacttgattgcagagattcacaccgccgaaatcagagctactagcgaggttagtcctaactccaaaccaagcccaaacactaagaaccaccctgtgcgattcggaagtgatgacgaaggtaggtatctcacccaagagacaaataaagtcgaaacttataaggagcagcctctgaagaccccaggcaaaaagaagaagggaaagccaggaaagagaaaagagcaggagaagaagaaaaggagaacgcgcagtgcatggcttgactccggcgtgaccgggtcaggactggaaggtgatcacctgtcagataccagcacgaccagcctcgagctcgatagtagaagacactag

SEQ ID NO: 127893 - DNA, 528 bp, synthetic construct
  misc_feature 1..528: note = Description of Artificial Sequence: Synthetic coding sequence
  source 1..528: mol_type = other DNA
atgcagagacgccttgtccaacagtggtctgttgcagtcttcctgctgtcttacgccgtacctagttgtgggcgcagcgtggaagggttgtccagacgtctgaagcgtgctgtgtccgagcatcagctgctgcatgacaaggggaagtctatccaggatctaagacgccggttttttttgcatcacctcattgctgagattcacacagctgagatacgagcgactagcgaagtcagtcccaattccaaacctagcccaaatacaaaaaaccatccggtccggttcggctctgatgatgagggccgttatctgacacaggagacaaataaggttgaaacttataaggaacagccactgaagacacccggcaaaaagaaaaaggggaagcccggcaaaagaaaggagcaggaaaagaaaaagaggagaacccgatcggcgtggttggattccggcgtgaccggttcaggcctcgagggtgaccatctgtctgatacgtcgaccaccagtttagaactggattcccgatag

SEQ ID NO: 127894 - DNA, 81 bp, synthetic construct
  misc_feature 1..81: note = Description of Artificial Sequence: Synthetic coding sequence
  source 1..81: mol_type = other DNA
acggctctgctttggggactaaagaagaagggaaagcagcagaaaaacacttcctatgccacaaacgatttaattatctag

SEQ ID NO: 127895 - DNA, 630 bp, synthetic construct
  misc_feature 1..630: note = Description of Artificial Sequence: Synthetic coding sequence
  source 1..630: mol_type = other DNA
atgcagcggagactggtgcagcagtggagtgtcgccgtatttctgctaagctacgccgtaccaagctgcggccgcagcgttgaaggcctgtcaaggcggttgaagagagctgtgtcagaacatcaacttctgcacgataagggcaagagtattcaggatctcaggcgtcgattttttttgcatcatctgatcgctgagattcacaccgcagaaattagagccacctcagaggtaagtccaaactccaaacctagccctaacacgaaaaaccacccagtgcggtttgggtccgacgacgaaggcaggtatctgacccaggagacaaataaggtggagacctataaagaacaacctcttaagacaccaggtaaaaaaaagaaagggaaacccggtaaaagaaaggaacaggagaagaagaagcgaagaacaagatccgcctggcttgattccggagtcacgggaagcggcctggagggagaccatctgagcgacacaagtaccactagcctggaacttgatagtcgaactgcactgctgtgggggctgaagaagaaaaaagagaacaaccggagaacccaccacatgcagctcatgatttcgttatttaagagccccctcctactgctgtag

SEQ ID NO: 127896 - DNA, 534 bp, synthetic construct
  misc_feature 1..534: note = Description of Artificial Sequence: Synthetic coding sequence
  source 1..534: mol_type = other DNA
atgcagcgtagactcgtgcaacagtggagtgttgccgtgtttctactgagctatgcggtgccaagctgcggtcggtctgtggaaggcctctctagacgtctgaagagagccgtgtccgaacatcaactgttgcacgataaaggaaagtcaattcaggacctgcggcgccggttcttcctgcatcacctgatcgcagagattcacacagcagaaattcgagcgacttctgaggtctcacccaatagcaaaccttcacccaacacaaaaaatcacccagttaggtttgggtcagatgatgagggacggtatctgacccaagagacaaataaagtcgaaacatacaaggagcagcccctgaagacgcctggaaaaaaaaagaaaggcaaacccggcaagagaaaagagcaagaaaagaagaagaggaggacgcgttccgcctggttagacagcggcgtgacaggctctgggctggagggggatcatctctcagatacatctaccacctcccttgagttagacagcaggagacactag

SEQ ID NO: 127897 - DNA, 519 bp, synthetic construct
  misc_feature 1..519: note = Description of Artificial Sequence: Synthetic coding sequence
  source 1..519: mol_type = other DNA
atgcagaggcgcctggtacagcaatggtcagtcgcagtgttccttctgagttacgccgttcctagctgtggacgtagcgtcgagggcctgagccgcagactgaaacgcgcggtgagcgaacatcaattgcttcacgacaaaggcaaatccattcaagacctccgccggcggttcttcctgcatcatttgattgcagagatccacactgctgagatccgcgctacgagtgaggtctcccccaatagtaaacccagtcccaacactaagaatcaccccgtccgattcggctctgacgatgagggtcgttacctcacacaggaaaccaataaagtggagacttacaaggaacagccactgaagactcctggaaagaaaaagaaagggaagccaggaaaaaggaaggagcaagaaaagaagaaaagaagaacaagaagtgcctggctagattctggcgtgacgggcagtgggctggaaggcgaccatttaagcgacacatcaacgacaagcctcgaactttag

SEQ ID NO: 127898 - DNA, 534 bp, synthetic construct
  misc_feature 1..534: note = Description of Artificial Sequence: Synthetic coding sequence
  source 1..534: mol_type = other DNA
atgcaacgcagacttgtccaacaatggtccgtagctgtattcctgctcagttatgcagtccctagttgcggacgttcggtggaaggtctgtcccgcagactgaaacgcgctgtgagcgagcaccaattgctacacgacaaaggcaaaagcattcaggacctcaggagacggttctttcttcaccatctgattgcagagatacataccgctgagataagggctacttccgaggtctctcctaacagtaaacccagtcccaacaccaagaaccatccagtcagatttggatctgacgacgagggacgctacctgacacaggagactaataaggtcgagacctacaaagaacaacccctaaaaaccccagggaagaaaaagaaggggaagcctggtaaacgaaaagagcaagaaaagaagaagcggaggacgcggtcagcatggctggactctggggtgacaggctccggcctggagggcgaccacctgtcagacacttctacaacctccctcgaactcgactctaggcgacactag

SEQ ID NO: 127899 - DNA, 891 bp, synthetic construct
  misc_feature 1..891: note = Description of Artificial Sequence: Synthetic coding sequence
  source 1..891: mol_type = other DNA
atggtcgcagagaaggagactctgagcttgaacaagtgcccggataaaatgcctaaaaggacaaagttgctggctcagcagccattaccagtgcatcaaccacattctctggtgagcgaaggcttcacagtgaaggcaatgatgaagaacagcgttgtaaggggcccacctgccgccggcgcattcaaggagcgaccgacgaagccgaccgcctttaggaagttttacgagcgcggcgacttccccattgccctggaacatgactcaaaaggcaacaagattgcatggaaagtagaaatagaaaagttggactatcaccactatcttcccctgttttttgacgggctgtgcgagatgaccttcccatatgaattctttgcccgacagggcattcacgacatgctggagcacggcggcaacaaaattctccctgtcctgccccagctgatcatccccattaagaatgcactgaatttaagaaatcgccaggtgatctgcgttaccctgaaagttctgcagcacctggtcgtgtccgctgagatggtcgggaaggcactggtgccgtactacagacagatcctgccagtactgaatatcttcaagaatatgaatggttcctacagcttgccaagactagaatgtagcggggctatcatggccagatgtaaccttgaccatttgggaagttccgaccctccaacatctgcctctcaggtagctgaaataatcgtgaattccggtgacggtatcgactattcccaacaaaaacgcgaaaacattggagatcttatccaagaaactctggaggccttcgaacgctacggaggtgaaaatgctttcattaatattaagtacgtcgtacctacttatgaatcatgtttgctgaattag

SEQ ID NO: 127900 - DNA, 774 bp, synthetic construct
  misc_feature 1..774: note = Description of Artificial Sequence: Synthetic coding sequence
  source 1..774: mol_type = other DNA
atggtggcggagaaggagacactgtccctgaacaagtgccccgacaagatgcccaaaagaacaaaactgctcgcacagcaacccctcccagtgcaccagccccattcactggtgtcggagggtttcaccgtgaaagccatgatgaagaatagcgttgtgcgcggacctccagctgctggggctttcaaagagaggccaaccaagcccaccgctttcagaaaattctacgagcgaggggattttcctattgctctggagcacgactcaaaaggtaataaaatagcctggaaggtcgaaatagaaaagctggactaccaccactaccttcctctgtttttcgatggtttgtgcgaaatgacttttccctacgagttttttgctcgacaggggattcatgacatgctggaacatgggggaaataaaatcctccccgtgttaccccagctcattattcccatcaagaacgccctaaacctccgaaacaggcaagtaatctgtgtaaccctgaaggttctgcagcacctcgtggtgtccgcagagatggtcggaaaggccctggtgccatactataggcaaatccttcctgttcttaatatcttcaaaaacatgaatgtgaactctggcgacggcatcgactactcacagcaaaagcgggagaacattggcgacttgatccaggagacactcgaggccttcgagaggtacgggggcgagaacgcgtttatcaatataaaatatgtggtgcctacttatgagtcttgtctgctgaattag

SEQ ID NO: 127901 - DNA, 774 bp, synthetic construct
  misc_feature 1..774: note = Description of Artificial Sequence: Synthetic coding sequence
  source 1..774: mol_type = other DNA
atggtagcggagaaggagactctcagtctgaataagtgcccggacaaaatgcctaagcgcactaagctgctggctcaacaacccttaccagtacaccagcctcacagcctggtgtctgagggcttcacagttaaggccatgatgaaaaacagtgtggtgaggggtcccccggccgccggagcttttaaggaaagaccaactaagccaaccgccttcagaaagttctatgagaggggcgactttccaattgcgctggagcacgatagtaaaggcaacaagatagcgtggaaagttgagatagagaagctcgactatcaccattaccttcctctgttcttcgatggactctgtgagatgaccttcccatatgaattttttgctaggcagggtatacacgatatgctggaacacggtggaaataagattctgcccgttttgccacagttaattattcccatcaagaacgctttgaatcttcgcaaccgtcaggtcatctgtgtcactctcaaggtcttgcagcacctggtagtgtctgccgagatggtcggcaaggccctggtgccctattatagacaaatcctccctgttttgaacattttcaagaacatgaacgttaactccggggacggaattgattactcccagcaaaagcgagagaacatcggagacctaatccaagagaccctggaggcatttgaacggtatggaggtgagaacgcctttattaatatcaaatacgtggtgccgacatacgagtcatgcttgcttaattag

SEQ ID NO: 127902 - DNA, 825 bp, synthetic construct
  misc_feature 1..825: note = Description of Artificial Sequence: Synthetic coding sequence
  source 1..825: mol_type = other DNA
atgtccggggagtgtcaatcgccccattgccctgggactagtgccgaattcttctttaagtgtggagcccatccgacctctgacaaagagacatcagtggccctgcacctgattgctacaaacagcagaaatatcacttgtataacatgcactgatgtccggtctcctgtattggtcttccagtgcaatagccgccatgttatatgtctggattgcttccacttatattgcgtcacgcgcttaaacgatcggcagttcgtgcacgatccccaactcgggtacagtctaccgtgtgtggcaggctgtcccaatagcctgatcaaggaactgcaccactttaggattctgggggaggaacagtacaacagatatcagcagtacggggcagaggaatgcgtcctgcaaatgggaggggttctgtgtccaagaccgggatgcggagcaggccttcttcccgagcctgatcaacggaaggtgacatgcgaaggaggtaacggcttagggtgtggcttcgcgttttgtagagaatgcaaagaagcatatcatgaaggtgagtgctccgccgtcttcgaagcttcggggactacgacacaggcctatagagtcgatgaaagagctgcagaacaggccagatgggaagccgcatcaaaggagactatcaagaaaaccacaaaaccttgcccccgctgtcacgtgcccgtggagaagaatggggggtgtatgcatatgaagtgtccgcagccacagtgtaggctcgagtggtgttggaactgcggatgtgaatggaaccgggtctgtatgggtgatcactggttcgacgtctag

SEQ ID NO: 127903 - DNA, 1107 bp, synthetic construct
  misc_feature 1..1107: note = Description of Artificial Sequence: Synthetic coding sequence
  source 1..1107: mol_type = other DNA
atgatagtgttcgttaggttcaattcctcacacgggtttccagtggaagtggactccgatactagcatcttccagctgaaagaagttgtcgctaagcgacagggcgtgcccgcagatcagctccgagtgatcttcgctggcaaggagctgagaaatgactggactgtgcaaaactgtgacctcgaccaacagtctatcgttcacatcgtccaacgcccttggcggaagggccaggaaatgaacgcgacagggggcgacgatccgcggaatgccgctgggggttgtgaacgtgagcctcagagcctcaccagggttgacctttcttcatctgtcttgccaggagactccgtcggacttgcagtcattctccatacagattcaaggaaggacagcccacctgcaggttccccggccggaagatctatctataactctttctacgtttattgcaaagggccttgtcagagggttcagcccggtaagctgagagtgcaatgcagcacatgtagacaggccacactgaccttgactcagggcccgagctgttgggatgacgttctaatccctaacagaatgtctggggaatgccaatccccgcactgtcccgggacaagcgcagagttctttttcaagtgtggggcgcaccccactagtgacaaggagacatccgtcgctctgcaccttatcgccaccaatagccggaacatcacttgtattacctgcacagatgtgcggtcacccgttctggtctttcagtgcaacagtcgtcacgtgatctgtctggactgctttcatttatattgcgtaacacggcttaacgatcggcaatttgtgcacgatccccagctgggttattcactaccttgtgtcgccggctgcccaaactccctaatcaaggaattgcatcatttccggatcttgggggaggaacaatataatcgctaccagcagtacggggctgaggagtgtgtgctccagatgggtggggtactctgtcccaggcctggttgcggtgccgggctgctccccgaacccgatcaaaggaaagtcacctgcgaggggggcaacggtctcgggtgcggctatggccagagaagaactaagtag

SEQ ID NO: 127904 - DNA, 825 bp, synthetic construct
  misc_feature 1..825: note = Description of Artificial Sequence: Synthetic coding sequence
  source 1..825: mol_type = other DNA
atgtccggtgaatgtcagagtccccactgtccaggcaccagcgcagagtttttcttcaagtgtggagctcaccccactagtgataaggagacatctgtggcactacatctgatagccaccaactccagaaatatcacctgcatcacttgcaccgatgtgcggtctcctgtgcttgtgttccagtgtaattccagacatgtgatctgcctggactgttttcacctgtactgcgtaacgagactaaatgatcgacagttcgtgcacgacccacagctcggctatagcctcccctgtgtggcaggctgtccaaacagtctcatcaaggagctccatcacttccgtatccttggagaggagcagtacaatcgatatcaacagtatggcgcagaagagtgtgttcttcaaatgggaggagtcttatgccccaggcctggatgcggggctggtctgctgccagaacctgaccagaggaaagtcacctgtgaaggcggcaacgggctgggctgtgggtttgctttctgtcgggaatgcaaagaggcatatcacgagggagaatgcagtgctgtgtttgaggcgagtgggaccactacccaggcatacagggtggatgagcgggcagcagagcaagcccgttgggaggcagcttctaaggagacaatcaagaaaaccaccaaaccctgcccccgctgtcatgtccctgttgaaaaaaatggcggttgcatgcatatgaaatgcccacagccccagtgtaggctcgaatggtgttggaattgcggctgcgaatggaacagggtgtgcatgggcgaccactggttcgacgtatag

SEQ ID NO: 127905 - DNA, 657 bp, synthetic construct
  misc_feature 1..657: note = Description of Artificial Sequence: Synthetic coding sequence
  source 1..657: mol_type = other DNA
atgaatgcaacggggggcgacgacccacggaacgctgctggtggctgcgaaagggaaccacagtccctcaccagggtcgatttgtcgtcctccgtactccccggtgatagcgtcggtctggcggtgatcctgcacaccgattctcggaaagattccccccctgctggatccccagctgggaggtctatctacaacagtttttatgtgtactgcaaaggcccgtgtcaacgagtgcagccaggtaagctgcgagtccagtgcagtacctgccgtcaagccaccctgactctcacacaagggccttcctgttgggatgatgtcctaataccaaacaggatgtccggcgagtgtcagagcccccattgcccagggacttctgcagaatttttttttaagtgcggagcacatcctactagtgataaggaaaccagcgtggcgctacatcttattgccacaaactctcggaatatcacttgcatcacttgtaccgacgtccgaagcccagtgttggttttccagtgcaattccagacacgttatctgcctcgactgtttccacctgtactgcgtgacaaggcttaatgatcgccaattcgtgcacgatccgcagttagggtacagcctaccatgcgtggtgtccctgctacctagccaatag

SEQ ID NO: 127906 - DNA, 951 bp, synthetic construct
  misc_feature 1..951: note = Description of Artificial Sequence: Synthetic coding sequence
  source 1..951: mol_type = other DNA
atgatagtcttcgtaaggttcaacagctctcacgggttccccgtcgaggtcgatagcgatacctcaattttccagttaaaagaggtggtggctaaacgtcagggagtaccggcagaccagctgcgtgtcatcttcgctggcaaggaactcagaaacgactggaccgtccaagaattttttttcaagtgcggcgctcacccgacctccgacaaagagacatcagtggcactgcacctaattgctactaatagtcgtaatattacctgcattacctgcactgacgttaggtctccagtgctggtgtttcagtgtaattcgaggcacgtaatctgtctagattgtttccatctgtattgtgtgacacgtctcaacgacagacagtttgtacacgacccccagttaggctactcgcttccatgcgttgcggggtgtcccaactctttgattaaagagttgcaccacttccgaattttgggtgaggagcaatataatcggtaccagcaatatggagctgaggagtgtgtcctgcagatgggaggcgtcctgtgtccaagacccggctgcggagccggactcttgcccgagcctgatcagagaaaggttacctgcgagggagggaacggacttggctgtggcttcgccttttgccgtgaatgcaaagaggcgtatcatgaaggcgagtgctccgcggtgttcgaagcatccggcactaccacccaggcctatcgcgtggatgagagagcagccgagcaagcaagatgggaggccgctagcaaagagaccattaaaaaaaccaccaaaccctgtcctcggtgccatgtgcctgtggagaaaaatggcgggtgtatgcatatgaaatgcccacagcctcaatgccgcctcgagtggtgttggaactgtggatgtgaatggaatagagtgtgtatgggggaccactggttcgacgtatag

SEQ ID NO: 127907 - DNA, 1314 bp, synthetic construct
  misc_feature 1..1314: note = Description of Artificial Sequence: Synthetic coding sequence
  source 1..1314: mol_type = other DNA
atgattgtgtttgttaggtttaacagtagccacgggttccccgtcgaagtggactctgacacctccatctttcagctcaaagaggtggtggctaaacggcaaggggttcccgccgaccagctgagagttatctttgccggcaaggagctgcgtaatgattggaccgtgcagaactgcgacctggaccagcagtctatagtgcatattgtgcagagaccatggagaaaggggcaggaaatgaatgccacaggcggtgacgacccacggaatgcggccggggggtgcgaaagggagcctcaaagtctaacccgggtggatctgagtagttccgtgcttcctggagacagcgtggggctcgccgtgatcttgcacaccgatagtaggaaggattcgccaccggctgggagtccagccggccgctccatttataatagcttctacgtttattgcaaaggaccatgccagcgggttcagcctggaaagttgagagtgcagtgttcaacttgtcgacaggctacgttaacactcacccaagagtttttctttaagtgtggcgcccatccgacaagtgataaagagacctcagtcgccctgcacctgattgccaccaacagcaggaacatcacatgtattacctgcacagatgtgcgctcacctgttctcgtcttccaatgcaattcaaggcatgtgatttgccttgattgcttccacctgtactgtgtgactcgcttaaatgatcgccagttcgtgcatgatcctcagttaggttatagtctcccttgtgtagccggttgcccaaacagccttattaaagagctacatcattttcgcatcctgggcgaggaacagtacaacaggtatcagcagtatggtgcggaggaatgtgtgttgcagatgggtggcgtgctctgcccgagacctggctgtggcgccggactactgccagagccagaccagcgcaaagtaacctgcgagggaggcaatggactcggttgtggtttcgctttttgccgagagtgcaaggaggcctatcacgagggagaatgctccgccgtatttgaggcgagtggcaccaccactcaggcttatcgggtggatgagagagccgccgaacaggcaaggtgggaagccgccagcaaggagacaataaagaagacgactaagccctgcccgcggtgtcatgtgccagtcgaaaagaatggcggatgtatgcatatgaagtgtccgcagccccagtgtcgtcttgagtggtgctggaattgcgggtgcgagtggaacagggtgtgcatgggggaccactggtttgatgtgtag

SEQ ID NO: 127908 - DNA, 1398 bp, synthetic construct
  misc_feature 1..1398: note = Description of Artificial Sequence: Synthetic coding sequence
  source 1..1398: mol_type = other DNA
atgatcgtttttgtgaggtttaactccagtcatggtttccccgttgaggtagatagtgatacatccatattccagttaaaggaagtggtagccaaacgtcagggggttccggccgaccagctgcgcgtgatatttgctgggaaagagctgcggaatgactggactgtgcagaactgcgacctcgaccagcaatcgatagtacacatcgtgcagagaccctggaggaaagggcaagaaatgaacgcaacaggtggggatgatccacgaaatgctgccggtggctgcgagcgagaacctcagtccctgacccgcgtagacctcagctctagcgtgctacctggggatagcgttggcttggcagtcatacttcacacagatagcaggaaagacagcccccctgcaggaagtcctgctggccggagcatttacaactcgttttatgtctactgtaaaggcccctgtcagcgggtccagcccggaaaactgagggtgcaatgtagcacgtgtcggcaagccaccctaactctgacacagggtcctagctgctgggacgacgttctcattcctaaccgaatgtcaggggagtgtcaaagcccacactgtcctggcacttcagcagagttcttcttcaagtgcggtgcccatccgacttccgataaagagactagcgtagcgctgcacttaatagccacgaacagccgcaatattacatgtattacatgcactgatgtgaggtcccctgtccttgtcttccaatgcaatagcaggcatgtcatctgcttagactgtttccacctttactgcgtgacacgcctcaacgaccgccagttcgtccacgatcctcagctgggttattcactgccttgcgtcgccggctgtccaaacagcttgattaaggaattacaccatttccggattttaggcgaggagcaatacaacagatatcagcagtatggcgccgaggagtgcgtcctgcagatgggaggcgtcctgtgccccagacccgggtgcggggccggactgctgccagagccggaccagcgcaaagtcacctgtgagggtgggaatggcttagggtgcggttttgcattttgccgtgaatgtaaggaggcttatcatgagggggagtgctctgccgtattcgaagcatctggtaccactactcaggcctaccgcgtcgatgagagagctgcagagcaggccaggtgggaggccgcctccaaggagaccatcaagaaaacaactaagccatgtcctcggtgtcacgttcctgtcgaaaaaaatggtggctgcatgcatatgaagtgcccccagccacaatgccgactcgagtggtgttggaactgcggatgtgagtggaaccgcgtgtgtatgggagaccattggttcgatgtatag

SEQ ID NO: 127909 - DNA, 612 bp, synthetic construct
  misc_feature 1..612: note = Description of Artificial Sequence: Synthetic coding sequence
  source 1..612: mol_type = other DNA
atgtctggagagtgtcagtctccccattgcccaggtacttccgctgagtttttcttcaagtgtggcgcccaccccacctctgacaaggagacctcggttgcgttgcacctgatcgcaaccaattcacgcaatatcacatgtatcacttgcacagacgtgaggtctcctgtgttagtatttcagtgtaactccagacacgttatttgcctggactgttttcacctttattgtgtcacaaggctcaacgacagacagtttgtgcatgatccccagctggggtattcacttccttgcgtcgctggctgtcccaattcattgattaaagagctgcatcatttccgaattctgggcgaggagcagtacaacagataccaacagtacggggccgaagaatgtgtgcttcaaatgggcggcgtgttatgcccccggccagggtgcggtgctggtttgctgccggagcctgatcagcgtaaggtgacttgtgagggagggaatggcctcggttgtggatttgcattttgccgagagtgtaaagaagcctatcacgaaggtgagtgcagcgccgttttcgaggcctccggcactactactcagcatagcggctgtacatag

SEQ ID NO: 127910 - DNA, 429 bp, synthetic construct
  misc_feature 1..429: note = Description of Artificial Sequence: Synthetic coding sequence
  source 1..429: mol_type = other DNA
tctgtgtttgtgcggttcaacagtagtcacggctttcccgtggaggtcgatagtgacacctctatcttccagttgaaggaggtcgtcgccaagagacagggcgttcctgcagaccaactccgcgtgatattcgccggcaaggagctgcgtaacgactggaccgttcagaactgcgatctggatcaacaatccattgtccacatcgtccaacgcccgtggagaaaggggcaagagatgaatgcaactggcggggatgatccaagaaatgctgccggtggctgcgagagggagcctcagtcactgacgcgggtcgacttatctagttcagtgctaccaggggactccgttggcctggctgtgatccttcacaccgactctaggaaggattcaccaccagccggcagccctggcaactgcctccacgggtag

SEQ ID NO: 127911 - DNA, 429 bp, synthetic construct
  misc_feature 1..429: note = Description of Artificial Sequence: Synthetic coding sequence
  source 1..429: mol_type = other DNA
atggctgcagtcgtcgctgcaactgctctgaaaggccggggagcccgtaatgccagggtgctgaggggcatactggcaggcgcaaccgctaacaaagcgagtcataaccggaccagggcattgcagtcccactcatctcccgaggggaaagaagagccagagcccttatctccagagctggagtacatccctcggaaacggggaaaaaaccccatgaaggccgtcggactcgcctgggctatcggattcccctgtggaatcctccttttcattttgacgaaacgcgaggtagataaagatcgcgtgaaacagatgaaggcgagacaaaacatgcgtcttagcaatactggcgaatacgagagccaaaggttccgggctagtagtcagtctgcgccctcaccggacgtgggatctggcgtgcagacctag

SEQ ID NO: 127912 - DNA, 1086 bp, synthetic construct
  misc_feature 1..1086: note = Description of Artificial Sequence: Synthetic coding sequence
  source 1..1086: mol_type = other DNA
atggcctggcaggggtggcctgccgcttggcagtgggtagccggatgttggcttctccttgtacttgtcctggtcctcctggtaagccccaggggctgccgcgctcgaaggggcctgcgaggactgctaatggcgcattcccagaggctcctttttaggatcggatactccctttatacaaggacttggcttggctacctgttctataggcagcagcttaggcgtgctaggaataggtatccaaagggccatagtaaaacacagccgcggctgttcaacggggttaaagtgctccctataccagtgttgtctgacaactactcatatctgatcatcgacacgcaagcccagctagccgtagctgtcgaccctagtgacccacgtgccgtacaagcatccatagagaaggagggcgtaacactggtcgctatactgtgcacacataagcactgggatcatagcggaggaaaccgggacctgtctcgcaggcatagagactgccgggtgtatgggtccccacaagacggaattccttacctgacccacccgctctgtcaccaggatgtcgtgagtgtggggagattacaaatccgcgctctggctactccggggcacactcagggccatttggtctacctgctggatggagagccctataaggggccatcttgtcttttttcaggagatttgctatttctctcagggtgtggaagaacctttgagggtaatgcagagacaatgctttcttcacttgacaccgttctcggactcggtgatgatactctattgtggcccggtcacgaatacgcggaagagaatctgggctttgcaggggtggtggaacctgagaacctggccagagaaaggaagatgcagtgggtgcagagacaacggctggagcgcaaaggcacatgtccatcaaccctcggcgaagagaggagctacaatccctttttacgtacacactgtcttgcgctgcaagaagcacttggacccggaccgggtcctacaggtgatgatgactattctcgggcccagctcttggaggaactcagacggctgaaagatatgcataagagcaagtag

SEQ ID NO: 127913 - DNA, 1158 bp, synthetic construct
  misc_feature 1..1158: note = Description of Artificial Sequence: Synthetic coding sequence
  source 1..1158: mol_type = other DNA
atggctgccgtcgtcgctgcaacagcgcttaaggggcgcggtgcgaggaacgccagggtcctgcgcggaatactagccggcgccactgcgaacaaagcgtctcacaacaggactcgggctctccagagccattctagccctgaaggtaaagaggaaccagagccactcagtcctgagctggagtacatcccgcggaaacggggaaagaacccaatgaaggccgtcggtttagcctggtactccctctacacacgaacttggctgggatacctcttttacagacagcagctgaggagggcaaggaatcgctaccctaagggacattccaagactcagccaaggcttttcaatggcgttaaagtcctgcctatccccgtccttagcgacaactactcatatctcattatcgatactcaggcccagctggccgtagccgttgatccatccgaccctagggccgttcaggcttcaattgagaaggaaggggttactctcgtggcgatcctgtgcacacataaacattgggaccactccggtggcaacagagacctaagtcgccgtcatagagactgcagggtctatggcagtccccaggatggtattccttatctgactcacccactatgccaccaggatgtcgtctcagttggacgcctgcagatccgggcactcgcaacgccaggacatacccaaggccacctggtatatctgctggatggggaaccgtataaaggtcccagctgtctgttctcaggagatctgctgtttctgagtggctgtggccggaccttcgagggcaacgctgaaaccatgctgtcgtccctggacactgttttgggtctgggagacgatacgcttctttggcccggccatgagtatgctgaagaaaatcttgggttcgcgggggtcgtagagccagagaatctggcccgcgagcgtaagatgcaatgggtgcagaggcagcggctggagagaaaagggacatgccccagcacactcggagaagagaggagctataatcccttcctgaggacgcactgccttgcactccaagaagccctgggtcctggaccaggtcctacaggtgatgacgactattctagggcacaactgctcgaggagctcaggcggttgaaggatatgcacaaatctaagtag

SEQ ID NO: 127914 - DNA, 1455 bp, synthetic construct
  misc_feature 1..1455: note = Description of Artificial Sequence: Synthetic coding sequence
  source 1..1455: mol_type = other DNA
atggcagctggcggggatcacggtagcccggacagctacagaagtccccttgcgtcacgatatgcatcaccagaaatgtgcttcgtgtttagcgatagatataagttccggacctggcgacaattgtggttatggctggcagaggccgaacagacccttgggctgccgattacagacgagcagattcaagaaatgaagtccaatctggagaacatcgactttaaaatggccgccgaggaagagaagagactgagacacgatgtgatggctcacgtccatacatttggacactgctgtccaaaggccgccggcatcattcacctgggtgccacttcttgttatgtgggagataacacagatctgatcattctacgcaatgccctggatctgcttcttcctaaacttgctcgggtgatcagccgactggctgacttcgcgaaggagcgggcgtccctgcccactcttggctttactcattttcagcccgcccagttgaccaccgtcggaaagagatgctgtctgtggatccaggatctgtgtatggatttacagaaccttaagagagtccgagatgatctacgtttccgtggtgtgaagggcaccaccggaacacaggcctccttccttcagctgttcgagggggacgaccacaaagtggaacagctggataaaatggtgaccgagaaggctgggtttaagcgcgccttcataataacagggcagacctacacgagaaaggttgatattgaggtgctgtcggttctggcctccctaggagcgtcagtgcacaaaatttgcacggatattaggctgctcgctaacctgaaggaaatggaggaaccatttgagaagcaacaaatcggtagtagcgccatgccatacaagcggaatcccatgaggtcagagagatgttgctcactggctcgccaccttatgacattagtgatggatcccctccagacggcaagcgtacagtggttcgagaggacactggatgacagcgccaaccgccggatttgtctggccgaggcttttctcactgctgatacgatcctgaatacacttcagaacatatctgaaggattggtcgtgtatccaaaggtgattgagcggcggatccgccaggaattgcccttcatggccacggaaaacattatcatggccatggtgaaagcaggaggatcccggcaggattgtcacgaaaaaattcgggtcttgtctcagcaggccgcatccgttgtgaaacaggaaggcggagataatgacctgatcgagcgaatccaggtcgatgcctacttctccccgatccactctcaattggatcacttactggacccttcttcgtttaccgggcgggcaagccagcaggtccaacgatttctggaagaagaagtgtaccctctgctgaaaccttacgaatcagtgatgaaggttaaggccgagctgtgtctgtag

SEQ ID NO: 127915 - DNA, 237 bp, synthetic construct
  misc_feature 1..237: note = Description of Artificial Sequence: Synthetic coding sequence
  source 1..237: mol_type = other DNA
atggtcggactaaaaaagaagtcagctgatgacgtcaaaaaggtgttccatatgttggacaaggataaatctggcttcatcgaagaggatgaactgggcttcattttaaaagggttcagccccgacgcaagggacctgagtgccaaagagacaaaaatgcttatggccgctggagataaggacggggacggaaagatcggcgtcgacgaatttagcactctcgtcgccgagagctag

SEQ ID NO: 127916 - DNA, 333 bp, synthetic construct
  misc_feature 1..333: note = Description of Artificial Sequence: Synthetic coding sequence
  source 1..333: mol_type = other DNA
atgtctatgactgacctgctgaacgccgaggacattaagaaggccgttggggcattttccgccaccgatagcttcgaccacaaaaagttctttcagatggtcggattgaaaaaaaaaagcgcagacgatgtgaaaaaagtgttccacatgctggacaaagataagtcgggcttcatcgaagaggatgagctgggattcatactgaaaggattctcgccggacgctagggaccttagcgcaaaggagaccaaaatgctgatggctgctggtgataaagatggtgatggcaagattggggttgacgaatttagcactcttgtcgcggaatcctag

SEQ ID NO: 127917 - DNA, 306 bp, synthetic construct
  misc_feature 1..306: note = Description of Artificial Sequence: Synthetic coding sequence
  source 1..306: mol_type = other DNA
atgagtatgaccgacctgcttaatgccgaagacattaagaaggccgtgggtgcgttcagtgccaccgacagcttcgatcacaagaagtttttccagatggtcggcctgaagaaaaagagtgctgacgatgttaagaaggttttccacatgcttgataaggacaaaagtgggtttatcgaagaggacgaactggggtttatcctaaaagggtttagcccagatgccagggacctgtccgctaaggaaactaaaatgctgatggctgccggcgataaagatggagatgggaagattggcgtggactag

SEQ ID NO: 127918 - DNA, 984 bp, synthetic construct
  misc_feature 1..984: note = Description of Artificial Sequence: Synthetic coding sequence
  source 1..984: mol_type = other DNA
atgtcggatcttcaggaggagggcaaaaacgctatcaactccccaatgtccccagccctggtggacgttcaccccgaggacacgcagttagaagagaacgaagagcggaccatgatagacccgacctctaaggaggacccaaagtttaaagaacttgtcaaagtgctgctagattggattaatgatgttttggttgaagagcgtattatcgtgaagcagctcgaagaagatctctatgacggccaagtgctgcaaaagctactggaaaagctggcaggctgcaaactgaatgtggctgaggtgacccagtcagagatcgggcagaagcaaaagctccagacagttctggaggcagtgcacgatcttctgcgccctcgcggctgggcactgcgttggtccgtggactctatccatggtaagaatctggttgcaattctccacctcctcgtgtctctggcaatgcattttcgggcccctatccgcctgccggagcatgtaaccgttcaggtggttgtggtgagaaaaagagagggcctgcttcattcgtctcacatctcggaagagttaacaactactactgaaatgatgatgggccgttttgaaagagacgcttttgacacactgtttgaccatgcccctgacaaactctctgtggtaaagaagtctctgatcacttttgtgaacaaacatcttaataagttgaatctggaggtgactgaattggaaacgcagtttgctgacggtgtgtatctcgtgctgctgatgggcctgctcgaggactacttcgtgccccttcatcacttttatctgactccagagagtttcgatcagaaggtgcataatgtgagttttgcgtttgaactaatgctggatggaggactcaagaaacccaaggctcgtcctgaggatgtagttaacctcgatctcaaatccacacttagagtcctttacaacctcttcacaaagtacaagaatgtagaatag

SEQ ID NO: 127919 - DNA, 1239 bp, synthetic construct
  misc_feature 1..1239: note = Description of Artificial Sequence: Synthetic coding sequence
  source 1..1239: mol_type = other DNA
atgctcggcattatcccactccccttcgggaaaccacagccacagagtaggcgccgacctttgcggccgccttctgcctcttccgcctcccgccccgccagaggatcacttcgccgtgccatggcaacatcccctcagaagagtcctagcgtgccgaagtctcctacccctaagagtcctcccagtcgcaagaaagatgacagcttccttggcaagttgggcggcactctcgcccggcgtaaaaaggccaaagaggttagcgagctgcaggaagaggggatgaacgcgattaacctgccattatctccgattccctttgaactggatccagaggatacaatgctcgaggagaacgaggtccgaaccatggtagacccaaactcccggtcagacccaaagcttcaggagctgatgaaggtattgatagactggattaatgacgtcctggtgggagagagaatcatcgtgaaggatctggcagaggatctgtacgatggacaggtgctgcagaagctcttcgagaaactcgagtcagaaaagctgaacgttgccgaagttacacagagcgagatcgcacagaagcagaaactacagacggtgttagagaaaatcaatgaaacgttgaaattgccgccgcggtctatcaaatggaatgtcgacagcgtgcacgcaaagtccttagtcgctattctccacctactggtggcccttagccagtatttccgggcccccattcggctccccgatcacgtttctatacaagtagtcgtggttcagaaaagggaaggaattctccagtcacgtcagatccaggaggaaatcactggtaatacagaggcattatcgggcaggcacgagagagacgcctttgatacccttttcgatcatgcgccagataagctaaacgttgtgaagaagacactaataaccttcgttaataaacaccttaacaagctgaacttggaggttaccgaactggaaacccagtttgccgacggcgtatatctggttcttctcatgggcctcttggaagggtactttgtgcctttgcactctttctttctcaccccagattcattcgagcagaaggtgttgaatgtgtcctttgcctttgagctgatgcaggacggaggattggaaaagccaaaacctcgccccgaagacatcgttaactgtgatctgaagagtactttgcgtgtgctttacaatctcttcactaaataccggaatgtggagtag

SEQ ID NO: 127920 - DNA, 873 bp, synthetic construct
  misc_feature 1..873: note = Description of Artificial Sequence: Synthetic coding sequence
  source 1..873: mol_type = other DNA
atgaacgcaataaacctccctttatctccgataccctttgaactggaccccgaggacaccatgctcgaggagaatgaagtgcgcactatggttgacccgaactctaggtctgatccgaaattgcaggaactgatgaaagtgttgatcgattggattaatgacgtgcttgtgggggagagaatcatagtcaaggatcttgctgaggacctgtacgatggccaggtgctgcagaaattattcgagaagctggaatcggaaaagcttaacgtggcagaggtaacccagagcgagatcgctcaaaagcagaagcttcagaccgtactggaaaagatcaacgagaccctaaagctgccaccaaggtccattaagtggaacgtggacagtgttcatgctaaatcgctcgtggctattctccacctgcttgtggcactgagccaatacttcagggctcccatcaggttgcctgaccacgtaagtattcaggtggtggtggtgcagaagcgggaaggcatacttcaatcacggcagatccaagaggagattacaggcaatacagaagccctgtctggaagacatgagagggatgccttcgataccttgttcgatcatgcccccgataagctcaacgtggtcaagaaagttggaaaagggtgcttgggttggacagaaggctccgaaatgcagcagaacattggaaaaactcatccttgctcacttcgcgctagctgtcaaaactggtggcatcaccttacaagcgcccacacggggttatcgcccctgccctccatgtatctgtcggtgcctcattggatgctgcacttagggctcttcccttcaatctcaatgaatagtctctcgtctcaccctggatag

SEQ ID NO: 127921 - DNA, 1119 bp, synthetic construct
  misc_feature 1..1119: note = Description of Artificial Sequence: Synthetic coding sequence
  source 1..1119: mol_type = other DNA
atggcgacatcacctcagaagtccccgtctgtcccgaagagcccaaccccgaaatccccgcctagcaggaaaaaagatgatagcttcctcgggaaactaggtggcactttggccagacgtaagaaggcaaaagaagtgagcgaactccaggaggaaggcatgaatgctataaatctgcctctgagcccaatccccttcgaactggatccagaagataccatgctggaagagaatgaggtacggacaatggtcgaccctaactcccgttccgatcccaaactgcaggagcttatgaaggtactgatcgactggataaacgacgtgctggtcggcgaacgtataatcgtcaaggacttggccgaggacctctatgatggccaggttctgcaaaaactgtttgaaaagctcgaatcggaaaaactgaatgtagccgaggtgacacagtcggagattgcccagaaacagaaactgcagacagtgctggagaagatcaatgagacactaaagctgccaccaaggtccatcaagtggaacgtggacagcgtccacgcaaaatctctcgtggccattctgcacctgctggtcgctctgagccagtactttcgagcccccattcgactaccggaccacgtgtctattcaagtcgtggtcgtacagaagagggaaggaatcctgcagtcacgtcagatccaggaagaaataaccggaaatacagaatatgtttccagtagacacaaaagggatgccttcgacacattattcgatcacgctccagataaactgaacgtggtgaaaaagactctcatcacattcgtaaataaacatctgaataagctcaacctggaggtgacagaactagaaacacagttcgccgacggagtttacctggtattgcttatgggccttctcgagggctactttgttcctcttcatagttttttccttacgcccgatagcttcgagcagaaggtgttgaacgtcagcttcgcatttgaactaatgcaggacggtggactggagaagcccaagccaaggcctgaggatatagtcaactgcgatctgaagagcaccttaagagtgctgtacaacctttttaccaagtatagaaacgttgagtag

SEQ ID NO: 127922 - DNA, 1119 bp, synthetic construct
  misc_feature 1..1119: note = Description of Artificial Sequence: Synthetic coding sequence
  source 1..1119: mol_type = other DNA
atggccacgagtcctcagaagtcaccatcggtgcccaaaagccccactcctaaaagcccgccctcccgaaagaaggacgacagcttcttgggaaaactaggcggaacattagcaagacgtaaaaaagcaaaggaggtcagcgaacttcaggaagaagggatgaacgctataaacctgcccttgagcccaatccctttcgagctggaccccgaggacacaatgcttgaggagaacgaagtgcgcactatggttgatccaaacagcaggagcgaccctaagctgcaagaacttatgaaggttttgattgactggatcaatgacgtcctggtcggggagagaatcatcgttaaggatttggctgaggacctgtatgatggtcaggtcctccagaagctttttgagaagcttgagtcagagaaacttaacgtggccgaagtcacacagagcgagatcgcccagaaacagaaactgcagaccgtgctcgagaaaattaacgaaacacttaagcttccccctcggagcattaaatggaacgtggactcagtgcacgcgaaatcactagtagctattctgcacttactggtagctctcagccagtattttcgagcacccatccggctgccagatcacgtcagcattcaagttgtggtcgttcagaaacgcgaggggatcctacagtccaggcagatacaggaggaaattaccggtaacactgaagcactctctgggaggcacgaacgggatgcctttgataccttgttcgatcatgccccggataagctgaatgtggtcaagaagacacttatcactttcgtgaataagcatttgaacaaacttaacctggaggttactgaactcgagactcagttcgcggatggggtgtatctagtgctcctcatgggccttctggaaggatacttcgtgcccctgcatagctttttccttactcctgattcttttgagcagaaagtgctgaatgtttcttttgccttcgaactaatgcaagatgggggcctggaaaagcccaagccaagaccagaagatattgtcaactgcgacctgaagagcaccttgcgtgtcttgtacaacctatttactaaatatagaaatgtagagtag

SEQ ID NO: 127923 - DNA, 1095 bp, synthetic construct
  misc_feature 1..1095: note = Description of Artificial Sequence: Synthetic coding sequence
  source 1..1095: mol_type = other DNA
atgagttctgcgcccagatcacccactccacggcccaggaggatgaagaaggacgaaagctttctcggcaagctaggcggcaccttggctcgcaaacggagagcccgagaagtctccgatctgcaggaagaggggaaaaatgctatcaatagccccatgtctccggcccttgtcgatgtgcaccccgaggacactcagctggaggagaatgaagagaggacaatgattgacccaacttcaaaggaagaccccaagttcaaggaactggtgaaggtgttgcttgactggatcaatgatgtcctggttgaggaacggattattgtcaagcaactagaggaagatctttatgacgggcaagtactgcagaaactcttggaaaagcttgccgggtgtaagcttaacgttgctgaggttacccagtcagaaataggacagaagcaaaagctgcaaacagttttggaagctgtccacgatttgctgcgccccagaggatgggctttacggtggtctgttgatagcattcacggcaagaatctcgtggcaatactgcacctcctcgtgagcctggcgatgcacttccgggcaccaatcagactcccggaacatgtcaccgtgcaggtcgtggtggtccgaaagcgagagggtttgctgcacagcagccatattagcgaagaacttacaaccaccacggagatgatgatggggcgatttgaaagagacgcatttgacacattatttgatcatgccccggataaactgtccgtggtcaagaagagtctcattacattcgtgaacaagcatctgaataaattgaatctggaagtaactgaactggagacccagttcgctgatggcgtgtacctggtgctgctcatgggccttttggaggactactttgtgcccctgcatcatttctacctcacaccagaatcttttgaccagaaagttcacaacgtttcgttcgccttcgagcttatgcttgatggtggcctgaagaaacccaaggctcggccggaggacgtggtgaatcttgacctgaagtccacactcagggtcctgtataatctgttcacgaagtacaagaatgtagagtag

SEQ ID NO: 127924 - DNA, 1194 bp, synthetic construct
  misc_feature 1..1194: note = Description of Artificial Sequence: Synthetic coding sequence
  source 1..1194: mol_type = other DNA
atgcatcatgtttttaaagaccaccagcgaggggaaaagaggggattcctgtcccctgagaacaaaaactgccggaggttagagctaagaagaggctgttcgtgtagttgggggctttgctcccaagcactgatggcctctcttgcggggtctctactgccaggtagcgaccggtcgggggtcgagacttcagaatacgcacagggcggggtgtccgatctgcaggaggaaggcaagaatgccattaattctccgatgagcccggcactagtcgacgttcacccagaagatacccagctggaagagaacgaggagaggacaatgattgacccaacgtctaaagaagatcccaaatttaaggagttagtgaaggtgcttttagactggattaatgatgtgctagttgaggaaaggatcattgtgaagcagctggaggaagacctctacgacggacaggtgctgcaaaaattgctggaaaagctggccgggtgtaaactcaacgtggctgaggtgacccagtccgagatcgggcagaagcaaaagctccagacggtgctagaggccgtgcatgacctcctgagacccaggggttgggccttgcggtggagcgtagattccatccacgggaagaatctggttgccatactgcatcttctcgtctccctggcaatgcacttccgcgctccaatcaggctacccgagcacgtaaccgttcaggtcgtggtcgtgaggaagcgggagggactcctccactccagccatatcagcgaggagttgacaaccacgacggagatgatgatgggtagattcgaacgggacgcctttgacacccttttcgatcatgcccctgataagctctcagtcgttaaaaagtcattgatcactttcgtcaacaagcaccttaataagctgaacctggaggtcacagagctggagacgcagtttgccgacggggtgtaccttgttctcctaatgggcctgctggaggactacttcgtgcccctgcaccacttctatttgacacccgagtctttcgatcagaaggtgcacaatgtatctttcgctttcgaactgatgcttgacggcggtctgaagaaacctaaagctaggcccgaagacgtggtcaacttggatctgaagtctaccctgagagtactgtataacctgtttactaagtataaaaacgtagaatag

SEQ ID NO: 127925 - DNA, 996 bp, synthetic construct
  misc_feature 1..996: note = Description of Artificial Sequence: Synthetic coding sequence
  source 1..996: mol_type = other DNA
atggagccggagtttttgtatgacctcctacaattgcctaaaggggttgaaccccccgccgaggaggagctgtccaagggcggtaagaagaaatatcttcccccaacgagtcggaaggatcctaaatttgaagaacttcagaaggtgctgatggagtggatcaatgcaactctcctaccggaacacattgtggtacgatctcttgaagaggacatgtttgacgggctcatcctgcatcacctattccaacgccttgccgctttaaaattggaggccgaggatattgccctgacagctacttcccagaaacataaactgaccgtcgttctggaggccgttaatcgctcccttcagttggaggagtggcaggccaagtggtcggtggaatctatttttaataaagacctgctgtctaccctccatctattggtcgcgcttgctaagcgcttccagcccgacctgtcactgccgacaaatgtccaagtggaggtaataactattgagagtaccaagagcggtcttaagtcagagaagctcgtggaacagttaaccgaatatagtacagacaaggatgagccacccaaggacgtgtttgacgagctgttcaaattggcccctgagaaagtcaacgctgtcaaggaagccattgtaaacttcgtgaaccaaaaactggatcgcttggggctatcagtgcaaaacttagatacacagttcgcagatggcgtgatcctgctcttgctgatcggtcagctggagggcttctttttgcacctcaaagagttttacttgacaccaaactcccctgccgagatgctacataatgtgactctggcactagagctccttaaagacgagggtctactcagttgccccgtgtctcccgaagacatcgttaacaaggatgcaaaatctaccctgcgggttctgtatgggctgttttgcaagcacactcagaaagcacatagggacaggaccccacacggtgctcctaactag

SEQ ID NO: 127926 - DNA, 81 bp, synthetic construct
  misc_feature 1..81: note = Description of Artificial Sequence: Synthetic coding sequence
  source 1..81: mol_type = other DNA
atggagcctgaattcctgtatgacttgttgcagctgcccaaaggcgtcgagcccccagctgaagaagaactgagcaaatag

SEQ ID NO: 127927 - DNA, 93 bp, synthetic construct
  misc_feature 1..93: note = Description of Artificial Sequence: Synthetic coding sequence
  source 1..93: mol_type = other DNA
atggagccagaattcctgtacgacctgctccagctcccaaaaggagtggaaccgcccgcggaggaggagctgagtaaaggcgtttgtccctag

SEQ ID NO: 127928 - DNA, 996 bp, synthetic construct
  misc_feature 1..996: note = Description of Artificial Sequence: Synthetic coding sequence
  source 1..996: mol_type = other DNA
atggagccagagttcctctacgatctcctgcaattgccaaagggagttgagcccccggcagaggaagagctttctaagggcggcaagaaaaagtatctccctcctacatctcgcaaggatcccaaatttgaagagctccaaaaagtgctgatggagtggatcaatgccaccctgctccctgaacacattgtcgtgcgaagcctggaagaagatatgtttgacggattgattctccaccacctgttccagaggctggctgcgctcaagctcgaagccgaagatatcgccctgaccgccacaagtcagaagcacaaactgactgtggtactagaagccgtgaatcggagcctgcagctggaagagtggcaagccaaatggagcgtcgagtcgatattcaacaaggatctgctgtccaccctgcacttacttgtggctctggcaaaacggtttcaaccagatttatccctgcccaccaacgtgcaggtggaggtgatcaccatcgagagtaccaaatctgggctgaaatccgaaaagctggtggagcaattaaccgagtactccaccgataaagacgagcctcctaaggacgtgtttgatgagctatttaagctggcccccgaaaaggtgaacgccgtgaaggaagccatcgtgaacttcgtaaatcagaaactagatagactcggcctgagtgttcagaatctagacactcagtttgctgacggtgtcatactgctgctgcttatcgggcagctggaagggttctttctgcacctcaaggaattttacctgactcctaacagccccgctgagatgttacacaacgtgactctagccctcgaattactgaaggacgaagggcttctcagttgtccagtttctcccgaggacatcgtgaacaaggatgcaaagtccaccttacgagttctctatgggttgttctgcaaacatacacagaaggcgcatcgggatagaacaccacacggcgccccaaattag

SEQ ID NO: 127929 - DNA, 996 bp, synthetic construct
  misc_feature 1..996: note = Description of Artificial Sequence: Synthetic coding sequence
  source 1..996: mol_type = other DNA
atggagcccgagttcctttatgatctcttgcagctgcccaaaggggtcgaaccgccagccgaggaggaactgtctaagggcgggaaaaagaaatacctgccccccacgagtaggaaggatcctaagttcgaggaactacagaaggtccttatggagtggatcaacgctacactgctgccagaacacatcgtggtccgttcccttgaggaagacatgtttgatggtcttatacttcaccacctctttcagaggctggctgcgttaaaactcgaggcagaggacattgcactgaccgcaacatcccaaaagcataaattaacggtcgtgcttgaggccgtgaaccggtctctccagttagaagaatggcaggctaagtggtcggtggagtccatctttaacaaggatttactgtcaacattgcacctgttggtggccttagcaaaacgtttccagcccgatctaagtctgcctaccaatgtgcaagttgaggtaattaccattgagtcaactaaatctggactgaaatccgaaaaacttgtggagcaactgactgaatattctaccgataaggacgagcctccaaaagacgtattcgatgagctgttcaaactagccccggaaaaagtaaacgccgtgaaagaggctatcgtgaacttcgtcaaccagaaactggaccgacttggactgagtgtgcaaaacctagatacgcagtttgctgatggtgtcatcttgctcctgctcatcggccagttagagggcttctttctccatctgaaagagttctacttgacccccaattcaccggcagagatgttacacaacgtgactctggccctcgaattgctgaaggatgagggcttgttgagttgccccgtcagcccagaggatatcgtaaacaaagacgccaagtctaccctccgagtcctttatggtctgttttgtaaacacacccagaaagcgcaccgagacaggacgccgcatggagctcctaattag

SEQ ID NO: 127930 - DNA, 414 bp, synthetic construct
  misc_feature 1..414: note = Description of Artificial Sequence: Synthetic coding sequence
  source 1..414: mol_type = other DNA
atggtgcccgccaaggagcaggttccgggacgctgcgactctacccaacggtgttttccaggcccaagcaactggactggcgcgggcggaagggcggggtctcagccattcgtaggcgacgggaccctgggcactccaaatttctgctgggaccacaaagagaaacgagcagcggagtctcagcttcaggcctgggaagctatggagcctgaattcctgtatgatctcctgcaattgcccaaaggagtggaaccccccgccgaggaggagctgagcaagggggggaagaaaaaatacctgccacctacatccaggaaggaccctaaatttgaagaattgcagaaacacacttggccctcccccgtcaccggaacgggggatacgatctgcggactcgctcgcaagacctggtag

SEQ ID NO: 127931 - DNA, 1083 bp, synthetic construct
  misc_feature 1..1083: note = Description of Artificial Sequence: Synthetic coding sequence
  source 1..1083: mol_type = other DNA
atggctgcggaacgtggtgcagggcagcaacagtcccaggaaatgatggaggtggacagaagagtggagtccgaagaaagtggggatgaagaagggaaaaaacacagcagtggcatcgtcgccgatttgagtgagcagagccttaaagacggcgaagaaagaggcgaagaagatccagaggaagaacacgagctccccgtcgatatggagactatcaacctggaccgcgacgctgaggacgtggatctgaatcattatcgcattggcaagatcgaagggtttgaagttctcaagaaagtcaagacgctctgtctgcggcagaacctcatcaagtgcatcgagaacctggaggagcttcagtctttgcgagaacttgatctgtacgacaatcagatcaagaagatcgagaacctcgaggctctgacagagctcgagatcttggatattagcttcaatctcttacggaatattgagggcgtggacaaattgaccaggctcaagaagctgttcctcgttaacaataagatctccaaaatcgaaaatctgtcaaacctgcaccagcttcagatgctggagctgggcagcaaccgcattagggccatcgagaatatcgacacactgaccaacttagagtccctatttttgggtaagaataagatcactaagttacagaacttagacgccctcacaaacttgaccgttctgtcaatgcagtccaataggttgaccaagattgagggacttcagaaccttgtcaacctccgcgagctgtacctgagccacaatgggatcgaagtgatcgagggtctggagaacaacaataaattaacaatgctcgacattgcaagtaaccgaatcaaaaaaatcgaaaacatatcgcatctgaccgaactccaggaattttggatgaacgataacctcctcgagtcctggtccgatttagatgagctcaagggcgcccgctctctcgagacagtctaccttgaacgaaacccactgcagaaggaccctcagtatcgccggaaggtgatgttggcattaccaagtgtgcgccagatcgacgcaacatttgtgcgcttttag

SEQ ID NO: 127932 - DNA, 3993 bp, synthetic construct
  misc_feature 1..3993: note = Description of Artificial Sequence: Synthetic coding sequence
  source 1..3993: mol_type = other DNA
atggaagacggagggctaacagcctttgaggaggatcagaggtgcctgtcccagtctctcccgctgccagtgagcgccgagggcccagcagcccagactacggcagagccaagccgtagcttctcctccgcacacagacacttgtcaaggcgtaatggtttgtcacggttgtgccaaagtagaacagccctttctgaggaccgctggagcagttattgtttgtcgtccctggccgcacagaacatttgcacctctaagctccactgtccggctgctcctgagcacactgatccaagcgaacctagaggatcagtcagttgttgcagcctgttgcgtggccttagttcagggtggtcaagccccctcctacccgcccctgtatgcaacccaaataaagcgatctttaccgtggatgcaaagacaacagagattcttgtcgctaatgataaagcctgcggactgctgggctacagctctcaggatctgattggccaaaagctcacccagttctttctgcggtcagactccgacgtggtggaggccttgtcagaagaacatatggaagctgacggccacgcagccgtggtatttggtacagtggtggatatcatctctcggagtggcgaaaagataccagtctcggtgtggatgaagcgcatgagacaggaacgacggctttgctgtgttgtcgtcctggaacctgtcgagagggtaagcacgtgggtggcattccagagcgacggcacagtcacatcctgcgacagcctgtttgcgcacctccacggttacgtctccggcgaagatgttgccggacaacatatcaccgatcttatcccgagcgtgcagcttccaccatctgggcagcacatcccaaagaatctgaagattcagcgcagcgttgggagggcaagagatggcacaacgttcccactcagtctgaagctcaagtctcagcctagttccgaagaggcgaccaccggtgaggctgcccccgtgagcggctaccgagcaagcgtctgggtattctgcacaatctctggactcatcacccttctgcctgatggcaccatccacgggattaaccactcatttgccctgacattgtttggctacggcaaaacagaactgctgggtaaaaatataacattcctgattcccggattctatagctatatggatctggcttacaattcaagcctgcagttacctgacctggcatcatgccttgatgtagggaatgagtccgggtgcggcgagagaacgttggatccctggcaaggacaagaccctgccgaaggtggccaggatccacgcatcaacgtggtactggctggtggccacgtggttcctagagacgagattcgcaagctcatggaatcccaggacatctttacaggaacacaaaccgagttgatcgcaggtggtcaacttctcagttgcctgagcccacagcctgcaccaggcgtagataatgtgccggaagggagccttccggtgcacggtgaacaggcgctgcccaaggaccaacagatcacagcgctgggtcgcgaagagcccgtggcaattgaatctccaggccaggatttactgggcgagtctaggtccgagcctgtggacgtgaagcctttcgctagctgcgaagactcagaggcacctgtacccgccgaggacggaggtagcgacgcagggatgtgcggcctttgtcaaaaggcccagctcgagcgcatgggggtttcagggccttctgggagtgacctgtgggcgggagcagcggtggccaaacctcaggcaaagggtcaactagcaggtgggtcactccttatgcattgtccctgttatggtagcgagtgggggctctggtggaggtcgcaggatctcgcgccgtctccttccggaatggcaggactgtcatttgggacccccacacttgacgaaccttggctcggggtggagaacgatcgggaggaactgcagacttgcctgatcaaagaacaattatctcaactctctttagccggtgccttggatgtccctcatgctgaactcgtccccacggagtgccaagctgtcaccgctcccgtgtcctcttgtgaccttgggggcagagatctctgcggaggctgtacgggcagctccagtgcctgctatgccctcgccacagacttgcctggaggactggaagccgtagaggctcaggaagtggatgtgaacagtttcagctggaatcttaaggagctgtttttttccgatcagaccgatcaaacatcttcgaattgcagttgcgctacctcagagctgcgagagactccatcatctctggccgtcggaagcgaccccgatgttggttcactgcaagagcaaggcagctgtgtgctagacgatcgtgaactcctcctgttgacaggtacttgcgtggacttaggacaggggagaagatttagggaatcttgcgtgggtcacgatccaaccgaacctctggaggtttgcctggtgtcctcagagcattatgccgccagtgacagagaatcccccggccacgttccttccacactggatgccgggcctgaggacacgtgcccatcagccgaagaaccgcgactgaatgtgcaggtgacttccactcctgtaatcgttatgagaggtgccgcaggactgcagcgggagatccaggagggcgcctacagcggtagctgctaccacagagatggattgcgcctgagcattcaattcgaggtccggcgtgtcgagcttcaggggcccacgccactgttctgctgctggctggtcaaggacctgctgcacagccaacgcgactcagcagctcgtactcgacttttcctggcgtctctacctgggagtacccatagtaccgcggccgagctcacaggccccagtcttgtggaggtactgcgcgcacggccctggtttgaggaaccacccaaagccgtggagctggaggggctggccgcatgcgagggcgaatattcccagaaatacagcactatgagccctctagggtccggagcatttgggtttgtctggaccgcagtggacaaagaaaaaaacaaggaagttgtcgtgaaattcattaaaaaagagaaggttctggaggattgttggatcgaggaccctaagctgggcaaggtaacgctcgagatcgctatcttgtcccgcgtggagcacgcaaacatcattaaggtcttggacatcttcgagaaccagggtttctttcagctggttatggagaaacacggtagtggcctcgatctgtttgcctttatagacagacatccacggctggatgagcccctggcgtcctatatttttagacaagtccgcgcgggacagtctcgattagtatctgcagtaggctacctgaggctgaaagacatcatacaccgggatatcaaggatgagaatatcgtgatcgccgaagatttcactattaagctgattgactttggaagcgctgcctacttagagcggggtaagcttttctacacattttgtgggacgatcgaatattgtgcgccagaggtcttgatgggcaatccctacaggggtcccgaactggagatgtggtccctgggagtcacattatacaccctggtgtttgaagaaaaccccttctgtgagctggaagagaccgtggaggctgctatccatccgccgtacttggtcagtaaggaactgatgagcctggtgtccggcctgttacagcccgtgcccgagcgcaggaccacactggagaagttagtgactgatccctgggtgacgcaaccagtgaatctggccgactacacctgggaggaggtgtttcgcgtgaacaagccagaatctggtgtgctcagcgccgctagcctagagatggggaaccggtcccttagtgatgttgctcaggctcaggaactgtgtggaggacccgttccgggcgaggctcccaatggtcagggctgtttacatcccggggacccgcggttattaacatcttag

SEQ ID NO: 127933 - DNA, 3972 bp, synthetic construct
  misc_feature 1..3972: note = Description of Artificial Sequence: Synthetic coding sequence
  source 1..3972: mol_type = other DNA
atggaggatggagggttgaccgcctttgaggaagaccaacggtgcctctcacaatctctgccactgcccgttagcgccgaggggcccgctgcgcaaaccaccgctgaacctagcagatccttcagcagtgcccacaggcacctctctcgacggaatggattgagccgcttgtgccagtcacgcacggctctgtcagaggataggtggagctcatattgcttgagttcattagccgctcagaacatatgcacctccaaactccactgtccagcagcccccgagcacaccgaccccagcgaaccaagagggtccgttagctgttgcagtctgctccggggcttgtcttcaggatggagtagcccactgctgcctgcgcccgtgtgtaacccgaataaagccattttcaccgtggacgcgaaaaccactgaaattctcgtggcaaatgacaaggcttgcggcctgctcggatattcaagtcaggatttgattggtcagaaactgactcagttttttctcaggtctgattccgacgtggttgaggcactgtcggaggaacacatggaagcagatggccatgctgcggtcgtctttggcaccgtggtggacattatttccaggagcggtgagaagatccctgtgagtgtgtggatgaagaggatgaggcaagagaggaggctttgttgtgttgtagtgctggagccagttgagagagtctcaacctgggtcgcttttcaaagcgacggaactgttacgtcttgcgattctctgtttgcccacttacatgggtacgtgagtggggaggatgtggctggacagcatataacagacctgatcccaagcgtgcaactcccgccatcggggcaacatatcccaaaaaatttgaaaatccagaggtccgtggggcgagccagagacggtactacattccccctgtccctcaagctcaagtcccagcccagttccgaggaggcaacaacgggcgaagcggcccccgtgagcgggtaccgggcttccgtgtgggtgttttgcacaatctccggccttattacactgctgcctgacggcaccatccatggaatcaaccattcgtttgccctgacactgttcgggtatggaaaaactgagctcctggggaaaaatataacattcttgatacccgggttctactcctacatggatttggcctacaactcctccctgcagctacctgacctggcctcctgcctggacgttggtaatgaaagtgggtgtggtgaaaggaccttggacccatggcaggggcaagatcctgccgagggagggcaagatccaagaatcaatgtggtactggccggagggcacgtagttccaagagacgaaatcaggaagttgatggagtctcaagatatcttcactggaacccagaccgaactcattgcgggcggccaacttctttcttgtttgtctccccagcctgcccccggcgtggataatgtgcccgaagggagcctgccagttcacggggaacaagccttgcccaaggaccagcaaatcacagccctaggcagggaggaaccggtggctatcgaatctcctgggcaggacttactcggtgagagtcgatccgagcccgtcgacgtgaagccatttgcgagctgtgaggacagcgaagcacccgtcccagccgaagacgggggatcggatgccggtatgtgcggcctctgtcagaaagcacagcttgagagaatgggtgtctctggtccctcaggaagcgacctgtgggctggcgctgccgtcgctaagccccaagcaaaggggcagctggccggaggtagccttctcatgcactgtccatgctatgggtccgaatggggtctttggtggagatctcaggatttagcgcctagtcctagtggcatggctggcctctctttcgggactcctacactcgatgaaccttggctgggcgtcgaaaacgacagggaggagcttcaaacttgcctgatcaaagagcagctgtcccaactatccctcgctggcgccctggacgtcccccatgctgaactggtgcccactgagtgccaggctgtgaccgcccctgtgtcctcctgtgacctcggtggtagagacttgtgtggagggtgcaccggcagctctagcgcttgttatgccttggctacagacctgccgggaggtctggaggctgtcgaggcccaggaggtagacgtcaactcgttttcgtggaacctcaaggagctgttctttagtgatcagacagatcagacctcttctaattgttcttgtgctacatccgaactgagagagaccccttccagcctcgccgtgggctctgaccctgacgtgggaagtttgcaggagcagggcagttgtgtcctggacgatagggagctgttgcttctgactgggacctgtgtggatctcggacaaggccgacgttttagggaatcctgcgttgggcacgatcccacagagccgcttgaggtgtgtttggtgtcctcagagcactacgccgcaagtgaccgagagagccctgggcacgtgcctagcacgttagatgcggggcccgaggacacctgcccgtccgcggaagagccgcggctgaacgtccaggttactagcactccggtgattgtgatgcgtggcgcagccgggctccaaagagagatccaggagggtgcctactcaggaagttgctatcaccgcgacgggcttagactatccatccaattcgaggtgcgccgggtggaactgcaaggccccacgcctctcttctgctgctggctagtgaaagacctcctccatagccagcgtgatagcgcagcccgcactagactgtttttggcctccctccccggcagtacccatagcacggccgctgaactcactgggccttcacttgtggaagtgctgcgagcacggccttggtttgaggagcctccaaaagctgtggaattggaggggctggccgcttgtgaaggtgaatattctcagaagtacagtaccatgtcacccctaggctcgggtgcttttggctttgtgtggacggccgtggacaaggagaaaaacaaagaggttgtggtcaaattcataaaaaaggagaaggtcctcgaagattgctggatagaggacccaaaactgggcaaggtgaccctcgaaattgcaatcctgagccgagttgagcacgctaacattattaaggtgctggacatctttgaaaaccagggcttttttcaacttgttatggagaaacatggatctggtttggaccttttcgcttttattgataggcacccgcgcctggatgagcctctggcttcctacatcttccgccagctagtgtcagctgtgggctatctccgtctcaaagatataatccacagggacattaaagacgaaaatatcgtcattgctgaggactttacaatcaagctaatcgacttcggcagcgccgcctatctggagaggggaaaactattctacacattctgcggtaccattgagtattgtgcgccagaggttctgatggggaacccttatcgtgggcccgaactggaaatgtggagcctgggtgtaacgctctacaccctggtgtttgaggagaaccctttctgcgaactagaggaaacagttgaagccgcaattcacccaccttacctggtgtcgaaagaacttatgagccttgtctcaggattgctgcagcccgtccctgaacggagaaccacactcgagaagctcgtgacagacccttgggtgacccaacctgtcaacttagctgattacacatgggaggaggtgttcagggtgaacaagcccgagtcaggagtgctctcagccgcctccctggagatgggaaaccgttcacttagcgacgtggcccaggcgcaggaactctgcgggggccctgtgccaggagaggcacccaatggacagggatgtttacacccgggcgatccacgtctgcttacctcatag

SEQ ID NO: 127934 - DNA, 378 bp, synthetic construct
  misc_feature 1..378: note = Description of Artificial Sequence: Synthetic coding sequence
  source 1..378: mol_type = other DNA
atggaggacggcgggcttactgctttcgaagaagatcagaggtgccttagtcagtctttgccactgcccgtctcagctgaaggaccagccgcccagacaacagccgaacccagtcgctctttttcgagcgctcatagacatctcagtcgtcgcaatggcttatcgaggttgtgccagtcgagaacggcactttccgaggaccggtggagttcttactgcctgtctagcctagctgcccagaacatttgtacatcaaagctgcactgccccgcggcccccgagcatacagacccctccgagcctagaggctctgtgagttgctgcagcctgctgagggggctaagctcaggctggtcatcacctctcctgcctgcgtag

SEQ ID NO: 127935 - DNA, 3324 bp, synthetic construct
  misc_feature 1..3324: note = Description of Artificial Sequence: Synthetic coding sequence
  source 1..3324: mol_type = other DNA
atgaagcgcatgcgtcaggaacgaagattatgttgtgtggtcgtgcttgaacccgttgagcgggtaagcacctgggtggcctttcagtccgatggcaccgttacttcctgcgattcgctcttcgctcacttacacgggtacgttagcggagaggacgtggctggccaacacattaccgatttgattcccagtgtacagctgccaccctcaggccagcacattcctaagaacttgaaaattcaacgcagtgtggggagagcccgcgatggaactacttttccattgtccctaaagctgaagtcacagcccagtagtgaggaggccactaccggggaagctgcgcccgtctcaggttaccgcgccagcgtttgggtgttttgtacaattagcggactgatcactctgctcccagacggcacaattcacggtatcaatcactcctttgccctgactttgttcggatacggcaaaactgaactgctaggcaagaacataaccttcctgattcccggattttacagctatatggatttggcctataactccagcctgcagctgccagacctcgccagctgtctcgatgtggggaatgagagcggctgtggggagaggacgttggatccatggcaaggacaagatccagccgagggtggtcaggacccacgaatcaacgtggtgctggcaggagggcacgtggtgcctagggacgagatccggaaactgatggagtcccaggacatctttaccggtacgcagacagagcttatagccggaggccaactgttgtcttgtctgtcgccgcagccagcgccaggggtggacaatgttccagaaggcagtctccccgttcatggggaacaagcactgccaaaagaccagcagattacagccctgggaagagaggaaccggttgctatcgagagccctggccaggacctgctgggggagtctcggagtgaacccgtagacgtcaaacctttcgcctcctgtgaggacagcgaggcgccagtccctgcggaggatgggggttccgatgccggcatgtgtggtctctgtcagaaggcccagctggagcggatgggggtgagcggcccatccggatccgatctatgggccggggccgctgtggctaaaccccaagcaaagggacagctggccggtgggagtctgttaatgcattgcccctgctacggctccgagtggggcctgtggtggaggtctcaagaccttgcaccctctcctagcggcatggccgggttaagtttcggaacacccactctggatgaaccctggctgggagtcgagaatgatcgggaggagcttcagacttgcctcatcaaggagcagctgagtcagctgagtctggcaggggcgctcgatgttccgcatgcagagctagtgccgacagaatgtcaggccgttactgctcctgtcagttcttgtgatctcggtgggagagacctgtgcggcggctgcaccgggagtagttccgcgtgttatgcccttgcgacggacctgcctggaggtctggaggccgttgaggcacaagaagtggacgtcaatagtttctcttggaatctcaaggaactgttcttttccgaccaaactgaccaaaccagttctaattgctcttgtgccacatccgagcttagggaaacccccagttcactggcggtcggcagcgatccagacgtgggttcgttacaggaacaagggtcttgtgtgctggacgatagagagttactgctcctgaccgggacttgtgtggacctcggacagggaaggaggtttagggaatcttgcgtggggcatgatcccactgagcctctcgaagtctgtttagtctcttccgagcactacgccgcttccgatagagagtctccgggccacgtaccgagcacgctggacgcaggccctgaggatacttgtccttctgctgaggagcctagactaaacgttcaagtaacttctacaccggtaattgtcatgaggggcgcggcagggttgcaacgtgagatccaagagggagcttatagtggatcctgttaccatagggacgggctccggctgtccatccagttcgaagtaagacgcgtagagctgcaggggcccacacccctcttctgttgttggttggttaaggacctcttacacagccaaagggactcggcagcccgtactcggttgttcctggcaagtttgccgggcagcacccactccaccgctgctgagctgacaggaccatcactcgtggaggtgctgagggcacggccatggtttgaggagccacccaaagccgtcgagctcgagggcctcgccgcttgtgaaggagaatatagtcaaaaatactcaaccatgagtccacttggaagcggtgccttcggttttgtctggaccgctgtcgacaaagagaagaataaggaggtcgtcgtcaagttcatcaagaaagagaaggtgcttgaagactgctggatagaggatcccaaactggggaaagtgacccttgagattgcaattcttagtcgcgtcgagcatgcaaacataataaaggtgctggatatattcgagaaccagggtttttttcagctagtcatggagaaacacggttccggcttggacctgttcgcctttatcgatcgacatccacgactggacgaacccttggcttcatatatcttccgccagctggtatcagctgtggggtatctgagactcaaggatataatccatcgcgacatcaaagacgagaatatagtaattgctgaggacttcaccattaaactaatcgactttggatccgccgcttacctggaacgggggaagctgttttatacattttgcggaactatcgaatattgtgctcccgaggtgctgatgggcaatccatatcgaggaccagagctagaaatgtggtcactcggcgtcacgctgtacacgcttgtgtttgaggagaacccgttctgcgaactggaggagactgtggaggcagcgatccatccaccctatttagtatcaaaggagctgatgtccctagtgagcggcctccttcagcccgtgccagagcgccgtaccactctggagaagctggtgacagatccctgggtgactcagcccgtaaatctagcggattacacttgggaagaagttttcagagtcaacaaacccgaaagcggcgtgctctctgcggccagtttggaaatgggcaataggtccctatcggatgttgctcaggcacaggagctgtgtgggggtcctgtacctggtgaggcacctaatggccagggctgcctccaccctggtgatccacgcttactgacatcctag

SEQ ID NO: 127936 - DNA, 3414 bp, synthetic construct
  misc_feature 1..3414: note = Description of Artificial Sequence: Synthetic coding sequence
  source 1..3414: mol_type = other DNA
atgggattccccgactccgctcgagccggacaaaggtctttggtggatatcatatcaaggtcaggcgagaagatcccggtgtcggtatggatgaaaaggatgagacaggagcggaggttatgctgcgtggtcgtacttgaacctgtggaaagggtgtccacatgggtggctttccagtctgatggaactgttacaagctgtgatagcctgttcgcacacctgcacggctacgtgtccggtgaagatgtggcaggtcaacatatcactgatttgataccttctgttcagctgccacccagcggccagcatattcctaagaatttgaagatacaaaggagcgtgggccgagctcgtgatggaaccactttccctctttccctgaagctcaagagtcagccctcctcggaagaggccacaacaggcgaggctgccccagtgagcgggtatagggccagcgtatgggtcttttgcacaatctcaggcctgatcaccctgctacctgacggcaccatccacggaatcaatcacagcttcgcgttaacccttttcggatatggtaaaacggaacttcttggaaaaaatataaccttcctgattcctggtttctactcctatatggacttagcttataacagcagcctgcagttgccagatctagccagttgtctggatgtagggaacgagtctggctgcggggaacgcaccttggacccatggcaagggcaagacccggccgaggggggccaggaccccaggattaacgttgtactcgcgggtggtcacgtagtcccacgcgatgaaatccggaaattaatggagtcccaagacatctttaccggcactcaaacagaactcattgccgggggacagctgctcagctgtcttagtccccagccagcacccggagtcgacaatgtgcccgaaggatcccttcccgttcatggagagcaggcactccccaaggaccagcagataacagcactcggaagagaagagccggtggccatcgagtcacccggacaagatctactgggcgagtccagatccgaacccgtggacgtgaagccctttgctagctgcgaagactccgaagctccggtacccgccgaagacggagggagcgatgcgggaatgtgtgggctgtgccagaaggctcagctggagagaatgggtgtgtcaggacccagcggcagtgacctctgggccggtgcagctgtggccaagccccaggccaaggggcaattggctggtggctccctgctgatgcattgtccctgctatggatcagaatgggggttgtggtggcgctcccaggatctcgccccctcaccaagtgggatggcaggactttctttcggcacccccaccttggatgaaccgtggctcggcgtggaaaatgacagagaagaactgcagacgtgtttaattaaagagcaattatcacagttatcactggctggggctctcgatgtaccccacgcagaattagttcctacagagtgccaggccgtgaccgctcccgtgagcagctgcgacctcgggggacgtgacctgtgcggcggttgcactggatcaagctcggcgtgctatgccctggccaccgatctgccgggcggattggaggcagtggaagctcaagaggtggatgtgaatagtttttcttggaatctgaaggagctattcttttctgaccagacagaccagactagttccaactgttcatgcgccacaagcgagctgcgggagactccgagttccttagcagtggggagcgatccagacgtgggtagcctgcaggagcagggatcttgcgtgcttgatgacagggagctgttgcttttaaccggaacttgtgttgatctgggtcagggccggcgattccgagaatcttgcgtgggacatgatcctaccgagccccttgaagtttgtctggtgtcctctgagcattacgctgcctctgaccgcgagtctcctggccatgtccctagcacgttggacgccggaccagaggacacttgccccagtgctgaggaacctcgacttaacgtccaagtcacatcgactcccgtcatcgttatgcggggggccgccgggctgcagagagagattcaagaaggtgcatattccggctcctgctaccacagggatggactgaggctaagcatccaatttgaggtgagacgcgtcgagttgcaagggcctacccctctgttttgctgctggctggtcaaggatttgctacacagccagagagatagtgctgctagaacaagactttttcttgcctcccttccagggtccacacactccaccgctgccgagcttaccgggcccagcctggtggaagtcctgagagcccgcccgtggtttgaggaaccacccaaggccgtcgagttggagggcctcgctgcctgcgagggcgagtacagtcaaaagtactctacgatgagcccactgggaagcggagcttttggctttgtgtggaccgcagtagacaaagagaagaataaggaggttgttgttaaattcatcaagaaggagaaagtcctggaggactgttggatagaagaccccaagttggggaaggtaaccttggagatcgcaatcctcagtagagttgagcatgctaatatcatcaaagtgctggatatctttgagaaccaggggttttttcagctggtcatggagaaacatggctccggccttgacctattcgcctttattgatagacatccacgcttagatgaacccctcgccagttatatttttaggcagctcgtcagcgccgtagggtatctgcggctcaaggatatcatacatagggatatcaaggatgagaacatcgttatcgcagaggactttactattaagttgatcgattttggttctgccgcctacctcgaaagggggaaactattttacactttctgtggcacgatcgaatattgcgcccctgaggtcctgatgggcaacccttatcgcgggccggagttggaaatgtggagtttgggtgtcaccctgtatactctggtcttcgaggagaacccattctgcgagctcgaggagaccgtagaggcagccatccacccaccctacctcgtgtccaaggagctgatgtcgcttgtctccggcctgctacaacccgtaccggagaggaggacaactctggagaagcttgtcacagacccttgggtcactcaacctgttaatctggccgattatacgtgggaggaggtgtttcgagttaacaaacccgaaagtggagtgctgtccgccgcgtccctggaaatggggaacaggtctctcagcgatgttgcccaggcgcaggaactgtgcgggggcccagtgccgggcgaggcacctaacgggcagggttgtctgcaccccggggaccctcgcctcctgacctcctag

SEQ ID NO: 127937 - DNA, 3432 bp, synthetic construct
  misc_feature 1..3432: note = Description of Artificial Sequence: Synthetic coding sequence
  source 1..3432: mol_type = other DNA
atggaagatggcggcttgaccgcctttgaggaggatcagaggtgtctgagtcaatctctgccactgccagttagtgctgaaggcccagcggcacagaccaccgcagagccatcccggtcgttctcctcggcccatcgccacctgtcccggcggaacggtctcagcagactgtgccagtctcgaacagctctgtctgaagataggtggtcgtcctactgcctatctagcttagccgctcagaatatctgcacctcaaagctccactgccccgcagcaccagagcacacagacccctcagaacccagggggagcgtgtcctgctgctccctcttacgcggattgtccagcggatggtcctcccctttactgccagcccctgtgtgcaatcccaataaggcgatattcactgtcgatgcaaaaacaaccgaaatacttgtggcaaatgataaggcatgcggattattaggctactcctcacaggatctcatcgggcagaaactgacccaattcttcctgaggagcgattccgatgtggttgaagccttaagtgaggaacatatggaggccgatgggcacgctgccgtggtattcgggaccgtagttgacatcatctcccggagcggtgagaagataccagtgtcagtttggatgaagcgaatgagacaggagcgccgactctgctgcgtcgtggtgttggagccagtggaaagagtgagcacctgggttgcattccagtcagatggaactgtcacttcttgcgactctctttttgctcaccttcatggatatgtgagcggagaggatgtggccggccagcatatcactgacttgattccgagtgttcaactgccaccaagcggtcaacatattccgaaaaatcttaaaatccaaagatccgtcggccgcgcaagggatggcaccacatttcctttaagtttgaagttaaagtcccagccatcaagcgaggaggctacaactggggaggccgcccccgtctccggataccgagccagtgtgtgggtgttttgtaccatttctggcctgattacgctcctgcctgatggcactattcatgggataaaccattcattcgccctgactttattcggatatggcaagacagagctactgggcaaaaacatcaccttcttaatccccggtttctactcatacatggatctggcatacaacagtagcctacaactccctgacttggcttcttgccttgacgtgggcaatgagtctggctgtggagagcggacactcgacccttggcaaggacaggacccggccgaaggcgggcaagacccacgcattaatgtggtgctggcaggcggtcacgtggtgccaagagacgaaattcgtaagctcatggagagccaagacatttttaccggaacacagacagaacttatagccggaggccagctcctctcttgcttgtcacctcaaccagctcccggtgttgacaacgtccccgaggggtcgctacctgtgcatggggagcaagcactgccgaaggaccaacaaattactgccctaggacgggaagagcctgtggccatcgagtcacccggtcaggatctgctgggggagagcaggagtgaaccagtggatgtgaagccgttcgcgtcctgtgaagacagtgaagcccctgttccggccgaggacggcggatcagacgccgggatgtgcggtctctgccagaaagcccaactggaacgcatgggggtgtcgggaccatcaggctccgacctgtgggccggggccgccgtggctaagcctcaggccaagggacaactggcaggcggtagtcttctgatgcattgcccctgttatggctcagaatggggactgtggtggcgctcacaggacttggccccatcacctagtggaatggctggactgagctttggtactcctaccctcgacgagccctggctaggcgtcgaaaacgatcgagaggagctccaaacttgccttattaaagaacagttaagtcagctgtcactcgcaggcgctctggatgtgcctcacgccgagctcgttcccaccgaatgccaggctgtaacagcacccgtctcttcatgcgacctgggtggtagggacctgtgcggcgggtgcaccgggtcctctagtgcctgttatgccctggccaccgaccttcctggcggcctggaggccgtggaggcccaggaggtggatgtgaattctttcagctggaatctcaaggagctgttcttttctgatcagaccgaccaaaccagcagtaactgttcgtgtgccacatctgagctcagagagactccaagttcactcgccgttggctccgatccggatgttggaagccttcaagagcaggggagctgcgttctcgatgaccgcgagctcctgcttttgacaggaacctgtgtggatctcggccaggggaggaggtttcgagagagttgtgtgggccacgatccgacagaaccactggaagtttgtcttgtttcatcagaacactacgccgcctctgatcgagagtccccggggcacgtccccagcacgctggacgccggcccagaagacacctgcccctcagcagaagagccccgactcaacgtacaagtgacctcaacgccagtgatagtgatgcgaggcgctgccggcctgcaaagagaaatccaagagggggcctattccggatcgtgctaccatagagacggtctgcgcctcagtattcagttcgaggtgcggagggtggagttgcaggggccaacaccactgttttgttgctggttagtgaaggacctactgcactctcaaagggactctgccgcacgtacgcggcttttcttagcatctttgcctggctcaacacactcaaccgcggccgaactgactggtccgagtctggtggaggtgctccgcgcccggccatggttcgaggaacctcctaaggcagtcgagctggagggcctggctgcttgtgaaggcgagtatagccagaagtactcgacaatgtcaccactaggatcaggcgccttcggatttgtctggacggccgtcgacaaggagaagaataaggaagtggtagtgaagtttatcaaaaaggagaaggtgctggaggactgctggatagaggatcctaagcttggaaaagtgaccctggagattgcgattctcagcagagtcgagcacgccaatattataaaagttctggacattttcgaaaatcaaggcttctttcagttggtgatggagaagcacggttcagggcttgacctatttgccttcatcgatagacatcctagattggatgagcctttggctagctacattttcagacaggtgcgcgcaggccagagccgggtgtctgtaaacgccggcctgggagcttgggtgcggtggctgcaacgcagcgtcattcatacgcgtttcagtctgtag

SEQ ID NO: 127938 - DNA, 1314 bp, synthetic construct
  misc_feature 1..1314: note = Description of Artificial Sequence: Synthetic coding sequence
  source 1..1314: mol_type = other DNA
atggtgcagatgatgcgtcagtttctttacagggttttgcctgaagacagttacaaggtaacgacaggaaagttgcacgtcagtcttactcgcctgacagatggtgagaacgtagttgtgtccgagtttacaagtaaagaagagttgattgaagctctgtattgctcctgcttcgtacccgtgtactgcggtctaataccgcctacatacaggggcgtccgctacatagatggaggcttcaccggaatgcagccctgcgcattctggactgacgccatcacgatatccactttctctggtcagcaggacatttgccctagggactgccccgccattttccacgattttcgaatgtttaattgttcttttcagttctctttggagaacatagctaggatgacccacgcactctttcccccagatctcgtgatcttgcacgattattattatcggggctatgaagatgcggtcctttatctgagaaggctgaatgctgtgtatttaaatagctcttccaaaagggtcatatttccaagagtggaggtttactgtcaaatagagctcgcgcttgggaatgaatgccccgagaggagccagccaagcctgagagctaggcaggctagccttgaaggcgccactcagccccacaaagagtgggtgcccaaaggcgacgggagagggtcgcacggccccccggtttcccagcccgtgcagacactggagttcacctgtgagagccccgtgagcgctccagtgagccccctggagcagccaccagcacagcctcttgctagttcaactcccctttccctgtcaggtatgccacccgtgagctttcccgcagtgcacaaaccccctagcagtacaccagggtcaagcctgccaacaccaccccccggcttatcgccgctgagtcctcaacagcaggtccagccttccggaagtccggcgagaagccttcatagccaggcccctacttctcctagaccatcactgggccccagcactgtcggggcaccgcagactctaccccgaagctcactttcagctttccccgcacagcccccggttgaagaattaggtcaagagcagcctcaggccgtggccctgttggtgtcttccaagcccaaatcagcagtgcctcttgtgcacgtcaaggagacggtgagcaagccctacgtgacagaaagccccgcagaggattcgaattgggtgaataaggtcttcaagaagaataaacagaagacgagtgggacgcggaaaggctttcccaggcactcaggtagcaaaaagccttcgagcaaggttcagtag

SEQ ID NO: 127939 - DNA, 1599 bp, synthetic construct
  misc_feature 1..1599: note = Description of Artificial Sequence: Synthetic coding sequence
  source 1..1599: mol_type = other DNA
atggaggaacaagtgtttaaaggtgatcccgacaccccacactcgatctctttcagcgggtcaggattcctgtctttctaccaggctggcgccgtcgacgccctgagggacctcgctccaagaatgttagagacagcccatcgatttgcagggacaagcgcaggtgccgtgatagccgctttggctatctgcggaattgagatggatgagtaccttcgcgttctgaatgtgggggtggccgaagtaaaaaagtcttttttgggtcctctaagcccctcctgtaaaatggtgcagatgatgaggcaattcttgtatcgcgtgctccccgaggattcatacaaagtcacaactggcaaactgcacgtgtcactcacacgcttaacagacggcgaaaacgtcgtggtgtcagagttcaccagcaaggaagaattaattgaggcattgtattgcagctgttttgtgccagtatactgtgggttgattccgccaacttaccgtggtgtcagatacattgacgggggatttaccgggatgcagccctgtgcgttctggactgatgccatcaccatatcaaccttctcagggcagcaagatatttgccctcgggactgccctgccatcttccacgatttcagaatgttcaattgtagctttcaattctctttggagaacattgctcgcatgacgcatgcactattcccgccagatctggttatcttgcacgactattactaccgcgggtacgaagacgccgtgctgtatctgaggcgtctgaatgcagtctacctgaacagtagttccaagcgtgtgatttttccccgagttgaggtctattgccagattgaactggctcttgggaacgagtgccccgaaagatcgcagcctagcctgcgggctcgccaggcctcacttgagggcgccactcagcctcacaaagaatgggtccctaagggggatgggcgcgggtcccacggtcctcctgtgtcccagcctgtgcagaccttagaattcacgtgtgagtccccagtaagcgccccagtctctcctctggaacaaccccccgcccagccactggccagtagcacaccgctgtccctgtccggcatgccccccgtgtcgtttcccgcagtacataaacctcctagcagcactcctggctcctccctccccactcctccgcccgggctatcgcctctgagcccccagcagcaggtccagcccagtggctcccctgcaaggagcctgcattctcaggcgcccacatccccgcggcccagcctgggaccatctaccgtgggggcacctcagaccctgcctcgcagctccttgtcagcttttcccgcacagcccccagtggaagagctgggccaggagcagccacaggctgtggcgcttctggtgagtagcaagcccaaatccgccgtaccactagtgcatgtcaaggagacagtatccaaaccttatgtgactgagagtcctgccgaggactccaattgggtgaacaaagtgttcaagaaaaataagcagaaaacctccggtacgagaaagggcttccctcggcacagcggctctaaaaaaccatcatccaaagtccagtag

SEQ ID NO: 127940 - DNA, 1602 bp, synthetic construct
  misc_feature 1..1602: note = Description of Artificial Sequence: Synthetic coding sequence
  source 1..1602: mol_type = other DNA
atggaggagcaggtttttaagggcgatcctgatacccctcattctatctctttttctggcagtggtttcttgtctttctaccaggccggtgccgttgacgccctcagggatcttgctccccggatgctggagacggctcataggttcgcaggaaccagtgcgggtgcggtaatcgccgctctcgctatatgtgggatcgagatggacgaatatctccgcgtcctcaacgtgggagtcgctgaggttaaaaaaagcttccttggcccactctcccccagctgtaagatggtgcaaatgatgagacaatttctgtaccgagtgctgcccgaggactcttataaggttaccacaggcaagctccatgtgagtctcaccagactcacggacggtgaaaatgtagtcgtctcagagttcaccagcaaagaggagctgattgaggctgccttgtactgcagctgtttcgtccccgtatattgcggattgattccccccacataccggggggtccggtatatcgatggcggctttaccggcatgcagccctgcgctttttggacagatgccattaccatcagtaccttcagtggacagcaggacatctgtcctagggattgtcccgccatatttcacgactttcgaatgttcaactgcagttttcagttcagcctggaaaacattgcccgcatgacacacgccttgttccccccagatctggtcatcttacacgactattactacaggggatacgaagacgctgtgctgtacctgcggcgtttaaacgccgtctacctgaactcttccagcaagcgagtcattttccctagggtcgaggtctactgtcagatcgaacttgcattgggaaatgaatgccctgagcggtcacagccttccctgcgggcacgacaagcgtccctcgaaggcgccacacagccgcacaaagaatgggttccaaagggagacggtagaggctctcatggaccaccagtttctcagcctgtccaaacattagaatttacttgcgaatcacctgtttcggctccagtttcccccctggagcaaccccctgctcagcccttagcttccagcactcccctgagcttgtcaggaatgccaccggttagcttccctgccgtgcacaagcccccaagttcaaccccaggcagctccctgcctactcctccaccgggactttctcctctgtctccccaacaacaggtgcagcctagcggttccccagcccgctccttgcattcccaagctccaacatctccaagaccatctctgggcccaagcactgtcggcgccccacaaactctgcccaggtcaagcctcagcgcctttccggcccagcctcctgtcgaagagcttgggcaggagcagccacaggccgtggctctgctggtgtcatccaaaccaaaaagtgctgttccgctggttcacgtaaaagagactgtctcgaagccctacgtgactgaaagccctgcggaagacagtaattgggtaaataaggtgtttaagaagaacaagcaaaagacttcaggaactaggaagggtttcccaagacactctggttcaaagaagccgtcttcaaaggtacaatag

SEQ ID NO: 127941 - DNA, 1341 bp, synthetic construct
  misc_feature 1..1341: note = Description of Artificial Sequence: Synthetic coding sequence
  source 1..1341: mol_type = other DNA
atggtccaaatgatgcgccagttcctttacagggtgctaccagaggattcttataaggtgacaacaggaaagctccatgtatccttgaccaggctgacagatggtgaaaacgttgtggtgtctgagttcacatccaaggaagagctgattgaggccctgtactgctcctgcttcgttccagtgtattgtggacttatccctcctacctaccgcggagtatgggcctttctcaccttaccgccacagaggtatattgatggcgggtttaccgggatgcagccgtgtgcattctggactgacgctatcacaatatcaacattttccggtcagcaggatatctgtcccagagattgcccagcgatattccatgattttaggatgttcaactgttcctttcagtttagcctcgaaaacattgcgcggatgactcatgcactcttcccaccggacctggtgatactacacgactattactatagaggctatgaagacgccgtcctgtacctccggcgcctgaatgctgtctacctcaattcaagcagtaaaagggttattttcccaagggttgaggtgtactgccaaattgaacttgccttaggcaacgaatgccccgagcggagccagccttcactgcgagcgagacaggcatccttggaaggagccacccaaccgcacaaggaatgggtgccgaaaggagatggccggggatctcacggacctccggtctcccagcccgttcagacactcgagtttacctgcgaatcccccgtctccgctcctgtgtcgcccctcgagcaaccgccagcacagcctcttgcgtcttctacccccctatcattgtcaggtatgccgcccgtgtctttccccgccgtgcataaaccaccatcgagcacccctggatcaagtttaccgacccctccgccgggcctgtctccgctttcaccgcagcagcaggtccagccctcaggcagtccagccaggagtctccatagccaggcgcctacttctcctaggccaagtctgggcccttctactgtcggggcccctcagacgcttccaaggagttcgctgtctgcctttcccgctcagccgccagtggaggagctaggccaagagcaaccccaggccgtcgcattgttagtgagtagtaaacccaagtcagccgtgccactggtgcatgttaaggaaaccgtgtctaaaccatatgtcacagaatctcccgccgaagactcaaactgggttaacaaggtgttcaagaagaataagcagaaaacatcagggaccagaaaaggctttccacgccatagtggttcgaagaaaccatcgtccaaggttcagtag

SEQ ID NO: 127942 - DNA, 1515 bp, synthetic construct
  misc_feature 1..1515: note = Description of Artificial Sequence: Synthetic coding sequence
  source 1..1515: mol_type = other DNA
atgttccctcgagagaaaacctggaatatcagcttcgccgggtgcggatttctcggagtttactacgtgggagtggcttcatgtctaagagagcacgcacccttcttggttgcgaatgctactcatatctacggcgcatctgcaggagcactgacggcaacagccctggtgacaggagtgtgtctgggagaagccggagctaaattcatcgaagtgagtaaggaggccaggaaacgatttctcgggcctctgcatcctagctttaacctggtgaagatcatacgaagctttctgctcaaggtgctccctgctgacagccatgagcatgccagcggcaggctgggaattagcctgacacgcgtatccgatggggagaacgtgatcattagccactttaatagtaaagatgaactgatccaagcaaacgtgtgtagtggctttatccctgtgtattgtggactcatccctccctccctgcaaggtgttaggtacgtggacggaggaatttcagataacctcccattatatgaattaaagaacactatcacagtgtcccccttttctggcgaatcagatatctgtccccaggacagctccacgaacattcacgagctgcgtgttaccaatacttctattcagtttaacctgcgcaacctgtaccgtctgagtaaggccttgtttcccccggaacctctcgtacttcgggagatgtgtaagcagggataccgcgacggtctacgttttctccagcggaacgggttgctcaaccggcccaaccctctgctcgccctgccccccgcgcgtcctcacggccccgaagataaagaccaagccgtggagagcgcccaggctgaggattattcccagctgcctggcgaagatcatatccttgagcacctgccagctagactaaatgaggccctgctcgaagcttgcgtagaacctaccgacctgctgaccacactgagtaatatgctcccggtgaggctcgcaaccgccatgatggtgccttatactctcccacttgagagtgccctaagctttacaattcggctgctggagtggcttcccgatgtgccagaagacatccgctggatgaaggagcaaaccggctcaatctgtcagtacctggtgatgagagcgaagaggaaacttggccgccacctgccctcacgcctgccagagcaggtggagctaagaagggtgcagtctcttccctctgtacccctgagttgtgctgcatacagggaagctttgcctggctggatgcgaaacaacctctcactgggcgatgctctggccaaatgggaggaatgccaaagacagcttttactcggcctgttttgcacgaacgtagccttccctccggaagctctcaggatgcgtgctccggccgacccagccccagctcctgccgaccccgccagcccacagcaccagcttgccggccccgctcctctactgtccacacccgcccctgaggccagacccgtgatcggtgccctcggcctatag

SEQ ID NO: 127943 - DNA, 1290 bp, synthetic construct
  misc_feature 1..1290: note = Description of Artificial Sequence: Synthetic coding sequence
  source 1..1290: mol_type = other DNA
atggggtttctggaggaagagggtcgttggaacttaagctttagcggagccgggtacttgggagcccaccatgtgggcgccaccgaatgcttacgtcagcgggccccgagactgcttcagggagccaggagaatctatgggtcttccagcggcgcactcaacgctgtgtcaattgtttgtggcaaaagcgtcgacttctgctgttctcatctgctcggcatggtgggacagctggagcgcctcagtctatccattttgcaccctgcctacgccccaatcgagcacgtgaaacagcagctgcaggacgcccttcctccagatgcccatgttctggcgtctcagcgcctggggattagtctgacccggtggccagatggcaggaacttcttggtcaccgactttgctacctgtgacgagctgattcaagccctagtgtgtaccctatactttcctttctattgtggtttgatccctcccgagtttcgcggcgagaggtatatcgacggcgccctgtctaacaatcttccttttgctgattgcccgtccacaatcaccgtgtctccctttcatggcaccgtggatatttgtcctcaaagtacttccccaaacttgcatgagctcaacgtgttcaacttcagcttccagatctctaccgaaaatttctttctgggcttgatttgtctgatccccccctctctcgaagtcgtggctgataactgccgacagggataccttgatgcgctccgcttcctcgaaagaaggggtttgactaaggaacctgtactgtggactctcgtcagcaaggagccacctgcacctgccgatgggaactgggacgcaggttgtgaccaaagatggaaggggggcctgtccctgaattggaaggtgcctcatgtgcaggtcaaggacgtccctaattttgaacaactgtcgccggagctcgaagcagcgctcaagaaagcttgcacacgggatccgtctcgttgggcacgtttctggcacagcgggcctgggcaggttctgacgtacctcctgctaccctgtaccttgccttttgagtatatttacttcagatcccggaggctggtggtgtggttgccagacgttcctgcggatctttggtggatgcagggccttctccgaaatatggctctagaagtgttctcacggaccaaggcccagctcctgggacccatttcaccccctgcaacacgcgttctggagactagtcctctgcaaccgcagattgccccgcaccgcgaggagctgggccctactcatcaagcgtag

SEQ ID NO: 127944 - DNA, 1515 bp, synthetic construct
  misc_feature 1..1515: note = Description of Artificial Sequence: Synthetic coding sequence
  source 1..1515: mol_type = other DNA
atggcagcccagagacgatctctcttacagtctgagcaacagccgtcatggaccgacgacctgcccctctgccacttgagcggagtgggttctgcatccaacagatcgtacagtgctgatggtaaggggaccgaaagccaccctcccgaagattcatggctgaaattccggtcagaaaacaattgcttcctctacggcgtatttaacggatatgacggtaacagggtcacgaatttcgtggcccagcggctctctgcagagttgttgcttgggcagttaaatgcggaacatgcggaagccgatgttcgaagggtactgcttcaagcattcgatgtcgttgaacgctccttcctggagagtattgacgacgccctcgcagagaaagccagcttgcagtcccagctgccggagggcgtcccccagcatcagctgccaccacaatatcaaaagatcttagagcggctgaagacacttgagcgggaaatctcaggcggagcaatggccgttgtagccgtcctgctaaataacaagctgtatgtcgctaatgtaggcacgaatcgcgctctgttgtgcaagagcacagtggacggattgcaggtgactcagttgaatgttgatcacaccaccgaaaacgaggacgaactgttcaggctatcgcaactcggccttgacgcaggaaagatcaagcaagttggaataatctgcggccaggagtcgacacgtcgcatcggagattacaaggtgaagtacggctatactgacattgacctgttgagcgcagcaaaatctaagcctatcatagccgaacctgaaattcatggcgctcaacccttagacggcgtgaccggattcctggtcctaatgtccgaaggcctctacaaagccttggaggccgcccacggacccggccaagctaatcaggagatagccgctatgattgacacggagtttgccaaacagacctcattggacgccgtcgctcaggccgttgttgacagagttaagagaatccattctgatacctttgcctcgggcggcgaacgggcacgcttctgtcccagacacgaagacatgaccctgctcgttcgcaactttggatacccgctaggggagatgtctcaacccactcctagcccagcgcccgcagcggggggacgcgtttacccagtaagcgtgccctacagctctgctcagagcacctctaaaacaagcgtaacgctttccctcgtcatgccatcacagggacagatggtcaatggagcccactccgccagcaccttggatgaggctaccccgacattgacaaatcagtcacccactctaaccttgcagtcaacaaacacacatactcagtcctcctcatcctcctctgatggcggactgttccgttccaggcctgcccactccctgccccccggcgaagacggacgtgtggagccctacgtcgattttgcggagttttaccggctctggtccgtggaccacggagagcagagtgtcgttactgcgccctag

SEQ ID NO: 127945 - DNA, 948 bp, synthetic construct
  misc_feature 1..948: note = Description of Artificial Sequence: Synthetic coding sequence
  source 1..948: mol_type = other DNA
atggggtttctggaggaagagggcaggtggaatctctccttctcaggggctgggtacctgggtgctcaccatgttggggctaccgagtgcctccggcaaagggcacctagactcctccagggggcgaggaggatttacggaagcagttcgggtgccttgaacgccgtgtccatagtgtgcggaaagtcggtggattgcccaagtaccataacagtgagtccttttcacggcaccgtggatatctgtcctcagagcacctcaccaaacctgcacgagctgaacgtattcaacttctcattccagatctcaaccgaaaatttcttcctggggctgatttgtcttattcccccgagcctggaagtggtcgcagataattgtcggcagggctatctggatgctttaaggtttttggagcgtagagggttaacaaaagagcctgttctgtggactctcgtgtccaaggagcctccggcgccagcagatgggaattgggacgccggctgcgaccagcgctggaaggggggcctgtctctgaactggaaggtgccgcacgtccaggtgaaggatgtgcccaactttgaacaactctctccagagctcgaagcagcactcaagaaagcatgtactagagatccctcaaggtgggctaggttttggcactcgggtcctggccaggttctcacatatctgctactcccgtgtactctcccatttgagtacatctactttcggtcaaggaggctcgtagtgtggctgcctgatgtgcctgctgacctttggtggatgcagggactactgcgcaacatggccctagaagtgttctctaggacaaaggcacagttactaggtcccatcagcccacctgctacccgcgtcctcgaaaccagccccctccagccacagattgcccctcacagggaggagcttgggcctacccaccaggcttag

SEQ ID NO: 127946 - DNA, 807 bp, synthetic construct
  misc_feature 1..807: note = Description of Artificial Sequence: Synthetic coding sequence
  source 1..807: mol_type = other DNA
atgggctttcttgaggaagagggcaggtggaacctaagtttctccggggccggctatttgggagcccaccatgtgggtgccaccgagtgtctgcgtcagagggcaccccggctccttcaaggcgctagaaggatttacggcagcagcagtggtgcactgaatgctgtctctatagtatgcggcaagtcggtggatttctgttgctcccacctcctgggcatggtcggtcagttggaacggctgtcactcagcatactccatcctgcttacgcccccatcgaacacgtaaaacagcagctccaggatgccctgccgccggacgcgcacgtcctggctagtcagcggttgggtatatccctgactagatggcccgacggtaggaactttttagttactgattttgcaacctgtgacgaactcatacaagtagttgcagataactgtagacaggggtacctagacgccttgcgctttcttgagcgccgaggactcacaaaggagcctgttttgtggactctggtgtctaaagaaccaccagccccggccgacggcaactgggacgccggttgtgatcaacgctggaaagggggcctgagcctaaattggaaggtgccacacgtgcaggtcaaagacgtcccaaactttgaacagcttagtcccgaactcgaggccgcattgaagaaggcatgtacgcgggatccaagcagatgggctcgattttggcatagtgggcccgggcaggtccttacctacctgttgctgccctgcacactgccctttgagtatatctacttcagaagcagatag

SEQ ID NO: 127947 - DNA, 948 bp, synthetic construct
  misc_feature 1..948: note = Description of Artificial Sequence: Synthetic coding sequence
  source 1..948: mol_type = other DNA
atgggttttctcgaggaggagggaagatggaatctgtcttttagcggggccgggtatctaggcgcccaccacgtcggggcgactgagtgcctgcgacagcgagcccctcggctgcttcaaggcgcccggagaatttacgggagcagtagcggggctcttaacgccgtgtccattgtatgtggcaagtcagtagactgtccttccacaataacagtgtcgccattccacgggacggtggacatatgtccccagtcaacctctccaaatctgcacgaactgaatgtcttcaattttagcttccaaatcagcacagagaacttcttcctcggccttatatgcctaatccctccgtcactggaggtggtggcagacaattgtcggcagggatatctggatgctctcagattcctggagaggagagggttgaccaaggagccagtcttgtggaccctcgttagcaaggaaccaccggctcctgctgacgggaactgggatgcagggtgtgatcagaggtggaagggaggcctctctctgaattggaaagtgccgcacgtacaagtcaaggacgttcccaatttcgagcaactcagcccagaactcgaggccgctctaaaaaaagcttgcactcgtgacccatcccgctgggctagattctggcatagtggccccgggcaagtgctgacctacctgctgttgccatgcacgctcccattcgagtacatttacttccgctcgcggcggttagtggtgtggctccctgatgtcccagcagatctgtggtggatgcagggcctgctgcgtaacatggccctggaagtgttttctcgcacgaaagcccagttgttggggccgatttcaccgccagctaccagagtgctggagactagccctcttcaaccacaaattgcacctcaccgcgaggagttgggcccaacacatcaggcctag

SEQ ID NO: 127948 - DNA, 708 bp, synthetic construct
  misc_feature 1..708: note = Description of Artificial Sequence: Synthetic coding sequence
  source 1..708: mol_type = other DNA
atggaagaagagacccacacagacgcaaagatccgcgccgagaacggcacaggatcttctcctcgcggacctgggtgtagtttgcgccatttcgcgtgcgagcagaacctgttatcgcgtccagatgggtctgccagcttcttgcaaggggatacctccgttctcgccggtgtgtacggcccggccgaggtaaaggtgtcgaaagagatatttaacaaagcaacgttggaagttatactgagacccaagattggcctgccaggggtcgcagagaagtcacgcgaacgattgatccggaatacatgcgaggccgtggtgctgggaaccctgcaccctaggacaagcattacggtagtgctccaggtcgtctcagacgcagggagcttactagcatgctgtctaaatgctgcctgcatggccctcgtggacgccggggtcccaatgagggccctcttctgtggagtggcatgcgccctggacagtgatggtaccctggtgctcgaccccacttcaaagcaggaaaaagaggcgcgcgccgtcctgacctttgcgctcgattccgtggagcgcaagctgctgatgtccagcactaagggcctatactcagacactgagctccagcagtgcctggcagcggcacaagccgcaagtcagcacgtctttagattttatcgagagtcacttcagagacggtatagtaagagttag

SEQ ID NO: 127949 - DNA, 4128 bp, synthetic construct
  misc_feature 1..4128: note = Description of Artificial Sequence: Synthetic coding sequence
  source 1..4128: mol_type = other DNA
atggaagcgcccctccagacgggcatgatgggcaccagctcacacggattggccacgaacagcagcggagccaaggtggccgaacgagacggcttccaagacgtcctcgcacccggagagggcagcgcaggccgtatatgcggagctcagccagtgccttttgtgccacaggtgttaggtgttatgataggcgccggcgtggctgtggtcgtcactgcagttctaattctgctggtggttcgccgccttcgcgttcccaagactccagcaccagacggtcctaggtatcggttccggaagagagacaaagtgcttttttatggaaggaagattatgcgaaaagtgtcgcaatccacctccagcctggtggacacaagtgtctccgcaacatcacgtccaagaatgcgtaaaaagttgaagatgttaaatatcgcgaagaagatactgcgcatacagaaggaaacacccaccttgcaaagaaaagagcccccacccgctgtgttagaggccgatcttaccgagggcgatctggccaactctcatctcccctctgaggtgctgtacatgctgaaaaacgttcgggtactcgggcatttcgagaagcctctgttcctagagctgtgccggcacatggttttccagcgcttgggccaaggcgattacgtctttagacctggtcagcccgacgcatccatttacgtggtgcaggacgggttactagaactgtgcctccctggccctgacgggaaagaatgtgttgtcaaggaggtagtgcctggggactcagttaactcgcttctttccatcctggatgtgattacaggacaccaacacccacagcgcactgttagcgctagggctgccagagatagtaccgtactgcggctgcccgtggaggcattcagcgccgtcttcaccaagtaccctgagtccttggtgcgggtcgtgcagattatcatggtgcgcctacagcgggtcacattcttggctctgcacaattatctaggactaactaacgaactgttttcacatgagatccagcccctgagactgtttccttcaccaggactgcccacccgcacatctcccgtgcgaggttcaaagcgcatggtcagcaccagcgcgacagatgaacccagagaaacccccggaagacctcccgatcctaccggcgcgcctcttccaggaccgaccggggatccagtcaaacccacttccctggaaaccccctccgcccctctgctatcaaggtgtgtcagcatgcctggcgacatttcagggctccagggtggcccccgctctgattttgatatggcctacgaacgggggcgaataagtgtctcgctacaagaggaggcgtcaggagggagcctggccgctccagccaggacgcccacccaagagccccgggagcagcccgccggcgcctgtgaatatagttattgtgaagatgagtctgcaacaggaggctgcccttttggtccttatcagggaagacagaccagctctattttcgaggctgctaaacaggaactcgccaaactgatgcgcatagaagacccttcgctccttaatagcagggtgcttctgcaccatgcaaaggccgggactatcatcgccaggcaaggtgatcaggatgtcagtttacacttcgtattgtggggatgtctgcacgtgtatcaacggatgattgataaagccgaggacgtgtgcctatttgttgctcaaccgggcgaacttgttggacaactcgctgtgcttaccggagagcctctaatattcaccctgagggcccagcgggattgtacttttctgagaattagtaaatccgacttctacgagatcatgagagcccaaccctctgtagtgctgagtgcagcccacactgtcgccgcgcgcatgtccccttttgtgcgccagatggattttgctatcgattggacagcagtggaagccggccgcgccttatacaggcaaggtgatagatccgattgtacatacattgtgctgaacgggcgtttgagatctgtgatccagcgtgggagcggtaagaaagaactggtcggcgaatatggaaggggcgatcttattggcgtagtcgaggccctgacccgccagcctagggctaccacggtgcacgcagtgagggacacggagctagccaagttgccagaaggaactttggggcatattaagcggcggtacccacaggtggtcacgagactgattcacctgttatcacaaaaaattctggggaatctacagcaactgcagggacctttccctgccggatcaggcctcggagtgccgccgcattctgagctgacaaaccctgcttcaaatctagccacagtcgccatattaccagtgtgtgccgaggtgcctatggtggctttcacactggagctgcagcatgccctgcaggccattggccctacgctgcttttaaactctgatattatccgcgcgcgcctgggagctagcgctctggattcaattcaggagtttaggttgtctggatggctcgcacagcaagaagatgcccaccgcattgtcctatatcaaaccgacgcttctttaaccccttggacagtgcgatgcctgcggcaggcagactgtatactaattgtgggtttaggagatcaggagcctactttggggcaactcgagcaaatgttggaaaataccgctgtcagggcattgaaacaactggtgctgctgcacagagaagagggcgctgggcccacccggacagtcgagtggctcaacatgcgtagttggtgctctggacatctgcacctgcggtgtcctaggcgactcttcagccggcgcagtcccgccaagctgcacgagctgtacgaaaaggtgttttcccggcgcgccgacaggcactctgatttcagtcggcttgctagggtgctaacaggcaatacaattgccttggttctcggcgggggcggggctcggggctgcagtcatattggtgtgctgaaggccctggaagaggccggagttcccgtcgacctggtcggtggcacctcaatcggcagcttcatcggcgccctttatgcagaggagagaagcgcgagcagaacaaagcagagagcccgggaatgggccaagtccatgaccagtgtcctggaacctgtccttgatctcacatatcccgtcacgtcaatgttcacagggtccgcttttaatcgcagtattcatcgtgtgttccaggacaagcagatcgaagacctgtggttgccttactttaacgtgacaactgacatcaccgcttcagcaatgagggttcacaaagatggctctctgtggcgatatgtgcgagccagtatgaccctctctggctatctaccgcctctgtgcgaccccaaggatgggcatctgctgatggacgggggttacattaataacttgccagccgatatcgcccgctcaatgggagctaagaccgtcattgcaattgacgtaggatcacaagacgaaactgacttgagtacatacggtgacagtctgtcaggctggtggctgctgtggaaacgactgaatccctgggcggacaaggtgaaggtccctgatatggccgagatacagtccaggctggcatacgtatcctgcgtgaggcagctggaagtcgtgaagagttcttcttactgtgaatatttaagaccccccatcgattgcttcaagacaatggatttcggaaagttcgaccaaatttacgacgttgggtaccagtatggtaaggccgtttttgggggatggagccgcggaaatgtcattgagaaaatgctgacagacaggagatctaccgatctgaacgagagcaggcgtgcagacgtgcttgccttcccttcttcggggtttactgatctggcagagattgttagccggatcgaaccacccacttcatatgtctctgacggctgcgcagacggtgaagagtcagactgtctcactgaatacgaagaggacgctgggccagactgcagtagagacgaaggagggtcccctgaaggggcatcgccaagtacagccagtgagatggaagaggagaaatctattctgcgccagagaaggtgcctgccacaggagcctcccggttccgcgaccgacgcttag

SEQ ID NO: 127950 - DNA, 3984 bp, synthetic construct
  misc_feature 1..3984: note = Description of Artificial Sequence: Synthetic coding sequence
  source 1..3984: mol_type = other DNA
atggaggcaccactgcagactgggatggttctgggggtgatgataggggccggcgtggccgtggttgtgacggccgtcctgatcttactagttgtgagaagattgagggtgccaaagactcccgcccctgacggaccaagataccgtttccggaagcgggacaaagtgctgttctatgggaggaaaatcatgagaaaagtgagtcagtctacctcctcgctagtggacacaagtgttagtgccaccagtaggcccaggatgcgcaaaaaactcaagatgctcaatatcgccaagaagattctgcgaatccagaaggaaactcccactctgcaaagaaaagaaccacctcctgccgtgttggaggccgatctaactgagggggacctagcgaacagccatctcccttccgaggtcttatatatgctgaagaacgtgagggtcctcgggcattttgagaagcccctctttcttgagctgtgtcgccatatggtgttccagcgtctaggacagggcgactatgtgttcaggcccggtcagccagatgccagcatttacgtggtgcaggatggactactggagctgtgcttgcctggtccggatgggaaggaatgcgtggtgaaggaggtggttcctggggactcagtgaacagtctactgagcatcttggacgtgattactggccatcagcacccacagaggactgtctctgcacgggcggcacgcgacagtaccgtgcttaggctgccagtggaagcttttagcgcggtgttcactaagtatccagagtccctcgtgagggtagtgcaaataattatggtcaggttgcagcgtgtcaccttcctggccctgcacaactacctgggacttacaaacgaactgttttcacacgagatccagcctctccggctgttcccgtctcccggcttgcccacgcgcacctctcccgtaaggggaagcaaacggatggtcagcacctcagccactgatgaaccacgcgagactcccggaaggcctcccgaccccacaggggctcccttgcctggaccgacaggggatcccgtgaagcccacttccctggagacgcctagcgctcctctgctgtcaagatgtgtgagtatgcccggagatatttcaggtctgcagggcggccctcgaagtgattttgatatggcttacgagaggggccgtatctctgtatcgttgcaggaggaggcatccggaggctctctggctgccccagcaagaacccctacacaagaacctagagagcagccagccggggcctgtgagtatagctactgtgaagatgaatctgccaccggcgggtgtcctttcgggccatatcaggggcggcagacttcttcgattttcgaagccgccaaacaagaacttgctaagctcatgaggattgaggacccctccctgctcaattcccgggtccttttgcatcatgccaaagcagggacaataattgccaggcagggcgaccaggacgtgtcactccactttgtgttatggggttgtctgcatgtgtaccagcgcatgattgacaaggctgaggacgtctgcctcttcgtggcccagcccggcgagctggtgggtcagctggccgtcttgactggggagccgttgatatttacactccgggcccagcgggattgcacttttctccgcatctccaaaagcgacttctacgaaatcatgcgtgcccagccctccgtagtgctgagcgccgcgcacaccgtggctgctcggatgtctcccttcgtgaggcaaatggatttcgctatcgactggaccgcggtcgaggcgggcagggcactctatcgacagggcgaccgctctgactgcacctatatcgtattgaacggacgcctgaggagcgtgatccagcgcggctctggaaaaaaggagctggtgggtgagtatggaagaggtgacttgatcggggtagtggaagcccttacccgtcagccccgggccactaccgtccatgccgtcagggacaccgagctggcaaaactacctgaggggaccctcgggcatatcaagcgccgctacccccaggttgtgacaaggctgattcatctgctgtcacagaaaattctggggaacctgcaacaactgcagggtccctttcccgccggctccggcctaggggtcccaccccactctgaactcacaaatcctgcctcgaacttagccacagtcgcaatcctgccggtttgcgccgaggttcccatggtcgcctttaccctggagcttcaacacgctttgcaagccataggacctactcttcttctgaatagcgacattatccgagcaaggctgggcgcctccgcacttgactcaattcaggagtttcggcttagcggctggttggcacagcaagaagatgctcacaggattgttctctatcagactgacgcttcactgaccccatggacggtgaggtgtctgcgccaggccgattgtatccttatcgtcgggctcggcgatcaagagccaactctaggccaactggagcagatgctggagaatacagccgtgcgagctctgaaacagcttgtccttttgcatcgggaggagggagcagggcctacaaggaccgtggagtggctcaacatgcggtcttggtgttcgggacacctacacctccggtgcccaagaagactattttccagacggagcccagctaaactgcatgaactatatgaaaaagtgttttcccgacgagccgacaggcactcggacttctcgcgcttggccagagtgctgaccggcaacacaatcgcccttgtactgggtgggggtggtgctcgcggatgttctcacattggcgtcttgaaagcattggaggaagctggcgtgcctgttgatctcgtcgggggcacatcaatcggatcctttattggtgccctatatgccgaggaacggagcgcttcccgtaccaaacagagggccagggagtgggcgaaaagcatgacatctgtgctggagccagttttggacctgacatatcccgttacttctatgtttaccggatccgcattcaatagaagtatccacagggtctttcaggataagcagattgaagacctctggctaccctatttcaacgtgaccaccgatattacagcctctgccatgcgggtgcacaaggacggaagtttgtggaggtacgtgagggcctccatgacactgtctggttatctccccccactatgtgaccctaaagacggtcatctgttgatggacggagggtacattaataatctcccagcagatatcgccaggagcatgggggccaagacagtcatcgcaatcgatgtcgggtcccaggatgagaccgatttatcaacatatggggactccctctcagggtggtggctgctgtggaagcgactgaacccttgggctgataaggtgaaggtgcctgacatggcggagatccaatcacgcctcgcatacgtcagttgtgtgcgtcagctggaggtggtaaaatcgagttcatactgtgaatatctgcggccgccaattgactgtttcaagacaatggacttcggaaaatttgatcagatctacgacgtcggatatcagtatggtaaggcggtgttcggcggatggtcgagaggaaatgtcatcgagaaaatgctcacggaccgcagatccaccgatctgaacgaatctcgaagggccgacgtactggcattcccctcgagcggctttactgacctggcggaaatcgtcagtcggatcgagccacccacaagctatgtgagcgacggatgcgcggatggagaggagagtgattgcttaactgagtacgaggaagatgctggccctgactgctccagagacgagggcggctctcccgaaggagcctcaccatctacagcatctgagatggaggaagagaaatccattcttcgccagaggcgctgtttgccacaggaacctcccggtagcgctacggacgcgtag

SEQ ID NO: 127951 - DNA, 1371 bp, synthetic construct
  misc_feature 1..1371: note = Description of Artificial Sequence: Synthetic coding sequence
  source 1..1371: mol_type = other DNA
atgcgcaaggtgagtcagtccacgagcagcctagtggacacgtctgtctccgcgacttcaagaccgaggatgagaaagaaactgaagatgctgaacatcgcaaagaagatcctcaggatccagaaggaaacccccactctgcaacgtaaagagccacctcctgccgtgctagaggcagatctaactgaaggtgacctcgcaaatagtcatttaccatccgaggtcttgtatatgctcaagaacgtccgggtacttgggcacttcgagaagcctttgtttttagaattgtgtcgccatatggtttttcagaggctgggacagggtgattatgtgttcaggccagggcagcctgatgcctctatctatgtcgtgcaggatggtctgctggagctgtgcctgcctggcccagacgggaaggaatgcgtcgttaaagaggtcgtgcccggcgactctgtaaattccctcttgtccattcttgacgtgattacaggacaccagcatccccagcgcacagtatccgctcgggccgctagggattcgacagtgttgcgactgcccgtggaggccttcagtgccgtattcactaaatatccggaatcactggtgagggtggtgcaaatcatcatggtcagattgcagcgggtgacatttcttgctcttcacaactacctgggcctcaccaatgagttgttttcacacgaaatccagcccctgcgactgtttccctccccagggctgcctactagaaccagcccggttagaggctctaagagaatggtgagcactagcgcaactgacgagccacgcgaaactcctggacggcccccagacccaacgggagccccgctgccaggtcctaccggggacccagtaaaaccaacctccctggaaacaccgagtgccccactgttgtccagatgcgtaagcatgccaggcgatatcagcggcctgcaaggcggcccacgttccgatttcgatatggcatacgagagaggacggataagtgtctctctgcaggaggaagcctctgggggttccctcgcagcacccgcgcggacccccacccaggaacctagggagcagcccgccggtgcatgtgaatactcatattgtgaagatgaatctgccaccggagggtgtccgtttggcccatatcaagggcgtcagactagcagcatctttgaggcagctaaacaggagttggctaagctgatgcggattgaggacccctccctcctcaactcaagggtcctgctgcaccacgccaaggcgggcactatcatcgctcggcagggcgatcaggacgtctcaggaccgcacaccgggctgacatgcccggagagaggatgcagcgtggctcttatgacttag

SEQ ID NO: 127952 - DNA, 3903 bp, synthetic construct
  misc_feature 1..3903: note = Description of Artificial Sequence: Synthetic coding sequence
  source 1..3903: mol_type = other DNA
atggaggcccccttgcagacagggatggtcttgggagtaatgatcggagctggagtggcagttgtcgtgaccgcagtgctgatcttgctggtggttagacggctgagggtgcctaagacccctgcaccggatggtcctcggtaccgcttccggaaaagagacaaggtcctgttttatggcaggaaaataatgcgtaaggtttcccagagcacttcctccctggttgatacaagtgtgagcgccacaagccggccgagaatgcgcaagaagcttaaaatgctgaacatagcaaagaaaatcctgcgcattcagaaagaaactccaacgctgcaaaggaaggagcctccgcccgcggttcttgaggccgacttgacagagggagacctagctaacagtcatctgccttccgaagtgctgtacatgctcaagaacgtccgcgtcctaggtcacttcgaaaaaccactctttttggagctgtgtaggcacatggtttttcagagactgggacagggagattacgtcttcaggcccggccagcccgatgcttccatatacgtagttcaagatgggttgttggaactttgtctgcctgggccggacggaaaggaatgcgtcgtgaaagaggtggtccctggtgacagtgtgaacagtctgctgtccatcctggacgttatcaccggccatcagcacccccagcgtacggtgtcagcacgggctgcgcgtgactccactgtgctgagactcccagtagaggccttttccgcagtgtttaccaaatatcccgagtccctggttcgagtggtccagatcatcatggttaggttacagcgcgtgacctttctcgcccttcataactatctgggcctgacgaacgagctgttttcacacgagatccagcctctcagactattcccgagcccaggtctgccaacacgaacatcacctgtccgggggtccaaacgaatggtgagtacttctgctacagatgaacccagggagactcccggccggccgcctgaccccacaggcgcacctcttcctggcccaaccggtgacccggtcaagccaacgtcattagagaccccatcagctccattgctctcaaggtgtgtgagcatgcccggagatatatctgggctgcagggcggccctagatctgactttgacatggcttatgagaggggtagaattagcgtgtccctgcaggaggaggcttctggtggaagcctggcagcaccagcccggacgcctactcaggaacctcgtgagcagcctgctggagcctgtgagtattcctactgcgaagatgaaagtgcaacaggggggtgccccttcggcccttatcaaggacgtcagacctcaagtatctttgaagctgctaagcaagagctggctaagcttatgagaatagaggacgtctctctccactttgtgctctggggctgcctgcacgtctaccagcgcatgatcgataaggccgaggacgtttgcctgttcgtggcgcaacctggcgaattagtcggacagctggctgtgctgacaggagagccactgattttcaccctgcgtgcacaaagagactgcaccttcctcaggatttccaaatcagacttttacgaaatcatgagggcacagccgtcggtagtgttgtcagctgcgcataccgtcgcagcacggatgtcacctttcgtgaggcaaatggattttgcaatcgattggacggctgtcgaagcagggagagcactgtacagacagggagaccgttccgactgcacctatattgtcctgaacggcaggctgaggagtgtgatccagagaggaagcggcaaaaaggaattggttggcgagtacgggcggggggaccttatcggcgtggttgaagcgttgacacgccagcctagagctacaacagtgcatgccgtgagggatacagaactcgccaagctacctgaggggacattaggccacatcaaacggaggtatccccaggtcgtgactagactgatccaccttctgagtcagaagatactcggtaacttgcagcagctacagggaccatttcccgggagcggacttggggttcccccgcactctgaactgacaaacccggcctcaaatttagctaccgtcgccattttgcctgtttgcgcagaggttccgatggtagcttttaccctggagctgcagcatgccctccaagctatcgggcctactttactgctcaattccgatatcattcgcgcaagactgggggcctcagctcttgatagtatccaagaattcagattgtctggctggctggcccaacaggaggacgcccataggatagtactctaccagactgacgcttccttgactccctggaccgtgaggtgcctgcggcaggctgattgtatcctcatcgtggggctcggcgatcaagagccaacactggggcaactcgaacaaatgctggagaacacggctgtgagggcgctgaagcagctagtcttacttcatcgggaagagggtgctggccctacacgtaccgtcgagtggttgaatatgagaagttggtgctccgggcatctgcatctgcggtgccctcgaaggctgttttctcgtcggtcccccgctaagctgcacgagctctacgagaaagttttttcaagaagggcggaccgccattcagacttttctaggctggctcgtgtcctcacagggaataccatcgccctagtgctgggaggtgggggcgctcgcgggtgctcccacatcggagtattaaaagctctcgaggaagcaggtgtgcccgtggatctggtgggtggcacctcgatcggctcattcataggcgcactttatgcggaagaaaggtcagcctcccggaccaagcagcgggcacgcgagtgggccaagtcaatgacgtcagtactggagcctgttctagacctgacctacccggtcaccagcatgtttaccggctccgcgtttaatcgttctatccatcgcgtcttccaggacaaacaaatcgaggacttgtggcttccttatttcaacgtcacaacggatattacagcaagcgctatgagggtgcataaggatgggagcttatggagatatgtgcgcgcgagcatgacacttagtggctacctcccccctctgtgcgatcctaaggacggccatctactcatggatggaggatacataaataacctgccagccgatattgcccgctccatgggagcaaagacagtgatcgcaatcgacgttgggagccaagacgagacagacctgagcacatacggagattcccttagcggatggtggctcctgtggaagagactgaacccatgggcagacaaggtcaaggtcccggatatggccgagatccagagcaggctggcttatgtctcctgcgttcgccagttggaggtagtgaagtcttccagttactgcgaatacctccgtccgcccatcgactgtttcaaaacaatggattttggaaaatttgatcagatatatgacgtcggttatcaatacgggaaggccgttttcggtggctggtcaaggggcaacgtaatcgaaaagatgctaacagatcgacgcagcaccgacctgaatgagtctcgcagagccgacgtgttagccttcccgtcctcaggattcaccgacctcgctgaaatcgttagcaggatcgaaccaccaactagttatgtgtctgacgggtgtgccgatggcgaagagagcgactgcctcacagagtatgaggaggacgctggaccagattgtagcagagatgaaggtgggagcccagagggagctagtccgagtacagcctcagagatggaagaagaaaagagcatcttaaggcagaggcgctgcttaccccaggagcccccaggttcagcgacagatgcctag

SEQ ID NO: 127953 - DNA, 3954 bp, synthetic construct
  misc_feature 1..3954: note = Description of Artificial Sequence: Synthetic coding sequence
  source 1..3954: mol_type = other DNA
atggaggaagagaaagacgactcaccccagctcacaggcattgcagttggcgcacttctggccctggcactggtgggggtcctgatactgtttatgtttaggcgattgcggcaatttaggcaggcccagccaacaccgcagtatcgttttcgaaagagagataaagtgatgttttacggcaggaaaattatgcggaaagttaccactctgcctaatacactggtggaaaatacggcactgccaagacagagggcacgaaaacggactaaagttctttcgttggccaagcgtatcttgcgatttaagaaagagtaccctgccttgcagccaaaggaaccaccaccctcgctgctcgaagctgatctgacagagttcgacgttaagaacagccacctccctagcgaagttctgtacatgctgaagaatgtaagagtactgggacacttcgaaaagcctttattcttggagttgtgtaagcatattgtgtttgttcagctgcaggaaggagaacacgtatttcagccacgggagccagatccaagcatttgtgtggttcaagacggaagacttgaggtgtgtattcaggacacagatgggacagaagtcgtcgtcaaagaagtgctcgccggggatagtgtgcactcactgctcagtattctggacattatcaccgggcatgccgctccttataaaacagtttcagtccgggccgccatccccagcaccatccttagactgcccgccgctgcctttcatggtgtctttgagaaataccccgagacgctggttcgcgtggttcagataattatggtcagactacaaagggtcactttcctggcactgcataactatctggggctgacaaccgaactatttaacgcagagagtcaagccatccccctggtgagtgttgccagtgtcgccgccgggaaagctaagaagcaggtgttctacggcgaggaagagagattgaaaaaacctccccggctgcaggaatcatgcgattccgatcacggcggtggaagacctgctgcagctggccctctcctgaagcggagccattctgtgcctgctccgtcaatccgtaaacagatcttggaagaactcgagaaacctggggcaggagatccagatccaagtgcaccacagggtggaccaggatccgccacgtccgatctcggcatggcgtgcgaccgagctagagtgttcttgcattccgacgaacaccctggctcctccgtggccagcaagagtcgaaagtccgtgatggtcgccgaaatcccgtccaccgtgtcccaacattccgaatcccatacagatgagacattggcatcacgtaagtccgatgcaatattccgagctgctaagaaggatctgctcaccttgatgaaactagaggattcatctttactggacgggcgtgttgccttgctccatgttcccgcaggcacagtggtcagtcggcagggcgatcaggacgcctccattctgttcgtggtgtcaggcctgttacacgtctatcaacgcaagataggcagccaggaagatacctgtcttttccttacccgacccggcgaaatggttgggcagttagcggtactcaccggagagcctttgatctttacagtaaaagccaaccgggactgttcttttctttcaatttccaaggcgcacttttatgaaattatgagaaagcagcccacggtagttcttggagtggctcatacagtggtcaaaaggatgagcagcttcgtccgccagattgatttcgccctggattgggttgaggtggaggccgggcgggccatctataggcagggagacaagtcagactgcacctacataatgttaagcggacggctccgctccgtgataaggaaggacgatggcaagaagaggctcgccggggagtacggaagaggtgatttggttggtgtggtggaaacattgacccaccaagcccgtgccacgactgtccatgccgtgcgagacagcgaactggccaagcttcctgccggtgctctaacctccatcaagaggagataccctcaggtcgtgacccgccttatccacctgctcggcgaaaagattctaggcagtttacagcagggtccagtcaccggtcaccagctgggcctgccaaccgaaggatcaaagtgggatctgggaaatcctgctgtcaatctgtctaccgtagccgtcatgcccgtgtctgaggaggtaccattgacagcttttgccttagagctagaacatgcattaagcgcaattggcccgaccctgctgttgacaagtgacaatattaagaggcgtttaggttcagcagctctcgactccgttcacgagtacaggttgagcagttggctgggtcagcaggaggacacccatcgcatcgtgctgtatcaggtggacgggactctcaccccctggacgcaaaggtgcgttaggcaggccgactgcattctcattgtgggtcttggagatcaggagccaactgtaggcgaactggaaagaatgcttgagagcacagcggtccgtgctcagaagcagttgatactcttacaccgtgaagagggccctgcacctgcccgcacagtggagtggctgaatatgcgcagctggtgctctggccacttgcacctgtgctgccccagaagggtgttcagccggagaagcttacccaaattagtggagatgtacaaacatgtgttccagcgtccaccagaccgccactcggacttctcccgtctggctcgggtgctcacagggaatgcaatcgccttggtgctaggagggggcggtgcccgggggtgcgctcaagtgggtgtgctcaaagcgctcgctgaatgtggcatacctgtagacatggtaggtgggacatccattggggcattcgtgggagctttgtacagtgaggagagaaactactcccaaatgcgaatcagggcaaaacagtgggctgagggcatgacttctctaatgaaggccgccctcgatctgacttaccctataacatctatgttctctggagccggttttaatagctccatcttcagcgtgttcaaggatcagcagatcgaggatctgtggattccatattttgccataacaacagacattaccgctagcgctatgagggtacataccgatggctcgctctggtggtatgtgcgggcaagtatgtctctatccggttatatgccaccactctgcgacccaaaggacgggcatctgttgatggatgggggttacattaacaatctccccgctgatgtcgcaagatctatgggggctaaagtggtgatcgccatcgatgtgggctccagggacgagaccgacctgacaaattacggcgatgccctatcagggtggtggctgctgtggaagaggtggaaccctctcgctacaaaggtcaaggttctgaacatggcagagatccagacccggctggcttacgtgtgctgtgtgcgccagctcgaggtggttaaaagtagcgactactgcgaatatctgcgacctcctattgatagctactcaactcttgacttcgggaagttcaacgaaatctgtgaggtgggctatcaacatggtcgcaccgtcttcgacatctggggccgatctggcgtactggaaaagatgctgagggatcagcagggtcctagcaagaaacctgcttccgcggtcctgacatgtccaaatgctagttttacagatctggcggagattgtgtcaaggatagaaccagccaaaccggcaatggtagatgatgagagcgattaccagaccgaatacgaggaagagctgctcgacgtacccagagatgcttatgccgattttcagtccacctctgcccagcaaggcagcgatctcgaggacgaaagcagtctgagacatcggcatcccagcctggcattcccgaagctctccgagggatccagcgatcaggatggatag

SEQ ID NO: 127954 - DNA, 2178 bp, synthetic construct
  misc_feature 1..2178: note = Description of Artificial Sequence: Synthetic coding sequence
  source 1..2178: mol_type = other DNA
atggtcagattgcaacgcgttaccttccttgccctccataactatttgggtttaaccaccgagcttttcaatgctgaatcacaagccatcccactcgtctccgtggcatcagttgcagccggaaaagctaagaagcaggtgttttacggcgaggaagaaaggcttaaaaagccaccgagactgcaggaatcatgcgatagcgccgaccacggcggaggtaggccagccgcagctggccctctccttaaacgctcccatagtgtccccgccccctccattcggaagcagatcctggaagaactagagaagcccggcgctggcgacccggacccctccgcacctcagggccatcaattgggacttccaaccgaaggctccaaatgggatcttggtaaccccgcagtgaatttatctactgtggctgtgatgccagtgagcgaagaagttcctctgaccgccttcgctctcgaactcgagcacgctctgagcgccatcggccctaccctcctgttaacatctgataacataaaacggcgactgggatctgcggcactcgacagtgtccatgagtatagattgtcctcatggttggggcagcaagaagacacacatcgaatcgtcctgtatcaggtggacggcaccctaacgccgtggactcagaggtgtgtcagacaggcagactgcatcctgatcgtcggcctgggcgaccaggagcccacggtgggagaacttgagcggatgttggagtctactgccgttagagcccagaaacagctgatcctgctgcaccgcgaggagggcccagcgcccgctaggactgtggaatggttaaacatgcggagttggtgcagcgggcacctgcacttatgctgcccccgacgcgtgtttagtcgacgcagtttaccaaagctggtggagatgtacaagcacgtctttcaacggcccccagacagacatagtgattttagtaggctggcacgggtgctcactgggaacgccatcgcactggtgttggggggggggggtgccagagggtgcgctcaagtgggagtactcaaggccctagccgaatgtggcattcctgtggacatggtgggcggaacgtccataggggcatttgttggggccctgtactctgaagaacgcaactattcccagatgagaatccgggccaagcaatgggcagaaggcatgacaagcttgatgaaagctgcattggacctcacgtacccgattacaagcatgttttccggggcggggttcaacagctccatcttcagcgtgtttaaggatcagcagatagaggatctgtggattccctactttgctattacaactgatatcaccgcaagtgccatgagggtgcacaccgatgggtcactctggtggtatgtgagggcatcgatgtctctcagcgggtacatgccacctctgtgcgaccctaaagacggtcacctccttatggatggtggctacatcaataatctgcctgcagatgtggcacgctccatgggcgcaaaggtggtgatcgctatcgatgttggatcacgcgatgaaacagacttaacgaactatggtgacgccttgtccgggtggtggctcctgtggaaacgatggaatccattggctaccaaggtgaaagttctgaatatggccgaaatacagactaggttggcatatgtttgctgtgtgcgccagctggaagtcgtgaagagttctgattattgtgagtatctaagacctccgattgatagctactcaaccctggactttgggaaattcaacgaaatctgcgaggtggggtaccaacatggccggaccgtgtttgatatttgggggcgctccggcgtgctagagaaaatgctccgcgatcagcaaggccccagcaagaagccagcttccgcagtgctcacgtgtcccaatgcctctttcacagatctggccgagatcgtgtctcgaattgagcccgccaaaccagcaatggtagacgacgaatcagattaccagactgagtatgaagaggaactcctcgatgtccctcgcgacgcatatgccgacttccagtccacctcggcacagcagggtagcgatcttgaggatgaaagctccctgcgacacaggcatccttctctggccttccctaagctctccgaagggtcttccgaccaggacgggtag

SEQ ID NO: 127955 - DNA, 1377 bp, synthetic construct
  misc_feature 1..1377: note = Description of Artificial Sequence: Synthetic coding sequence
  source 1..1377: mol_type = other DNA
atggaggaggagaaagatgactccccacaagccgacttttgcttaggtactgctctccacagttggggcttatggtttaccgaggaaggaagccccagcactatgctaaccggaatcgccgtcggcgcgcttctagccctggctctagtcggggtactgattttatttatgttccgtagactgcgccagttcaggcaggcccagccaactccacagtatcggttcaggaaaagagacaaagtcatgttttatgggaggaaaatcatgaggaaggtgacaacactgcctaatacactagtcgagaacaccgcgctgcctagacagcgagccagaaaacggactaaagtgctgagcctggccaaaagaatcctccggtttaagaaggagtaccctgccttgcagccaaaggagccccccccctccttactcgaggccgacctaaccgagttcgacgtcaaaaacagccacttaccgagtgaggtcctctatatgctgaagaatgtcagagtgttgggccactttgaaaaaccactgttcttggagttgtgtaagcatattgtgtttgtgcagcttcaggagggtgaacacgtgttccaacctcgcgagcctgatccgagcatctgcgtcgtccaggatggcagacttgaggtctgcatccaggacacagacggcacagaggtggtagtgaaagaagtgctcgccggcgacagtgttcactccctgttatccatcctcgacatcattactggccatgctgctccctataagacagtgagcgtgcgggctgccataccttctactatactaaggctgcctgctgccgccttccacggagtgtttgagaagtaccccgaaaccctcgtccgggtcgtgcagataattatggtacggcttcagcgggtgactttcctggcccttcataattatttggggttaaccacggaactcttcaacgccgaatcccaggctatccccttggtctcagtggcgtctgtcgctgccgggaaggccaagaagcaagtgttctatggcgaggaggaaaggttgaagaaacccccccgcctgcaggagagctgtgactccgatcacggggggggccgccctgccgccgccggaccccttctcaagcgctcccactctgtccccgcccccagcatcaggaagcagattctggaggagctggagaaacctggagcaggtgacccagacccctctgcaccacaggcccgcgtactatgtctgttgccgcaatgcctcggtggccttccaccaacagatacctccgtttactcctccgccagttccgattgctgcgggtgcagcatgccagtgctctgcatcatgggacacaagcctcacgtgactgtggacacatag

SEQ ID NO: 127956 - DNA, 3765 bp, synthetic construct
  misc_feature 1..3765: note = Description of Artificial Sequence: Synthetic coding sequence
  source 1..3765: mol_type = other DNA
atggaggaagaaaaagacgacagcccccagcttaccggcattgctgtgggggctttgctggctcttgctcttgtaggcgttctgattctgttcatgtttaggagacttcgccagttcaggcaggctcagcctactcctcagtatagattccgcaagcgcgacaaggtgatgttttatggtcggaagatcatgcgtaaggtcacaaccttgcctaatacacttgtggaaaataccgcattaccccgacagcgtgctcgtaaacgtacgaaagtcttatccttagcaaaaaggattctgcgttttaagaaggagtaccctgcgctccagccgaaggaaccgccaccatctctgctagaggcggacctcactgagttcgacgtaaagaactcacatttgccaagcgaagtgctttatatgctgaagaacgtgagggttctgggccattttgagaaacccctgtttctggaactgtgtaaacacattgtgtttgtacagctccaggaaggggagcacgtctttcaaccacgggaaccagacccaagtatctgtgttgtccaagacggtcgcttggaggtgtgtatacaggacacagatgggacagaagtggtcgtgaaggaggtgttagccggggactcggtgcactccctgctttcaatactggatattatcactggacacgccgccccatataagacagtgagtgtcagggccgctatcccctccactattctgcgcctaccggccgcggcgtttcatggtgtgtttgaaaagtacccagaaactttagtgcgcgttgtccagataatcatggtcaggctgcagcgggttacttttctcgctttgcacaattacctcggcctgaccacagagctatttaacgcagagagtcaggccatacccctggtctccgtagctagcgttgcagccgggaaagctaagaagcaagtgttctacggagaggaggagcgcctaaagaaacctcccaggttgcaggaaagctgtgattctgatcacggtggtggtaggccggccgccgccggtcctctgttgaaacgatcccattctgttcccgcaccttccatccggaagcagatcttggaagaactggagaaacccggagccggtgaccctgatccctctgcgcctcaagggggccccggttctgcgacttccgatctgggaatggcctgcgacagagcacgcgtgttcttacactcagatgaacacccaggttcgtccgttgcctcgaaatctagaaaaagtgtgatggtggctgagatcccatctactgtgtctcagcactctgaaagccataccgacgagaccctggcgagccgaaaaagcgacgcaatttttagagcagcaaagaaagacttgcttacactaatgaaactggaggacagttccctcctggatgggcgggttgcgctactgcacgtcccggccggaactgtagtcagccgccagggagaccaggacgccagcatcttatttgtcgtgtccggtttgctccacgtgtaccagcgcaaaattggcagtcaagaggacacttgcttgttcctgacaagaccaggtgagatggtgggacagttggcggtgttgacaggcgagcccctgatattcaccgtgaaagcaaaccgggattgtagcttcttaagcattagtaaagcccacttctacgaaattatgcgcaagcagccaacagtggtgctaggagtagcccacaccgtcgtgaagagaatgtcatcgttcgtacgtcagatcgactttgccttggattgggtggaagtggaggctggtagggccatctacaggcagggcgacaaatccgattgtacttatatcatgttgtcgggtcggctcaggtctgtgatccggaaagatgatggaaaaaagaggttggcgggagagtacgggcgcggggatctggttggagtggtggaaactttaacgcatcaagcaagagccaccaccgtgcacgctgtgcgcgacagtgagcttgcaaagctgcctgctggagcacttacttcaattaagcgtcgatacccgcaggttgttaccagacttatccatctactgggagaaaagattcttggttcgctgcagcagggccctgtgactggccaccagctgggactgcctaccgagggcagcaagtgggatctggggaatccagcagtgaatctgtccacagttgcggttatgcctgtctcagaagaagtccccctcacagcatttgccctggagctggagcatgcgctgtccgccatcggacccaccctgctgcttacatccgacaatattaagcgcagactgggaagcgccgccttggactccgtccatgagtataggctgtcctcatggctgggccaacaggaggacacacacaggatcgttctgtaccaggtcgatgggactctcaccccttggacacagcgttgcgtacgacaggctgactgcatcctgatagtgggactgggcgaccaagaaccaactgtgggagagctggaaaggatgctagagtccaccgctgtgagggcccagaagcagcttatcctgctgcaccgggaagaaggccctgctcctgcacgcactgttgaatggcttaacatgcgttcgtggtgctcaggtcatctgcacctgtgctgcccccgcagggtatttagccgaagaagcctgcctaagctggtggaaatgtataaacatgtctttcagaggccaccagaccggcactcggacttcagccgactggcaagagtactgactggtaatgccattgccttggtgctgggagggggaggagctagaggctgtgcgcaagtgggcgtcctgaaggctctcgccgagtgcggcatcccagtggacatggtcggtggaacctcaataggcgcttttgtgggggctctgtactctgaagagagaaattatagccagatgcgtattcgggctaagcagtgggcagaaggcatgacatcattaatgaaggccgctctggatcttacctatcccattacctcgatgttctccggagcggggttcaactccagcatcttctcggtcttcaaagatcagcagatcgaggacctatggattccatattttgctatcactacagacattacagcgagtgcaatgcgcgtccacacagacggaagcttgtggtggtacgttcgggcctcaatgagcctgtccgggtacatgccccccctgtgtgacccgaaggacgggcatctgctcatggatggaggttacataaacaacctcccggcagatgtggctagatcgatgggagccaaagttgtgatcgctattgacgtcggctcccgcgacgagactgatcttaccaattacggggatgcgctttcaggatggtggctgttatggaagaggtggaaccccctggcaacaaaggtcaaggtgcttaacatggcagaaattcagacaaggctcgcatatgtctgctgcgtgagacagctcgaggtagtaaagagttccgactattgtgaatacctgcggcctcccattgacagctattctaccctagactttggaaagtttaacgaaatttgcgtgccagacgagagtgattatcaaacggaatatgaagaggaacttttggacgtcccgcgggacgcatatgccgacttccaatcgaccagcgctcagcagggatccgatcttgaggacgagtcctctttaagacacagacacccctcacttgcctttccaaagttgagtgaggggagctcggatcaggacgggtag

SEQ ID NO: 127957 - DNA, 2772 bp, synthetic construct
  misc_feature 1..2772: note = Description of Artificial Sequence: Synthetic coding sequence
  source 1..2772: mol_type = other DNA
atggcttgcgacagagccagggttttcctgcactcggacgagcatcctggtagcagtgttgccagcaaaagtaggaagtctgtgatggtcgcggagatcccaagcactgtgagccagcacagtgaatctcacactgatgagactctcgccagccggaagtcagatgcaatctttcgagctgctaagaaagatctgctgacactgatgaaactggaggattcatcgctgttggatggaagggtcgccctgttgcatgtcccagcgggtaccgtagtgagtcgccaaggcgaccaagacgccagtatactattcgtcgttagcgggcttctgcacgtgtatcaacgcaaaataggaagtcaggaggatacatgcctgttcctaactcggccaggggagatggttggccagctggctgtcctgactggcgaacccctgatcttcacggtgaaagccaatagggactgtagtttcctgtcaatctccaaagctcacttctacgagatcatgcggaagcagcccactgtggtcctcggcgtggcacatacagtcgtgaaacgcatgagttcatttgtaaggcagattgattttgctttggactgggtggaggtggaggcagggcgtgccatttaccgccagggtgataaatctgattgcacctacattatgcttagtgggcgacttcgaagcgttatcagaaaggacgacggcaagaagcgactagccggagagtatggccgaggagatctcgtcggcgtcgtggagacgctaacacaccaagcgcgtgccaccacagtccatgctgtgagagatagcgagttagcaaagctgccagccggtgcattgacctctatcaaacggcgctatcctcaggtcgtcacaaggctgattcatctgctcggtgagaaaattcttggttcactccagcagggcccagttacaggccatcagctgggcttgcccacggaaggctcaaagtgggacctaggtaatcctgctgtaaatctgtctactgttgccgtaatgcccgtgtctgaggaggtgcccttaaccgcctttgccttggagctggaacacgccctctccgccatcggccctacgctactgcttactagcgataatatcaaacgccggctgggttcagccgcgcttgacagcgtccacgaataccggctgtcttcctggctcgggcagcaggaagacactcacagaattgtcctctatcaggtggacggcacgctgactccatggacccagcgatgcgtgcgccaggccgactgtatcctgatcgtggggcttggagatcaggaacctacagtgggtgagctcgagcggatgctcgagtctacggctgtaagggcacagaaacagttgattttgctgcatagagaagagggaccagcccccgcccgtactgtggagtggctgaatatgagatcatggtgttcaggccacctgcacctttgttgtccccgacgggtcttcagtagacgaagcctgccaaagctggtggagatgtacaaacacgttttccagaggccacccgaccgacacagtgattttagccgcctggctagagtattgacgggaaatgccatcgccctggtgttaggaggaggcggtgctcgggggtgtgctcaggttggggtcctaaaggccctggccgagtgcggcatccccgtggatatggtcggtggcacgagcattggtgcatttgtgggcgctctttacagcgaggagcgcaactattcccaaatgcggatacgcgcaaagcagtgggccgaaggcatgacatcactcatgaaggcggccttagacctcacctatccaattacgtctatgttttccggggctggcttcaactcatcaatcttttctgtttttaaagaccagcagatagaagacctgtggatcccgtactttgctatcacaacagatattaccgccagtgcaatgcgggtgcatactgacggctccttgtggtggtacgtgagagcctccatgagcctctcaggttacatgcctccactctgtgaccctaaggacggccatctgctgatggacggcggctacattaacaatcttccggccgacgtggcccgctccatgggagccaaggtggtaattgcaatagatgtgggtagcagagacgagacagatctcaccaactacggcgatgccttatccggctggtggctcctgtggaagcgctggaacccccttgctactaaagtgaaggtgttgaacatggcggagattcagaccaggcttgcatacgtctgttgcgtgcgccagttagaagttgtgaaaagctctgattactgcgagtacttgagaccacccatcgactcgtactccaccctcgattttggcaaattcaatgagatttgtgaagtaggctatcaacatggccgcacggtgtttgacatctgggggcggagcggggtgctggaaaagatgctgcgtgaccagcagggacctagcaagaagcctgcctccgccgtcctgacttgtccgaacgcatcttttacggaccttgccgaaatcgtgagcagaattgagcctgctaagcctgccatggttgatgatgaaagtgactatcagacagagtatgaggaggagctgttggacgtgccgcgggacgcttacgcagatttccaaagcacatccgcacagcagggcagcgacttggaagatgagtcttccctgagacaccgccatccttccctcgcatttcctaagctgagcgaggggtcaagcgaccaggatgggtag

SEQ ID NO: 127958 - DNA, 4029 bp, synthetic construct
  misc_feature 1..4029: note = Description of Artificial Sequence: Synthetic coding sequence
  source 1..4029: mol_type = other DNA
atggaagaggagaaggacgactctcctcaggcggacttttgtctgggcacagcactgcactcctgggggttgtggtttaccgaggagggatccccgtctacaatgctgacaggcatagcagtaggggccctgttagcattagcactggtcggggtgctcattctgttcatgttccgcagactacgtcagtttcggcaggcgcagcccactcctcaatatcgcttcagaaagcgagataaggtgatgttttacggtcgaaagattatgcgaaaagttaccacactccctaacaccttggtcgagaacacagctctgcctcgtcagcgcgccaggaaacgcacaaaagttttaagcctggctaagaggatccttcggttcaagaaagagtatcctgctttgcagcccaaggagcctccaccaagcctgcttgaggcagatttaacagagttcgatgtgaagaactctcacttgccctccgaggtgctgtacatgttaaagaacgttcgcgtgctggggcacttcgaaaagcctttgtttttagaactttgcaagcacatcgtgttcgtccaacttcaagagggggagcatgtgttccaaccacgcgagcccgatccgtctatctgcgtagtgcaggatggaagattagaagtctgcattcaagacactgatggcaccgaggttgtcgttaaggaagtactggccggcgatagcgtccactctttgttgtcaatcctcgatattatcactgggcacgcggctccgtacaaaacggtgtcagtcagagcggctatcccttccactatcctcaggttacctgcagccgccttccatggggtttttgagaaatatcctgagacactcgtccgagtggtgcagatcattatggtgcgcttgcaacgagtcacgtttctggcactacacaactaccttggactcacaactgaactgtttaacgccgaaagccaggcaatccctctggtgtcggtagcatccgtggctgccggcaaggccaaaaagcaggtcttttatggagaggaagaaagactcaagaagccccctagactccaagagtcttgcgattccgaccacggtggagggcggccagcagccgccggacccctgcttaagaggtcccatagtgtgcctgctccatctattcggaaacagatcctggaagaactggaaaagcccggtgcaggcgaccctgacccatccgcccctcagggcggtccaggatcagctacctcagatctggggatggcgtgtgacagagctcgggtgtttctgcatagcgacgagcaccctggctccagtgtggcttcgaagtcccggaagagcgtcatggttgccgagatcccctctaccgtatcccaacactcagagagccatacagatgaaactctggctagccggaaatccgacgctatattcagagccgctaagaaagatctgctgaccctgatgaagttagaggactcctccttgttagacggtcgcgttgcccttctccacgtgcctgccggtaccgtagtctcaaggcagggagatcaagatgcaagtattctttttgtggtctccggcttgctgcacgtctatcagcgtaagattggctcccaagaggacacctgtctgttccttactcgacctggcgagatggttggtcagttagccgtcctgacaggggaacccttgattttcactgtgaaggctaatcgggattgctcttttttgtctataagtaaagcccacttctatgaaattatgcggaagcagcctacagtagttcttggtgtggcacatactgtggtgaagagaatgtcctccttcgtgcggcaaatcgacttcgcactcgattgggtggaagtggaggccggcagggccatataccgccagggggataagtcagattgtacatacatcatgctgtccggccgcttgcggagtgtgatcagaaaggacgacggcaagaaacggttagccggagagtacgggaggggcgacctggtgggcgtggtggaaacccttacccaccaggcgagagctactaccgtgcacgccgtgcgggactctgagctggccaaactcccggcgggggccctcacatcaataaaacggaggtatccgcaggtggtaactagattgatacaccttttaggagagaaaattctcgggagcctgcaacaggggcccgtgaccggacaccagctgggccttcccaccgagggcagtaaatgggatctgggcaaccccgccgttaacctgtccaccgtggctgtgatgcctgtcagcgaggaagtccccttaactgcctttgccctcgagctggaacacgcactgtctgctattggtcccaccctgcttctgacgagcgataatattaagaggcgactggggagtgcagccctggactccgtacacgaatatagactgagctcttggcttggccagcaggaggacacccaccggatcgttctctaccaagtggatggaacactgacaccctggacccagcggtgcgtgcgacaggccgattgcattctaatcgtggggctcggagatcaggagcctactgttggcgagctcgagagaatgcttgaaagtacagccgtacgtgctcagaaacagctaattcttctgcatagagaggaaggacccgccccggcccgaactgtcgagtggctgaacatgagaagttggtgctctggccatctccacctttgctgccctagaagagtgttcagccggcgctctctgcctaaattagtagagatgtacaaacatgtttttcagaggcctccagataggcactctgatttttcccgcttagcccgggtactgactggcaacgcgattgccctggtgttaggcggagggggggcaaggggttgtgcccaggtcggcgtgttgaaggccttggctgagtgtgggattcctgttgacatggtgggagggacctctatcggcgcgtttgttggcgctttgtactcggaagagaggaactatagtcagatgaggatcagggctaagcagtgggctgagggaatgacatcattaatgaaggctgcgttagatctgacctatccaatcacgtccatgtttagcggggccgggttcaactctagcatcttctccgtgttcaaagatcaacagattgaggacttgtggattccgtatttcgcaatcaccacagatatcactgctagcgccatgagagtacacacagacggctcactctggtggtacgtgagagcgtctatgagcctttctggttatatgcctcctctgtgcgacccaaaagatggtcatctgctgatggatgggggatacatcaacaacctgcctgccgacgtggctcggagcatgggcgccaaagtggtgatagccatagacgtgggtagcagagatgaaaccgatctaactaattacggggacgcattatccggatggtggctcctttggaaacgatggaaccccttggccactaaagttaaggtccttaatatggccgaaattcagacgaggctagcctatgtctgctgtgtccggcagctggaggttgtgaagtcaagcgactactgcgaatacctccggcctccgatcgattcatattctaccttggacttcgggaaattcaacgaaatttgcgaggtcggctaccagcatggcaggaccgtgtttgatatctggggacgaagtggagttcttgaaaagatgctgagagatcagcagggtccctccaaaaagccagcctccgccgtgttgacctgtccaaacgccagcttcaccgacctcgctgagatcgtcagcaggattgaacccgctaaacccgctatggttgacgatgagagcgattatcagacggaatacgaagaagagctcctggacgtccctagagatgcttatgctgactttcagagtacttccgcccagcagggcagtgatctggaagacgagagctctttacgccacagacatccctcccttgccttcccaaagctttccgaagggtcctctgaccaggatggttag

SEQ ID NO: 127959 - DNA, 3846 bp, synthetic construct
  misc_feature 1..3846: note = Description of Artificial Sequence: Synthetic coding sequence
  source 1..3846: mol_type = other DNA
atgctcacgggcattgccgtgggcgccctcttagcactggcgctggtgggcgtgctcattctgttcatgttcaggcgactgcgccagttccgccaagcacagccaaccccccaatatcgattcaggaaacgcgacaaggtgatgttctatggtaggaagattatgagaaaagtgactactttacccaacacactcgtggaaaacaccgcgctgccaagacaaagagcacggaagagaactaaagtgctctccctggcaaaacgtattttacgcttcaagaaagaatatccggcactgcagcccaaggaacctcctcctagcctcctcgaagccgacctaaccgaatttgacgtgaaaaattctcatctacccagcgaggtactctacatgctcaagaatgttagagtgctaggacatttcgagaaacctctctttctcgagctttgtaaacatattgtttttgtccagctccaggagggagaacatgtgtttcagcccagagagcctgacccttctatttgtgtggtgcaggacggcaggctggaagtctgtatccaggatactgatggtaccgaggtggtggtcaaggaggtcctggcaggcgattcggttcattctttgctttctattttggatattattacagggcacgcagccccctataagacagtttctgtgcgcgcagcaatcccaagcacaatactgaggctgccagcggctgcgttccatggggtgttcgagaagtatcctgagaccctggtgagagtggtgcagatcatcatggtgaggcttcagcgggtgacctttctcgccctccataactaccttgggctcactacggagcttttcaacgctgaatcccaagccatccctctggtatccgttgcgagtgtagccgccggaaaggccaaaaaacaggttttttatggtgaagaggagcggcttaaaaaaccaccgcggctccaggaaagctgcgatagcgaccatggaggaggccgaccggctgcagcaggccccctactcaagcgcagtcactccgtcccagcgccatctattagaaaacagatactggaggagctcgaaaagccaggggccggcgaccccgatcccagcgctcctcaaggcggacccgggagcgccaccagtgatttgggcatggcctgtgatagagcaagggtgttcttacattccgacgaacacccaggctcaagtgttgctagtaagtcacgtaaaagtgtcatggttgccgaaattcctagtaccgtgtcgcagcacagcgagagccatacagacgagaccttggccagccggaaaagcgatgctatttttcgtgccgctaagaaagacctattgacactgatgaagctggaggacagttcacttcttgacgggcgagtcgctttattgcacgtccctgccggcacagtggtttcccggcagggagaccaggacgcatccatattgttcgtcgtgtctggtctgctgcatgtgtaccagagaaagatcgggtcccaggaggacacttgcctgttcctgactagaccaggtgagatggttggtcagctggccgtgctgaccggtgagccactaatttttacagtgaaggcaaaccgggactgtagtttcttgtcgatctccaaagcacatttttacgaaatcatgagaaagcagccaaccgtggtcctcggcgtcgcacataccgtagtgaaacgaatgtcctcctttgtgaggcagattgattttgcattagactgggtcgaggtggaagcaggccgtgctatctacaggcaaggagacaagtccgactgtacatatattatgctgagcggccggctgcgatccgttatccggaaggatgatggcaagaaacgcctggcaggagaatatgggcgcggcgacctcgtcggggttgtggaaactttaacacatcaagccagggctactaccgtgcacgctgtccgcgattcagagcttgcgaaacttcctgctggagccctgacatcgattaaacgccgctaccctcaggtggtaactagactcattcatctgctgggcgagaagatcctaggctccctacagcagggcccagtgacgggtcaccagttgggcttacccacagaagggagcaaatgggacctcggaaaccctgctgtcaacttgtctacagtggccgtcatgccagtttcagaggaggtgccacttaccgcattcgctcttgagctcgagcacgcccttagtgctatcggaccaaccctgctgctcacctcagacaacatcaagaggcgcttaggatcagcagccctggactccgttcatgaatatcgcttgtccagctggctcggtcagcaagaggacactcaccggatcgtgctctatcaagtggatggaaccctgaccccgtggactcagcgctgtgtgaggcaggcagactgtatactaattgttggcctaggagaccaggagcccactgttggggagttggagagaatgctcgaaagcacagccgtgcgcgcccagaagcaactaattctgctgcacagggaggaaggaccggctcccgctcgaacagtcgagtggctcaacatgagatcatggtgctctgggcacctccacctctgctgtccaaggcgggtcttctcccgcagaagccttcctaaacttgtggagatgtacaagcacgtgttccagcgtcccccggatcggcattccgatttctccaggctggctcgcgttctgaccggcaatgctattgccctggtgctcgggggcggtggagcacgcgggtgtgcacaggtgggtgtgctgaaagcactggcagagtgtggcatcccggttgatatggtgggtggaacatccattggggcctttgtgggagctctgtactctgaagagcggaactatagccagatgcgtatccgtgctaagcagtgggctgaaggcatgactagcttgatgaaggcagctcttgatctcacatacccaatcacgagtatgttcagtggcgccggatttaatagctccattttttccgtgttcaaagatcagcaaattgaggacttgtggataccatactttgctataaccactgatatcacagcttctgccatgagagtgcataccgacggcagcttgtggtggtacgttcgggcctcgatgtctcttagcggctatatgccgcccttatgcgatccaaaggatgggcatctactcatggacgggggctacattaataaccttcctgccgatgtggccagatctatgggagccaaggttgtcatcgccatcgacgttgggagtcgcgacgagactgatctcactaattatggggatgccctgtccggctggtggctgctgtggaaaagatggaatccactcgccaccaaagtgaaagttttaaacatggccgaaattcaaacaaggctcgcttatgtgtgctgtgtgcggcagctggaagtcgtcaaatccagcgattattgcgaatacttgagacccccaattgatagctacagcacactagacttcggcaaattcaatgagatctgcgaagtggggtatcaacacggccgaaccgtctttgatatttggggtcggagtggtgttttagaaaaaatgctcagggaccagcaaggcccctccaagaaaccagccagcgcggtgctgacctgtcccaacgcttctttcacagatctggccgagattgtgtctagaattgaacccgccaagccagcaatggtggacgatgaatctgactaccagaccgaatatgaggaagagctgcttgacgtgccaagggacgcatacgccgatttccagtccacaagtgcccaacaaggctctgatctctag

SEQ ID NO: 127960 - DNA, 2349 bp, synthetic construct
  misc_feature 1..2349: note = Description of Artificial Sequence: Synthetic coding sequence
  source 1..2349: mol_type = other DNA
atgagcatcaatctcaccgttgatatttatatttatctactctctaatgctcggagtgtttgtgggaaacagcggtctaagcagttatactttctgttcagtcctaaacactattggagaatttctcacataagcctacagaggggtttccacacaaacataatccgatgcaagtggacgaagtccgaggcccatagttgctcgaaacactgctactctcccagcaaccacggtctccacatcggcattctgaaactgagcacttccgctcctaagggcctaaccaaagtgaacatatgtatgagtagaatcaaatctacactaaatagcgttagcaaggccgtttttggcaaccaaaatgaaatgatttcgaggctggcgcagtttaaaccctcgagtcagatattgcggaaagtgagtgattctgggtggctaaaacaaaagaatatcaagcaggcaataaagagcctcaaaaaatatagtgacaaaagcgcagagaagagtcccttccccgaggaaaaatcccacatcattgacaaagaagaggacatcggtaaacgctctctgtttcactacacatcctcgataacaactaaatttggtgactctttctactttctcagcaaccacatcaatagttactttaagcgaaaagagaagatgagccaacagaaggaaaatgaacactttcgcgacaaatcagaactggaagataagaaggtcgaagaagggaaactcagatctccagatcctggtatcttagcctataaacccgggagtgagtctgtgcataccgtggacaaaccaacaagcccttcagccatcccagacgtactgcaggtgtccaccaaacagtctatcgcgaactttctgagccgacccacggaaggggtgcaggctctggttggtggttatatcggcggactggtacctaagctcaaatatgattctaaaagccagtcagaggagcaggaggaacctgcaaagaccgaccaggccgtgtctaaagaccgtaatgctgaggagaagaagagactatcattgcagagggaaaagatcatagcccgcgtctcaatcgataacaggactcgggcacttgtgcaagccctcagacgaactactgaccctaagctctgcataacccgcgtggaggagcttacctttcatctcttggagtttcccgagggaaagggcgtggctgtgaaggagcgcattatcccatacctcctcaggcttagacagattaaggatgagaccttgcaggccgcagtgagagagattctcgcgctgattgggtacgtcgatccagtgaaaggtcggggcataaggatcctatctatcgacgggggcgggaccagaggggtggttgccctgcaaactcttagaaaactggtggaactgacgcagaagccagttcatcaactgttcgactacatctgtggggtgtcgaccggagctattttagcattcatgctgggattgttccacatgccactcgatgaatgcgaagagctgtatcggaaactcggaagcgacgtcttctcacagaacgtcatagttggtacggtaaaaatgtcttggagccatgccttctatgattcacaaacgtgggagaacatcttgaaagatcgtatgggatctgctctgatgatcgagaccgccaggaatccaacatgtcccaaagtggccgccgtgtcaaccatcgtcaataggggcattacccccaaagccttcgtcttcaggaactatggtcactttcctggaataaacagccactatttgggggggtgccagtacaaaatgtggcaggcaattagagcaagtagtgccgcacccggctacttcgctgagtacgcactcggaaacgacctgcaccaagatggcggcctcctcctcaacaatccatccgcccttgccatgcatgagtgtaagtgtctttggccggacgtgcctctggagtgcatagtgtcactcggcactggccggtatgaaagtgacgtaagaaatactgtcacatatactagtctgaaaaccaagctgagtaatgtcatcaattccgcgaccgataccgaggaagttcacataatgctggacggcctccttcctccagacacctacttccggtttaatccagtaatgtgcgagaatatccccctagacgagagtcgaaacgaaaagctcgaccagctgcagctggagggtcttaaatacattgaaaggaacgagcagaaaatgaaaaaagttgccaaaatcctgtcccaggaaaaaacgactctgcagaagattaatgactggataaagcttaagacggatatgtatgagggcttgccgttcttcagtaaactctag

SEQ ID NO: 127961 - DNA, 2163 bp, synthetic construct
  misc_feature 1..2163: note = Description of Artificial Sequence: Synthetic coding sequence
  source 1..2163: mol_type = other DNA
atgtcgatcaacctaaccgtagacatatacatttacctgctgtcaaacgcccggagcgtgtgcggtaagcagaggtctaagcaactatatttcctgttttcaccaaagcattattggagaatttcccatatcagtctgcaacggggcttccacacaaatatcatacggtgtaagtggacaaagtctgaggcccatagctgtagcaagcattgctactccccttcgaaccatgggctccacattggtattctgaaactgtccacttcagcccccaaaggccttacaaaggtgaatatctgcatgagccggatcaagagcactctgaacagcgtgtcgaaagcagtgttcggaaaccagaatgagatgatttcaagattagcccagtttaagccttcgtcgcagattttaagaaaagtctccgattctggttggttaaaacagaagaatatcaaacaagccatcaagagcctgaagaaatacagcgataaaagtgccgagaagtcccccttccctgaggagaaatcccatattatcgacaaagaggaggacataggtaagagaagcctttttcactacacttcctccataaccacaaaatttggagacagcttctattttctcagcaaccacatcaattcctacttcaagcgcaaggaaaaaatgtcacaacagaaggagaacgagcactttagagataagagcgagctggaggacaaaaaagtcgaagaaggtaagctgcgcagccctgaccccgggattctggcctataagcctggttcagagagcgtgcacaccgtcgataagcccacgtcaccctccgccattcccgacgtgcttcaggtgtctacaaaacagtccattgcgaacttccttagccgacctactgagggtgtgcaggctctcgtcggtggttacataggcgggctcgtgccgaagttaaagtatgactctaaaagccaatctgaagaacaggaagaacccgctaagaccgatcaagcggtctcgaaggaccgcaacgcggaagagaaaaaacgccttagcttacagcgggagaaaattatcgctcgcgtgtctattgacaatcgaacacgagcgttagtacaggcccttaggagaaccactgatcctaaactgtgtattacgcgcgtggaagagttgactttccatcttcttgagttccctgagggcaaaggtgtagcagtaaaggagcggattatcccctacttgctcagactccggcaaataaaggatgagacccttcaggccgccgtaagggaaattttggcactcataggctacgtggatcccgtcaaagggcgcggcattcggattctcagcatcgatggcggcggcacccggggtgttgtggctttgcagacgctacgcaaactggtcgaactgacccagaaacccgtccatcagctcttcgattacatctgtggtgtgagtacaggggccattctggcgtttatgctcggcttattccatatgccactggacgagtgcgaagaactgtatagaaaactggggtccgacgttttcagccagaatgtgattgtaggcacagtcaagatgagttggtcccatgccttttacgatagccagacatgggaaaacatcctcaaagatcgaatggggtctgctcttatgatcgagactgcgcgtaatcctacttgccccaaggttcggaaggacggagggctgctgctcaacaatccgtccgcgctggcaatgcacgagtgtaagtgcctgtggcccgacgtgcccctagagtgcatcgtttcattgggcactggtagatacgaaagcgacgttcggaacacggtaacatacacttctctgaaaacaaaactgtcaaacgttatcaattctgccacagataccgaagaagttcacattatgctcgacgggctgctgccccctgatacttactttcgtttcaaccctgtgatgtgcgaaaatattcctctggatgagtctagaaacgagaagttagatcagctgcaactggagggactcaaatatatcgaacgaaacgaacagaaaatgaaaaaagtggctaaaatcctgtcccaggagaagacgaccctgcagaagataaatgactggattaagctaaaaacagacatgtatgaaggactgcccttctttagtaagctatag

SEQ ID NO: 127962 - DNA, 168 bp, synthetic construct
  misc_feature 1..168: note = Description of Artificial Sequence: Synthetic coding sequence
  source 1..168: mol_type = other DNA
atgagcattaatctgaccgtcgatatctacatctacctgctgagcaacgcccggtctgtctgtgggaagcaacggtcaaaacagctatactttctgttctctccgaaacattattggagaatttcccatataagtctccagcggggcttccacacgaacataatctag

SEQ ID NO: 127963 - DNA, 2349 bp, synthetic construct
  misc_feature 1..2349: note = Description of Artificial Sequence: Synthetic coding sequence
  source 1..2349: mol_type = other DNA
atgtccattaacctaaccgttgatatctacatctatttacttagtaacgcccggagcgtgtgcggtaagcagaggtctaaacagctttattttctattctcccctaagcactactggcgcattagccacatctcactccaacgaggcttccacacaaacattatcaggtgcaagtggactaaatcagaagcgcactcatgctcaaagcactgttactctcctagcaatcatggacttcacatcggaatccttaagctgagtacttcggcacccaagggattgaccaaggttaatatctgtatgagtagaatcaaaagcaccttaaattccgtgtcaaaagcagtcttcggaaaccagaacgaaatgatcagcagactggctcaattcaagccatcttcacagattctgagaaaagtgagtgacagtggttggcttaaacaaaagaatatcaagcaggccattaagtctttgaaaaagtatagtgataaatctgcagaaaagtcgccttttccggaagagaagtctcatatcattgacaaggaggaagacatcggcaaacgaagcctgtttcactatacttccagcattaccaccaagtttggcgactcattctactttctgtctaatcacataaactcatactttaaaagaaaagaaaaaatgtcgcaacaaaaggagaatgagcacttccgagataagtctgagctagaggataagaaggttgaagaagggaaactcagatcaccagaccctggaattctggcctacaagcccgggtccgagtccgtgcacacagtggataaaccaacctcaccctctgccatccctgacgttttgcaggtgtcaaccaagcagagtattgccaactttctgtcccggccaacagagggagtccaggccctggtggggggttacattggagggctggtccctaagcttaagtacgattctaaatctcagtctgaggagcaggaagagcctgccaaaactgatcaggcagtttcaaaggacaggaacgcagaggagaagaagaggttgagcttgcaaagagagaaaataattgccagggtgtcaatcgataatcgcacccgggctttggtgcaagcacttcgacgaacaaccgaccccaagttgtgcattactagagtggaggagctcaccttccacctgttagagttccctgaaggtaagggagtcgccgttaaggagcggatcatcccctacctcctgaggttgaggcagatcaaggacgagactttacaggccgccgtacgtgagatactggctcttatcggatatgttgatcctgtgaaaggccggggaattcgcatcctgtctatcgacggagggggaacccgtggtgtcgttgcacttcagacgctgaggaaattagtagagcttacacagaagccagtgcatcagttattcgattacatctgcggagtctccactggtgccatcttagcattcatgctcggcttattccacatgcccttggacgagtgcgaggaactttatagaaaattggggagcgacgtcttctcccagaacgtcatcgtgggaactgtgaaaatgtcctggtctcacgcattctacgactctcagacttgggagaacatactgaaggatagaatggggtctgcgctcatgatcgaaacagctagaaacccgacatgtcccaaggtagcggctgtctccacaatcgtcaatcggggtatcacccctaaggcttttgtctttaggaattacggacattttccaggaataaattcacactatttaggcggctgccagtacaagatgtggcaggccatcagggctagctctgccgctccaggttatttcgcggaatacgctctgggcaatgatctccaccaggatggaggcttgctgttgaataacccatccgccttggctatgcacgaatgcaaatgtctgtggcctgacgttccactggagtgcattgtttctcttgggacaggacgttatgagtcggatgtccggaatacagtgacctataccagcctgaagacaaagttatccaatgtcatcaatagcgccaccgacaccgaagaggtgcacatcatgctggacgggctgctgcctccggacacgtacttccggttcaacccagtgatgtgcgagaatatacctcttgatgaatcaagaaatgaaaaattggaccaattgcaactggaaggcctaaagtatatagaacggaatgaacagaagatgaagaaggtggcaaagatactcagtcaggagaagactacgcttcagaagataaacgattggatcaaattgaaaaccgacatgtatgaagggctcccctttttctcaaaactctag

SEQ ID NO: 127964 - DNA, 582 bp, synthetic construct
  misc_feature 1..582: note = Description of Artificial Sequence: Synthetic coding sequence
  source 1..582: mol_type = other DNA
atgtccatcaacctaactgtggacatctacatatatctcctctcaaatgcacgcagcgtgtgtggcaagcagcggtccaagcaactgtattttcttttttcccctaagcattactggcgcatctctcacatttcccttcagagaggcttccacacaaacatcatcaggtgtaaatggacgaaatcggaggcgcattcatgctcaaaacattgctactcaccttctaatcacgggttgcatataggtatcctgaagctgtcaacgagcgcacctaagggactcactaaggtgaacatttgtatgtccagaataaagagcactctaaattccgtttcgaaggcggtcttcggcaatcaaaatgaaatgattagcagacttgcacagtttaagccaagttctcaaattctgcgcaaagtgtcagacagcgggtggctcaagcagaagaatatcaagcaggcgatcaaaagcctgaagaaatatagcgataagtcagcggagaaatcccctttccccgaagagaaatcacacatcatcgataaagaggaggatattggcaaacggagcttgtttcattacacttag

SEQ ID NO: 127965 - DNA, 2349 bp, synthetic construct
  misc_feature 1..2349: note = Description of Artificial Sequence: Synthetic coding sequence
  source 1..2349: mol_type = other DNA
atgagcatcaacctgaccgtagacatctatatctatctcctgtcaaatgcacgcagcgtctgtggtaagcagaggagtaagcaattgtattttttgtttagccccaaacactactggaggatctctcacatatctctccagagaggttttcataccaacatcatacgctgcaagtggacaaagtccgaggctcactcctgctcaaagcactgttactcccctagcaatcacgggctgcatattggcatactgaaattatccacatcggcccctaagggcctgacaaaggtcaatatttgcatgtcccgcatcaaatcaaccctaaattccgtgagtaaagcagtgtttgggaatcaaaacgagatgataagcagactggctcagttcaagcccagtagccagatactccgaaaagtctccgactctggctggctcaaacagaagaacatcaagcaagccataaaatcactgaagaagtattctgacaagtctgctgagaagtccccgtttcccgaggagaaaagtcacataatcgacaaggaagaagatattgggaaacggagcttatttcactacaccagcagcatcactactaaattcggcgactcgttttactttctctcaaaccatataaacagctacttcaagaggaaggagaagatgtcacagcagaaggaaaacgagcacttccgtgacaaatctgagctcgaagataaaaaagtggaggaggggaagttgcggtctcccgatccagggatcctggcctataagcccggatctgagagcgtgcataccgtcgacaagcccactagtccatccgcaatcccggacgtcctccaggtgagcacaaaacagtcgattgcaaatttcctgtcaagaccaaccgagggcgtccaagctcttgtaggagggtatattggaggattggtccccaagttgaagtatgattcaaaatcacaatccgaagaacaagaagagccagccaagacagatcaagctgtgagtaaggatagaaacgcggaagagaaaaagcgactcagtctccagagggaaaaaatcattgctcgtgtgagtatcgataacagaacgagagcgttggttcaggcactgaggcgtaccacagatcctaaattatgtattacgagggtggaggaattgacatttcacctactcgagtttcccgaagggaaaggagtcgctgtgaaggaacggatcattccttatctgctgaggctgcgccagatcaaagacgaaacactgcaggctgctgtacgcgagattctggccctgatcggctacgtcgaccccgtcaagggacgagggattcgcatcctatctatagacgggggcgggacaaggggggttgtggccctgcagacgctgcgcaagctggtggaactgacacagaaaccagtgcaccaactgttcgactatatctgcggcgtctccaccggcgccatcctagcttttatgctgggtctgtttcatatgccattggatgaatgcgaggaattatatcgcaaattgggaagcgatgtgttcagccagaacgtcattgtgggtactgtaaaaatgtcatggtcacatgctttttacgattcacagacttgggagaacatcttgaaagatcgaatgggcagtgcccttatgattgagactgcacggaacccaacctgtcccaaggtcgccgctgtgagcaccatcgtgaatcgtggcatcacccccaaggcctttgtatttcgaaactatgggcattttcccgggatcaacagccattacctgggcggatgccagtataaaatgtggcaggctattagagcgagttctgcagcccccggttattttgctgagtacgcgcttggtaacgatctgcaccaggacggtggattgctgctcaacaatccttccgctctcgcaatgcacgaatgtaaatgcctttggcctgatgtccccctggagtgtatagtatccctgggaaccggccgttacgaatctgatgtcaggaacaccgtcacctataccagtttgaaaacaaagctctctaatgtgataaactcagccacagacacagaggaagtccatatcatgctggatggcctcctcccaccagatacatatttcaggtttaatccggtaatgtgtgagaacatcccgctggatgagagtaggaacgagaagctcgaccagctgcaattagaggggctaaagtacattgaacgtaacgaacaaaagatgaaaaaggtggctaaaatcttgagtcaagagaaaactaccctccagaagatcaacgattggattaaactgaagaccgatatgtatgagggattgccgtttttttctaagctctag

SEQ ID NO: 127966 - DNA, 2154 bp, synthetic construct
  misc_feature 1..2154: note = Description of Artificial Sequence: Synthetic coding sequence
  source 1..2154: mol_type = other DNA
atgtccattaacctgactgtggatatttatatctacttgctctcaaatgcgcgctccgtgtgtggcaaacaacggagcaagcaactctacttcctgttcagtccaaaacactattggaggatctctcatattagtcttcagcgaggatttcatacgaatattattaggtgcaagtggacaaagtcagaggctcacagctgctccaagcattgttacagtcctagtaaccatgggctgcatatcggcatactaaaattaagcactagtgcccctaaagggctgaccaaagtcaacatctgtatgagcagaatcaagtctactctgaattccgtttctaaggcagtctttggaaaccagaacgagatgatttctaggttagcccaatttaaaccctcttcacagattctcagaaaggtcagcgactcaggctggcttaaacaaaagaacataaagcaggctatcaaatcgcttaagaaatacagcgacaagagcgctgaaaagagtcccttcccggaggagaaatcgcatatcatcgacaaagaggaggatatcggaaagagatcgttgtttcattatacatcctctatcacgacgaagttcggtgacagtttttatttcctctcaaatcatattaacagctacttcaagaggaaggagaaaatgtcgcagcaaaaggagaacgaacactttcgggataaaagcgaactagaagataaaaaggttgaggagggcaagctgcgatcacccgatcccggtattctcgcctacaaaccagggtctgaatcagtgcacacggtagataagcctaccagcccatccgccatccccgacgtgctgcaagtgagcacaaagcagtcaatcgcaaactttctgtcccgacctacagagggtgtgcaagccctggtcgggggatacatcggcgggttggtccctaagctgaaatacgattcgaagagtcaaagtgaggaacaggaggaaccagctaaaacagaccaagctgtatcgaaggataggaacgcggaagaaaaaaaaaggctctctctgcagcgggaaaagatcatcgcaagagtctccattgataacagaactcgcgccctcgtccaagcactgagaagaactacggacccaaagctgtgcatcacaagagttgaggagctaaccttccacctgctggagttcccagagggcaagggcgttgcggtgaaagaacggatcatcccttaccttctcaggctgaggcagattaaggacgaaacactgcaggctgctgttagagagattctagcgctgattggctacgtggaccctgttaaggggcgcgggatccgaattttgtcaattgacggtggaggaaccagaggagtggttgctcttcagacactgaggaaattggtggagctaacacagaaacccgtgcatcaattatttgactacatttgcggagtgagcacaggtgccatcttggcattcatgctcggactatttcatatgcccctcgatgagtgcgaggagttataccggaagttgggaagcgacgtgttctcccagaacgtcatcgtgggaactgtcaagatgtcatggtctcacgctttctacgacagccaaacgtgggaaaatatcctgaaagatagaatgggtagcgctcttatgatagaaacagccaggaatcccacttgtcctaaggacggagggctgctgttaaataatcctagcgcactggccatgcatgagtgcaagtgcctgtggccagatgtccctctggagtgcatcgtgtctcttggaactggccgctatgaaagcgatgtcagaaacactgtaacttacacatcactgaaaaccaaattgtccaacgtgatcaactcggccactgacacagaggaagtccatatcatgttggatggacttctgccccctgacacatattttcgattcaacccagtaatgtgcgaaaacatcccactcgacgaaagtcgaaacgagaaactggatcagctgcagctggagggcctgaaatacatagagagaaatgagcagaagatgaaaaaagtggccaaaattctttcacaggagaagacaactttgcaaaagatcaacgattggatcaagctcaaaacagacatgtacgaaggactgcctttctttagcaagctgtag

SEQ ID NO: 127967 - DNA, 2049 bp, synthetic construct
  misc_feature 1..2049: note = Description of Artificial Sequence: Synthetic coding sequence
  source 1..2049: mol_type = other DNA
atgtcccggatcaagtctactctaaattctgtatcaaaggccgtgtttggaaatcagaacgaaatgatcagcagactagcccagtttaagccgtcttcccagatcctgaggaaggttagcgattcaggatggttaaagcagaagaatatcaaacaggctattaaaagtctgaagaagtattccgacaaatctgctgaaaagagtccatttccagaagagaagtcccatattattgataaggaagaagatataggtaagcgcagcctatttcactacacctcttctatcacaactaagttcggggattccttctacttcctgtccaatcacattaatagttacttcaaaaggaaagagaaaatgtcccagcagaaagagaatgaacatttccgagataaaagcgaattggaggataagaaggtggaagaaggtaaactgagatcccctgatcccggaatcctcgcctacaagccaggaagtgaatctgtgcatacagtggacaagcctactagtccttccgctattcctgacgttctccaagtgtcaactaagcagtctatcgcaaacttcttatctcgacccaccgaaggtgtccaggctctagttggcggatatatcggaggtctggtgcctaagcttaaatacgacagcaaatctcagagcgaggagcaagaggagcccgccaagaccgatcaagcagtgagcaaggacaggaatgctgaagaaaagaagcgcctctcgctgcagcgagaaaaaatcatcgcacgcgtgagcatagacaacaggacccgtgccctggtgcaggctctgcgccggacaactgatcccaaactgtgtatcacacgtgtggaggagctgacctttcacctcttggagtttcctgaaggtaaaggagtggctgtaaaggagagaatcatcccctacctgctgagactccgacaaatcaaagatgaaacattacaggctgctgtgagggagatattggccttaataggatacgtcgaccccgtcaagggacggggaattagaatactgtcaatcgatgggggcgggaccaggggagttgtcgcactccagaccttacgcaagctggtggaactgacccagaagccggtccaccagttgtttgattatatctgcggcgtcagtacaggggccattttagctttcatgttagggctctttcacatgcctttggacgagtgcgaagagctgtaccgcaagcttggcagcgatgttttcagccaaaacgtgattgtcggaaccgtgaaaatgagctggtcccatgccttttatgattcacagacatgggagaacatacttaaggaccgaatggggagcgcactgatgatcgagacagccaggaacccaacttgtcccaaggtggccgctgtctcaaccatcgtgaatcggggcatcacacctaaagcctttgtgtttcggaattatgggcatttccccggtatcaatagtcactatctgggcggctgccagtataaaatgtggcaagcgattagggcaagttcagcggcccctggatattttgccgagtatgccctggggaatgacctccaccaagatggaggacttctgcttaataatccaagcgccttagcaatgcatgagtgcaagtgtctgtggcccgatgtgcctctggagtgcatcgtgagcctggggacaggtaggtacgagagcgatgtgagaaatactgtcacctacacctctctgaaaactaagctttccaacgttattaacagcgccactgatactgaagaggtgcacattatgctcgacggactgctgcccccagacacatacttcagattcaatcccgtgatgtgcgagaacatacccctggacgagagtcgtaacgagaagctggatcagctgcagctggagggcctgaagtacattgagaggaacgaacagaaaatgaaaaaggtggcgaagatactaagtcaagagaaaacaaccttacaaaagatcaatgattggatcaagctgaaaaccgacatgtacgagggcctgcccttcttcagtaaactgtag

SEQ ID NO: 127968 - DNA, 3612 bp, synthetic construct
  misc_feature 1..3612: note = Description of Artificial Sequence: Synthetic coding sequence
  source 1..3612: mol_type = other DNA
atgactaggagcccccccctgcgagaactccctcctagttacacacctcccgcccggactgcagcccctcaaatcctggccggtagtctaaaggctccattatggcttagggcctactttcaggggctcttgttcagtttgggatgtgggattcagaggcattgcggcaaggtgctgttccttggtctgcttgcctttggcgcccttgccctgggcctcagaatggcaattatagaaactaatctcgagcagttgtgggtagaagttggaagccgtgtgtcgcaggagttacattatacgaaagaaaagttaggggaagaggccgcgtacacatcacagatgctcattcagaccgcacgccaagaaggtgagaatattctgacacccgaggcactgggcttacatctccaggcagccctcacggcttccaaggtccaggtttcgctgtatgggaaaagctgggacctgaataaaatatgctacaaatccggagtgccgctgatcgagaatgggatgattgagcgcatgatcgagaagcttttcccatgtgtgatcctcacgcctcttgattgcttctgggaaggcgctaaactgcaaggaggatccgcctatctgccagggcgtcctgacatccaatggacgaatttggatccagaacagctgttggaggagttggggccattcgctagtttggaaggctttagggaactcctggacaaggctcaggtgggacaggcctacgtgggccgtccatgtctgcatcctgatgacttgcattgtcccccatctgccccaaaccatcattcaaggcaggcacctaatgtcgcacacgagctcagcggagggtgccatggatttagccacaaatttatgcattggcaggaagagctgcttctgggtggaatggccagggacccccaaggggagctcctacgtgccgaggccctgcaatcaacgttcctcctcatgtctcctcgtcagctttacgagcattttcggggtgattatcaaacgcatgacatcggatggagcgaagagcaggcctcaaccgttttgcaggcctggcaaaggcggtttgtccagcttgcccaggaggccctgcccgaaaacgcaagccaacaaattcacgcatttagttccaccacattagacgacatcttgcatgccttcagcgaggtctctgcagcccgagtggtgggcggctatctgctgatgctcgcctacgcttgtgtcactatgctgcgttgggactgtgctcagtctcaggggagcgtcggactggccggcgtgctgctggttgccctcgccgtagcttccggattaggtctttgcgccttgctcggaatcactttcaatgccgctacgacgcaggtcctcccatttctggccctcgggatcggggttgacgacgttttcttactggcgcacgcatttactgaagctcttccaggcacccctttacaggaaagaatgggtgagtgtttacagcgaaccggaacctcagtagtcttgaccagcattaataatatggcagcattcctcatggctgcactcgtccctattccagcgctgcgggcattctcgctccaagccgcaattgtggttggctgcacttttgtagccgtgatgctggtctttcccgccatcctgtcactggacctccgtagacgtcactgccagcgcctcgacgtgctgtgttgcttcagtagcccttgcagcgctcaggtgatccaaattctgccccaagaattaggtgacggcactgtgccagtcggcatagcgcatttaactgccactgtccaggcctttacacactgcgaggcctcctcacagcacgtggtgacaattctcccaccgcaggcgcacctcgtgccccccccctccgacccactcgggtctgagctgttcagtcctggcgggagcacccgggacctgcttggtcaggaagaggagacccggcagaaggccgcatgtaagagcctcccgtgcgcccggtggaacctcgcccacttcgctagatatcagttcgcccccttactgctgcaatcacacgcgaaggccatcgtgctcgtcctttttggagctctgttgggactctccctgtacggggccacgctcgtgcaggacggactcgcgctgacagacgtcgtgccccggggtactaaagaacatgccttcctctccgctcaactgcgatattttagtttatatgaggtggccttggttacccagggcgggttcgactatgcgcactcccaaagggccttgttcgatctccatcagaggtttagttccctgaaagctgttctgccacccccagccactcaggcacctcggacttggttgcattactacagaaattggctccaaggcatccaagccgctttcgaccaggactgggccagcggcaggatcaccagacacagctacagaaatggctccgaggacggcgccttagcttacaaattactgattcaaaccggggacgcgcaggagcccttagacttttcccagctgacaacccggaagctggtggaccgcgaaggactcatccccccggagctcttttacatggggctcaccgtttgggtgtcgagcgaccccttgggcttggccgcttcccaggccaatttttatcctccaccacctgaatggctgcacgacaaatacgatactactggagaaaacttacgcatacctccagcacagcccctggaattcgctcagtttccgttcctcctgagaggccttcaaaagacagcggattttgtcgaggctattgagggcgccagggccgcttgtgcagaggcagggcaagccggtgtgcatgcttacccttctgggtcacccttcctgttctgggagcagtacctgggcctccgccggtgcttcctgctggctgtgtgcatcctgctcgtctgcacgttcctagtgtgtgccttactgctgctcaatccctggacagctggcctcattgtgctcgttctcgccatgatgacagtggagctctttggcattatgggctttctggggattaaactgtcagccattccggtggttatactggtggcctctgtgggcattggcgttgaattcaccgttcacgtagcacttggctttttaacaacgcaggggtcacgtaatctgcgggccgcccatgcgctggaacatacctttgccccggtgaccgacggcgccatatccacactgttgggcctgctaatgctagctggtagtcatttcgactttattgttaggtacttcttcgcagcactgactgtgctcacgctgttgggcctgctgcatggtctggtgctactccctgtgctgttaagcatactcgggccccctcctgaagtcattcagatgtacaaagaatctccagagatcctgtctccgcccgcccctcaaggcggtggtctgaggtggggagcatcaagcagtttgccccagtcatttgctcgagtgacaaccagcatgactgtggctatccatccccctcccctgcccggggcttatatccatcctgcccctgatgagcctccttggtctccagccgctacatcttctggtaatttgtctagtaggggcccagggcctgcaaccggatag

SEQ ID NO: 127969 - DNA, 267 bp, synthetic construct
  misc_feature 1..267: note = Description of Artificial Sequence: Synthetic coding sequence
  source 1..267: mol_type = other DNA
tagttcgactttattgtgcggtatttttttgctgctctgaccgtccttacccttctgggtctgctccatggtctcgttctgctgccggtcttgcttagcattctgggcccaccgcctgaggtgattcagatgtacaaggaatcacctgagattcttagccctcctgcccctcagggaggaggtcttagggtgggctctctgcaagttaatatctcgtattggaaggagctgctctggtgccaagatctccgacccgaagaaatatag

SEQ ID NO: 127970 - DNA, 3441 bp, synthetic construct
  misc_feature 1..3441: note = Description of Artificial Sequence: Synthetic coding sequence
  source 1..3441: mol_type = other DNA
atgactaggtctccccccctgagagagcttcctccatcctacacgcctcctgcccgaactgccgctccacagatcctcgccggaagcctgaaggcgcccctatggctgcgtgcttacttccaaggtctgctcttctccttggggtgtggcatccagcgccattgtggcaaggtgctctttctgggattgctggcatttggcgcactcgcactgggattgcgcatggcaatcatcgagactaacctggaacagctctgggtcgaagtgggctcacgcgtgagccaggagctgcattacaccaaggaaaaacttggggaagaggccgcttacactagtcaaatgctgatacaaaccgcccgccaggagggcgagaatatccttacgcccgaggcccttggcctccacctccaggcggcgctgacggccagcaaggtccaggtgtccctgtacggcaagagttgggacctaaataagatctgctataagtcgggagtgccgctgatcgaaaacggcatgatcgaaaggatgatcgagaaactttttccatgcgtcatcttgacacctttggattgcttttgggagggggccaaactccagggcgggtctgcctacctgcctgggcggcccgacattcagtggaccaacctggatcccgagcagctcttggaggagctcggcccctttgctagccttgaaggctttagggaactcttagacaaagcccaagtcgggcaggcttatgtgggccgcccctgtttacatcctgacgacctgcattgtccaccatccgctccgaatcaccattcaaggcaggcacccaacgtggcacacgagctgtcaggcggctgccacggattttctcataagttcatgcattggcaagaggaactgctcctaggcgggatggcccgcgatcctcagggtgagttgctgcgtgcggaggcattgcaatccactttcctgctgatgtcaccaaggcagctctatgaacactttaggggagactaccaaacgcacgatatcgggtggagtgaagagcaggcatcaactgtcctacaggcctggcagaggcggttcgtgcagctcgcgcaagaagccctgccagagaatgcttcccaacagattcacgcattcagctccaccactctggatgacatcctccacgcttttagtgaagtctccgcagccagagtggtgggaggatacttgctcatgcttgcttacgcttgtgtgaccatgcttcgctgggattgtgcacagagtcagggatctgttgggttagcgggcgtattactggttgccctggcagtggcttctggcctaggcctgtgtgcactgttaggcatcacgttcaatgcggcgactacccaggtgctgccgtttctggcccttgggatcggggtggatgatgtcttcctgctcgctcacgcattcaccgaggctttgcctggtacccccttgcaggagaggatgggggagtgcctccaacgtacagggacctctgtggtgcttactagcatcaataatatggccgctttccttatggctgccctcgttcctatccccgctctgcgcgcattctcgcttcaggcggctatagtggtcggctgtacatttgtggcggtaatgcttgtctttcccgctatcttgtccctcgaccttcgtaggcggcattgccagaggctggatgtcctgtgctgtttcagcagtccttgctctgcccaggtgatacagatactcccccaagagctcggtgatgggacagtgccggtcggaatcgctcatcttacagctactgtccaggcttttactcactgcgaagcctcatctcagcacgttgtgacgatattacccccacaagctcacttggtcccacccccgagcgatcctcttgggtcagaattgttctctcctggaggctcaacacgtgacctcttgggtcaagaggaagagacaaggcagaaagcggcatgcaaatccctgccttgtgccaggtggaatctggctcatttcgcacgataccagttcgcccctttgctgctgcaaagccacgcgaaagctatagtattggtgttgtttggagccttgctcggcctaagtttgtacggtgcgaccctggtgcaggacggtctggctcttaccgacgttgtgcctcgcggtacaaaagagcacgccttccttagtgctcagttgcgctatttcagtctgtacgaggtggcactggttacccagggagggttcgattacgctcacagtcagagggcattgttcgatctccaccagcgattcagctccctaaaagccgtgttgccacctcctgccacccaggctcctaggacctggctgcactactataggaactggcttcaggggattcaagccgcattcgatcaggactgggccagtggacggattaccaggcactcttacaggaacggatcggaagatggcgctctagcctacaaactgctcatccagacaggggatgctcaggaaccactggatttcagccagcttacgactcgaaagttggtggacagagaagggcttatcccgccagagttgttctatatgggcctcactgtctgggtttccagcgatcccctcgggcttgccgcaagccaggcgaacttttacccaccaccccctgaatggctccatgacaaatacgacaccacaggggagaatctccgcatcccacccgcccagccactcgagtttgctcagtttccgtttctgctgaggggactgcaaaaaacagcggatttcgtggaggctatcgaaggggctcgcgccgcctgcgccgaggctggccaggctggtgtccatgcatatccctccgggtccccctttttgttttgggagcagtacttgggactccggagatgctttctgctggccgtctgtattcttctggtgtgtacttttctcgtttgtgcgttgctgttgttgaacccttggaccgctggcctcattgtactcgtgctggccatgatgacagtcgaattattcggaatcatgggctttctggggataaaactgtccgctattccggtggtgatcctcgtggcctcagtgggcatcggggtggaattcacagtgcatgtcgctttaggatttttgaccacacagggctccagaaacctgagggctgcgcacgcactggaacacacgtttgcacccgttaccgacggggctatatctaccctcctgggattgttgatgctcgccggttcccactttgacttcattgtaaggtacttctttgctgcgcttaccgtcctgactttgctggggctgttgcacgggcttgtcctccttcctgttctcctgagcatcctgggcccgccccccgaggtgattcagatgtacaaagaatctccggaaattctcagccctcccgcacctcagggcggggggctgcgacccgaggaaatatag

SEQ ID NO: 127971 - DNA, 2667 bp, synthetic construct
  misc_feature 1..2667: note = Description of Artificial Sequence: Synthetic coding sequence
  source 1..2667: mol_type = other DNA
atgctccggcaggtactgcacagaggacttagaacgtgtttctctaggctgggtcacttcattgccagccaccccgtctttttcgctagcgcccctgtgcttatatccattctgctgggggcatcgtttagtcggtaccaggtggaggagtcggtagagcatctcctggccccacagcacagtttggcaaagatagagcgaaacctcgttaattcgctctttccggtgaaccggagtaagcatcggctgtactcagacctgcagacacccggcaggtatggacgcgtgatcgttacttccttccagaaggccaatatgcttgaccagcatcacacggatttgattctgaagctccatgccgccgttacaaagattcaggtcccccgccctggcttcaactacacatttgctcacatctgtattctcaataatgacaaaacctgtatcgttgacgatattgtgcatgtgctcgaagagctgaagaacgccagggcaactaaccggactaacttcgcgatcacctatcccataacacatctaaaggatggaagggctgtctataatgggcatcagcttggaggagtgaccgtgcatagtaaggatagggtaaaatcagccgaggccattcagttgacttactacctacagagtattaacagcctcaatgatatggttgcggagaggtgggaatcttccttctgcgacacagtacgcctcttccagaaaagtaactccaaagtaaagatgtacccgtacacgtcatcttctctgcgggaggacttccagaaaacttctcgagtcagtgagagatatctggtaactagcttgatcttagtcgtgacaatggccatcttgtgttgtagtatgcaggattgtgtgagatctaagccatggctcggactgctgggactggtgacaatttcactggctactcttacggctgcaggtattatcaacctgactggggggaaatataacagtactttcctgggtgtgccctttgttatgcttggccacgggctgtatggcactttcgagatgctcagtagctggcgaaagacacgggaggaccagcacgtgaaggagcgcacggctgcagtgtatgccgactcgatgttatccttctccttaaccacagccatgtatctggttacgttcggcatcggggcctccccttttactaacatcgaagcagcccggatcttctgctgcaactcctgcatcgcaatcttctttaactacctttacgtgcttagcttctacggatcgagccttgtcttcaccggctacattgagaataactatcagcactctatcttttgccgcaaggttcccaagccagaggcgctccaggaaaagccggcctggtatcgtttcctgctcaccgccagattcagcgaggacactgccgagggcgaggaagccaatacttacgagtctcatctgctggtctgcttcctgaaacggtactattgcgactggatcaccaacacttatgttaaacccttcgtggtgctgttctatcttatctacatcagttttgccctgatgggctacctgcaagtgtctgaggggtccgatctcagtaatatcgtcgcgactgctacccagaccatcgagtatacaactgcccagcagaaatacttcagcaactactcccccgtcattggattctatatatatgagtcaatcgaatactggaacacgtcagtccaggaagacgttttggaatataccaagggattcgtgcggatctcttggttcgagagctatctaaactacctgcggaagttaaatgtgagtacaggtttgcctaaaaagaacttcacagatatgctgagaaacagctttctcaaagcacctcaattctcccatttccaggaggacattatcttttcaaaaaagtataatgatgaggtcgacgtggtggctagccggatgtttttggtggctaagaccatggaaacgaaccgtgaggagctttacgaccttctagaaacactcagacgtctgtcagtcacctcgaaagttaagttcattgtgttcaatccctccttcgtctacatggacaggtacgcatcttctctgggagcccccctgcacaactcctgcatttccgccctgttcctgttgtttttctctgctttcctggtagccgatagcctgattaacgtctggattacactgaccgtggtttctgtggagttcggagtgattggattcatgactctctggaaggtggaattggattgtatttctgtcctgtgccttatctacgggatcaactacacaatcgacaattgtgccccgatgctatcaacattcgtccttggtaaagattttacccgcactaagtgggtaaaaaacgcactggaagtccacggagtcgctattcttcagagctatctgtgctacattgtaggcctcatccccttagctgcggtaccttccaacctgacatgtactttgtttcggtgtttgttcctgattgcttttgtgacattcttccactgtttcgcgatcttgcccgtgattctgacatttctccctcctagcaagaaaaagcgcaaagagaagaagaaccctgaaaatagagaagaaattgaatgtgtggagatggtcgacatcgattcaacacgcgtcgtggatcagatcacgaccgtttag

SEQ ID NO: 127972 - DNA, 4179 bp, synthetic construct
  misc_feature 1..4179: note = Description of Artificial Sequence: Synthetic coding sequence
  source 1..4179: mol_type = other DNA
atggatactgaggacgacccattactccaggatgtctggctggaggaggaacaggaggaggaggaagcaaccggagagacattcttgggcgctcagaaaccaggaccccagccaggggccggtggacagtgttgttggcggcactggcctttagcgagcagaccccccgcgagtggcttttggtctaccctgggctgggccttcacaaacccttgctgcgcagggctagtcctctttcttggatgctctattcctatggcgctgtccgcattcatgtttctttactacccacccctcgacattgacatctcatataacgcttttgaaataagaaatcacgaggcaagtcagaggtttgacgcactcacattagcccttaagtcacaatttggttcatggggccggaataggcgcgatctcgctgacttcacaagcgagactctccagcggcttatctccgagcagcttcaacagttgcatcttggaaatagatctagacaggcctctcgagcaccacgcgtgattcccgcagcctccctgggagggcctgggccatatcgagataccagcgctgctcagaagcccacagctaatcgcagtggacgtctgcggcgggaaaccccccccctggaggaccttgcggcgaaccaaagtgaggatcccagaaaccaacggctctcgaaaaacggtaggtaccagccatcaatcccaccacatgccgcagttgctgctaatcagtcccgcgctcgacggggggcttcgcgctgggattacagccgggcctatgtcagtgcaaacacccaaacccacgctcactggagaattgagctcatcttcctcgcgagaggtgacgctgagaggaatatatttaccagtgaacgactggtgaccattcatgaaatagaaaggaagattatggaccaccccggtttccgcgagttctgctggaagcctcatgaggtgctcaaagacctgccacttggatcatactcatactgttctccccctagtagcctcatgacatacttcttcccaaccgagaggggcggtaaaatctactacgacggcatgggtcaggatttggccgacattagagggagtcttgaattagccatgacacatcccgagttctactggtacgtagacgaaggactgtcagcagataacttgaagtccagcctgttgcgctctgagattctgttcggagctccgctgccaaattactactcggttgacgacaggtgggaagagcaacgcgcgaaatttcagagctttgtggtaacatacgtcgcaatgctggccaagcaaagcacttccaaggtacaagtattatacggaggcacggacctctttgattacgaggtacgaaggaccttcaacaatgatatgttgttggctttcatttcttcatcatgtatcgctgctcttgtgtatatcctgacgtcctgttcagtctttctttccttctttgggatcgcatccattgggctgtcctgcctagtggcacttttcttgtatcacgtggtgttcggaatccaatatctcgggatcttgaacggggttgccgccttcgtcattgtcgggataggcgtcgacgatgtctttgtcttcattaacacctacagacaggctacgcatctggaagatccccaactgagaatgattcataccgtgcaaactgcaggtaaggcgaccttctttacctcgcttactaccgccgctgcctacgccgccaacgtgtttagtcagattcctgccgtgcatgacttcggcttatttatgagcctgatcgtatcgtgctgttggctggctgtactggtcactatgccagccgcactgggcctctggtctctgtacctcgcccccctcgaatcttcctgccagactagttgtcatcaaaattgcagcaggaaaactagtctgcatttcccaggggatgtatttgccgctcccgaacaggtcggtgggtcaccagcccagggacctataccgtatcttgatgacgatattcccctgttggaagtggaggaggaacccgtgagtctcgagctcggagatgtgtccctggtctcggtgtctcccgagggcctgcagcctgcctcaaacactgggtcccgcggccatctgatcgtgcagttgcaggaactcctgcaccactgggtattgtggtccgccgtcaagagccgttgggtgatcgtaggcctgttcgtttcaattttaattctgtctctcgtgtttgccagtaggctgcgcccagcgtccagagcaccgctgctgttccggccagatacaaacatccaggtgctcctcgacctgaagtacaacttaagcgcagagggcatttcttgcataacatgctcagggctgtttcaggaaaagccacacagtctgcagaacaacattaggaccagcttggagaaaaaaagaagggggagcggggtgccatgggccagccggcccgaagccactcttcaggattttcctggcacagtttacatcagtaaagttaagtcccaggggcacccagcagtgtaccgcttgagtctcaacgcttctctccccgccccctggcaggctgtgtcccctggtgacggcgaggttccttccttccaagtgtatcgcgcaccgtttggcaactttaccaaaaagctgactgcctgcatgtccaccgtagggctactgcaggccgctagccccagcaggaaatggatgctgacaacactggcttgcgacgccaaacgaggctggaagtttgatttctcgttctatgtggctaccaaggaacagcagcacaccagaaagctctattttgcccagtctcacaagccaccattccatgggagggtctgtatggcaccaccgggatgtctgttgtcctcctcccccgatggacccactaagggtttcttcttcgtaccgtcagaaaaagttcccaaggcccggctttccgctacattcggattcaatccctgtgtgaacactgggtgtggaaaacccgcagtacgccctctagtcgataccggtgccatggtttttgtggtctttgggataatcggcgtaaatcggaccaggcaagtcgataatcatgttatcggagaccctggtagcgtagtatacgattctagcttcgacttgtttaaggagattgggcacctgtgccatctgtgtaaagctattgcggcgaattcagaactggtgaaacccgggggagcccaatgcctccctagcggctacagtatctccagcttcctccagatgttgcatccagaatgcaaggagcttccagagcctaacctgctgccggggcaactttctcacggcgctgtcggggtgagggagggccgggtacagtggatatcaatggcctttgagtccacaacatacaaagggaaatcctccttccaaacctactcggattatctgagatgggagagcttcctgcaacaacagctgcaggctctccccgagggcagcgtcttgaggcggggttttcagacatgcgaacattggaagcagattttcatggaaattgtaggggttcagagtgcactctgcgggctggtgctatccctcctcatctgtgttgcagccgtcgccgtttttactacccacatcctcttgctactgccagttctgttatcaattctcggtatcgtatgcctggtggtgacaatcatgtactggtccggatgggagatgggcgcagtggaagcaatctccctgtcaatactggttgggagttctgtagactattgtgtgcatctggtagaagggtacttgcttgcgggcgagaatctgcctcctcaccaggccgaggacgcccggacccagcgccaatggagaaccttggaggccgtgcgccacgtcggagtggccatcgtgagctccgctctgaccactgtcattgctacagttccactgttcttttgtatcatagcaccatttgccaaattcggcaagatcgttgcccttaatactggcgtgagtatcctctacaccctaacggtctcaaccgcgttgctgggaataatggccccctcttcctttacaaggacgcgtacatccttcctgaaggccctgggtgccgtgctgctggctggcgccctcggactgggagcctgcctcgtgcttctgcagtcggggtataaaattccgctcccggccggagcttcgctgtag

SEQ ID NO: 127973 - DNA, 4179 bp, synthetic construct
  misc_feature 1..4179: note = Description of Artificial Sequence: Synthetic coding sequence
  source 1..4179: mol_type = other DNA
atggataccgaggatgacccgttactccaggacgtctggcttgaggaggagcaagaagaggaagaggccacaggggaaacattcctgggagcccagaagcccggcccacaacccggcgccgggggtcagtgctgttggcggcattggcctctcgccagccgcccaccagcctcgggcttctggtctactcttggctgggccttcaccaacccttgttgtgccggactcgtgttattcctcgggtgctccatcccaatggcactttccgcttttatgtttctctactacccacccttggacattgacatatcatacaatgcttttgagatcaggaaccatgaggcctcacagaggttcgacgctctgacactggctctcaagtcgcaatttggaagttggggacgcaaccggcgagaccttgccgactttacgagtgaaaccctgcaaagattaatctctgagcagctgcagcaactgcacctggggaatcgaagccggcaggcctcaagagctccacgagtcatcccagccgcctcgctgggagggcccggtccttatcgtgatacctccgctgctcaaaaaccaacagctaaccgcagcggaaggttgcggcgcgagacgcctcccctggaagatttggcagccaaccaatctgaggatccccgtaaccaacggctttccaagaacgggcgatatcagccaagcatacccccccacgctgctgtggcagcgaaccagagccgcgcacgacgcggagctagtagatgggattacagtcgagcttacgtgagtgccaacacacagactcacgcacactggagaatcgagctaattttcctggctcgcggtgacgctgagaggaatatattcactagtgaacgactcgtcactatccacgagatcgaaagaaaaattatggaccacccgggattcagagagttctgctggaagccacatgaggtattgaaagatcttccactgggctcctattcgtactgttctccaccctcgtccttaatgacgtacttcttccccactgagagggggggcaagatctactacgacggaatggggcaggatcttgccgacatccgcggatccctggaactggctatgacacaccctgagttttactggtatgtagatgaaggcctgagcgccgataatttgaagtcaagcttattgcgcagcgagatcctgttcggagctccactgcctaattactattctgtagacgataggtgggaagagcagagagccaagtttcagtcttttgtcgttacatatgtggccatgctcgcaaaacagtcaacatcaaaggtgcaggtgttgtacggggggaccgacttgtttgattacgaagtacgcaggacatttaataatgacatgctgttagctttcatcagttcatcttgtatagccgccttggtatacattctcacttcttgttcagtgtttctcagctttttcggtattgcatccatcgggcttagttgtttggtggcactttttctgtatcatgttgtgtttggcatacagtacctcgggattctgaacggggtcgccgctttcgtgatagtcgggataggtgtggatgacgtttttgtttttattaatacataccggcaggctacccatctagaagatccacagttgcgtatgatccacacagtgcaaactgctggtaaggccactttcttcacttcccttacaaccgctgcagcttacgcggctaacgtcttctcccagataccagccgttcatgactttggtctattcatgtccttaatcgtctcctgctgctggttggccgtgctggttacaatgcccgcagccctcggactgtggtctttataccttgctcccctggagtcgtcctgtcagacaagctgtcatcagaactgttcacggaagaccagcctccattttccaggagacgtatttgccgcacctgaacaggtggggggcagtccagcccagggtccgattccctacctagacgatgacattcctctgctagaggtggaagaggagcccgtgagcctggagcttggggacgtctcactggtcagcgtgagtccagagggcctacagccggcatccaacaccggctcacggggacatctcatagtccagctgcaggagctactgcaccattgggtcctgtggagcgcagtgaagtctcgttgggtaatcgttggactgtttgtcagcatcctgatcctgagtctggtatttgcatcacgattaaggcccgcctctcgtgccccgttgctgttccgcccagatactaacattcaggtccttcttgatctgaagtacaacttatctgcagaagggatcagttgtataacatgcagcggcctcttccaggagaagcctcactccttacagaacaatatcagaacatccctggagaagaagcgccgcggatccggcgtaccttgggcgtcaagaccagaggcgacgttgcaggattttcccggaaccgtgtatatttctaaagtgaaatcccaggggcatcctgccgtctaccgtctcagcttgaacgcgtcactccccgccccatggcaggctgtcagtccgggagatggggaggtgccgtcttttcaggtttaccgcgcgccctttggaaattttaccaaaaagcttacggcatgcatgtcaaccgtaggactgctccaggcggccagccctagcaggaagtggatgcttactacacttgcctgcgatgccaagcgcggctggaaattcgacttttccttctacgtggccaccaaagaacagcagcatactaggaagctgtatttcgcccagagtcacaagcccccgttccatgggagggtgtgtatggctccgcctggatgcctgctcagtagctctcccgacggcccaacaaagggatttttctttgtcccatctgaaaaagttcctaaagcccgcctttcagcgactttcggcttcaatccctgcgtgaatacaggatgcggtaagcccgctgtgagaccactcgtggatactggggccatggtgttcgtagttttcggaataattggtgtgaacagaacaagacaggtagataaccacgtgataggggaccctggatcagtggtttatgattcaagcttcgacctctttaaagagatcggtcacctttgtcacttgtgcaaagcaattgccgcgaattccgagctggtgaaaccaggaggggcgcaatgcctgccttcgggctactccatttcttccttcctgcaaatgttgcatccggagtgcaaagaactgccagagcccaatctcctgccggggcaactcagccatggcgccgtcggggtacgagagggccgagtgcagtggattagcatggccttcgagtctactacatacaaagggaaaagctctttccagacttacagcgattaccttagatgggagagtttccttcagcagcaactccaggccctgccagagggctcggtattgcgtcggggcttccaaacttgtgagcactggaaacagatcttcatggagatcgctggggtgcagagtgctctgtgcggattggttctgtcactgctgatatgcgtcgcagctgtggcagtcttcacgacacatattcttcttctgttacctgttctgctgtcgattctggggatagtctgcttggtagtgactataatgtactggtccgggtgggagatgggagcagtagaagcaatcagtctgtcaatcttagttggctcttcagttgactactgcgtccacttggtagagggttacctgctggccggggaaaacttacctcctcatcaggcagaggacgctaggactcagcgccagtggagaacattagaagcagtccgacacgtgggcgtggcaatcgtctcctcagcgctgacgaccgttatagccactgtcccgctcttcttttgtatcatcgcaccctttgcaaaatttggaaagatcgtggccctgaacacaggggtgtcaatcctgtacaccctcacggtgtcgaccgcgttgctcgggatcatggcccctagcagtttcacacggacccggacatccttccttaaggcactgggggccgtcttactggctggagctctgggactgggtgcctgcctggttctccttcagagcgggtataaaatccccttgcccgccggggcctctctctag

SEQ ID NO: 127974 - DNA, 2304 bp, synthetic construct
  misc_feature 1..2304: note = Description of Artificial Sequence: Synthetic coding sequence
  source 1..2304: mol_type = other DNA
atgccctgggttgagccaaagcccaggcccgggcctgagcagaaaccgaaactcactaagcccgatagcgccaccggtcctcagtggtaccaggaatcccaggagtcagaatctgagggaaaacagcccccccccggacccctggctcctcctaaaagtccggagccgagtggtccactggcttccgagcaggacgcgcctctacctgagggggacgacgctcccccaagaccaagcatgttggacgatgcccctaggctccctttggaactcgatgacgctcccctcccagaagaagaaacacctgagcctacagcgatctgtaggcacagacatagatgccacacagactgcctagagggactcctcagcagaacctttcagtggttgggatggcaagttggggcgcacccctggatcttcctgttagcacctctgatgctgaccgctgctctcggcacgggctttctctatctccctaaagatgaggaggaggatctcgaagaacactataccccagtcggaagccccgctaaagccgagcggcgattcgtgcagggccacttcacgaccaacgattcctaccggtttagcgcctcaaggcgcagtactgaggcaaatttcgtatcactgcttgtcgtctcttactccgacagcctgttggaccctgccacattcgcagaggtgagcaagctggatggcgccgttcaggaccttcgtgtggctcgcgaaaaggggtcccaaattcaataccagcaggtttgtgcgcggtacagggcgctttgtgtacctccaaaccccatcctctatgcgtggcaggttaacaaaaccttgaacctgtcatcaatcagttttccagcctataaccacggacgccatcctttatatctgacaggattttttggcggctatattctcggcggctccttgggcatggggcagcttctgctgcgggccaaagctatgcgccttctgtactatttgaagaccgaagatccagaatacgacgtccaatccaaacagtggctcacgcacctgttggatcaattcacaaatataaagaatattttggccctaaaaaaaattgaggtggtccactttacaagcctttctagacagttggaatttgaagccacttccgtgactgttatcccagtttttcatctggcgtacatccttatcatcttgtttgcagtcacaagttgcttccgcttcgattgtatccgaaataaaatgtgtgtcgctgccttcggggtgatctcggccttcctcgccgtggtgagcggcttcgggttacttctgcatattggcgtgcctttcgtcatcattgtcgccaattcaccttttctgatcctcggtgtcggcgtcgatgacatgttcataatgattagcgcatggcacaagacaaatttggcagatgatatccgtgagcggatgtcgaatgtttatagcaaagctgcggtgtccattactattacaaccattaccaacatccttgctctttacacagggataatgagctctttccgttcggttcagtgtttttgcatttataccggaatgacacttctgttctgctacttctacaatataacctgtttcggcgcttttatggctctggacggaaaaagggaagtggtctgtctgtgctggctcaagaaggcggatccgaaatggccttcttttaagaaattttgttgctttcccttcgggtctgtaccggatgaacatgggactgatattcaccccataagtttatttttcagggactactttggcccattcctgaccagaagtgaatcaaagtattttgtagtgttcatctatgtcttgtacatcatctcctctatctatgggtgttttcacgtgcaagaggggctcgacctgagaaacctcgcgtctgacgactcatatatcaccccttactttaacgtcgaggaaaattactttagtgattacggcccacgggtcatggtgatcgtgacgaagaaggtggattactgggataaagatgtgaggcagaagctggagaactgtactaagatttttgagaagaacgtatatgtggacaagaacttaacagaattttggctggatgcatatgtacagtacctgaaaggcaacagccaggatcccaacgagaaaaatacgttcatgaacaatatccccgactttctatccaacttcccaaactttcaacatgatataaacatatcttcaagtaacgagatcatctcttcaagaggcttcattcagacgactgatgtgtctagctccgcaaagaagaaaatactactgttttag

SEQ ID NO: 127975 - DNA, 978 bp, synthetic construct
  misc_feature 1..978: note = Description of Artificial Sequence: Synthetic coding sequence
  source 1..978: mol_type = other DNA
atgacggaacgaagacgtgacgagctctctgaggaaatcaacaacctgcgggagaaagtgatgaaacaatcagaggaaaacaacaatctccagtcacaggtccaaaagctaacagaggagaacactacccttagggaacaggtggagccaacacctgaagatgaggatgatgatatagagcttcgtggagccgcagcagccgctgcgcccccccctcctatcgaggaagaatgtcctgaggaccttcccgagaaatttgacggaaatcccgatatgcttgccccattcatggctcaatgtcagattttcatggagaagagtacgcgggacttctccgtcgacagagttagagtgtgtttcgtgacttccatgatgactggacgggccgctagatgggcatctgcaaagctagaacgcagtcattacctcatgcacaattatccggcgtttatgatggagatgaaacacgtatttgaggatccacagaggcgagaggtggctaaacgcaaaatcagaagactgcgccaaggcatgggctcagttattgattacagcaatgcctttcagatgatagctcaggacctggattggaatgaacccgccttaatagatcaataccacgaggggctgtcagaccatatccaggaagaattgtctcatctcgaagtggctaaatcactctcggccctcatcgggcagtgcatccatatagaaagacggctcgcgagggctgccgcagccagaaagccgaggagtccacctcgtgccctggtgctgccccacatagcttcacaccatcaggtggatccaactgaacccgttggtggcgcacggatgcggctgacccaggaagaaaaggagaggcggcggaaactgaatctgtgtctctattgtggaaccggcgggcattacgccgataattgtccagcaaaagcatccaaatctagtccagctggcaactcacccgctcctctttag

SEQ ID NO: 127976 - DNA, 978 bp, synthetic construct
  misc_feature 1..978: note = Description of Artificial Sequence: Synthetic coding sequence
  source 1..978: mol_type = other DNA
atgaccgaaaggagacgtgacgagctgagtgaggagattaataaccttagggagaaagtaatgaagcagtccgaagagaacaataacttgcagtcccaggtgcaaaaactcactgaggaaaacaccacgctccgcgaacaggtggagcctaccccagaggatgaggacgatgatattgaactgaggggggctgccgctgccgccgccccccctcccccaatagaagaagaatgtcctgaagatctcccagagaaattcgatggaaatccagacatgctggcaccatttatggctcagtgtcagatctttatggagaaatcgaccagagacttcagtgttgatcgggtcagggtttgtttcgtgacttcaatgatgacagggcgtgctgcccgttgggcatctgcaaaactagagaggtctcactatctgatgcataattatcctgcctttatgatggagatgaaacatgtgtttgaagatcctcaacgaagagaagttgctaagcgcaagattaggcggctgagacaagggatgggttcagtgatagattatagtaatgccttccagatgatcgctcaggatttggactggaacgaacccgcactgatcgaccagtatcatgaggggctgagcgaccacatccaggaggagctaagtcaccttgaggtcgccaaatcattatcggcgcttattgggcagtgcattcacattgagagacggctggcacgggccgccgcggcaagaaaaccccggtctcccccaagagcactggtgcttcctcatattgcctcacaccaccaggttgacccaaccgagcccgtgggcggggcgagaatgcgcctcactcaagaggagaaggaacggcggagaaagcttaacctgtgcttgtactgcgggacgggcggtcactatgcagataattgccctgctaaagcgagcaaatcaagtcctgcaggtaacagccccgctccattgtag

SEQ ID NO: 127977 - DNA, 1311 bp, synthetic construct
  misc_feature 1..1311: note = Description of Artificial Sequence: Synthetic coding sequence
  source 1..1311: mol_type = other DNA
atgatggcaacccagactctgtctattgactcctaccaggacgggcaacaaatgcaggtggtgaccgaacttaagacagagcaagaccccaactgtagtgaaccagatgctgagggggttagcccacctcctgtagagagccagacacctatggacgtcgacaaacaggctatctatagacatcccttattccccctgctcgcgctgctcttcgaaaagtgcgaacagagcacacagggcagtgagggcaccacttctgcatcgtttgatgtggacatcgaaaatttcgtccgcaagcaggaaaaggaggggaagccattcttttgcgaagaccctgaaactgacaacctcatggtaaaggctatccaggtactccgtatccacctgctagagctggaaaaggtaaatgagctatgtaaggatttctgctctaggtatatcgcctgtctcaaaaccaagatgaactcagagaccctgctgagcggcgaacccggtagcccttatagtcctgtccagtcacagcaaatccagtctgccattacaggaactatctccccccagggcatcgtggtgcctgcgtccgcgctccagcagggaaatgttgcgatggctacagtggctggcggcacagtgtatcagcccgtgaccgtagtaactccccaggggcaggtcgtaacacagacactgtctccaggcacaattaggatccagaatagccagttacagctgcaacttaaccaggatttaagcattctccaccaagacgacggcagctccaaaaacaagcggggcgtcctccccaaacacgccacaaacgtgatgcggagctggttgtttcagcatattgggcacccctaccccacagaggacgaaaaaaagcaaattgccgcgcaaactaacctgacacttttgcaagtgaacaattggttcatcaacgcacgccggcggatactccaacctatgctcgactcatcctgttctgaaacaccaaagacaaagaagaagaccgcacagaaccgaccagttcagcgcttctggccagacagcatcgcatctggcgtggcacagcccccaccatcggaacttactatgagcgaaggagccgtagtgaccatcactacaccagtgaacatgaatgtcgacagcctgcaatcactctcctcagatggggccactctcgccgtccagcaggttatgatggccgggcagtcagaggacgaatctgtggattccactgaggaagacgccggtgccctcgcccccgctcacatttctgggttggtcctcgaaaactccgatagtcttcagtag

SEQ ID NO: 127978 - DNA, 960 bp, synthetic construct
  misc_feature 1..960: note = Description of Artificial Sequence: Synthetic coding sequence
  source 1..960: mol_type = other DNA
atggtcaaagccatacaggttcttcgtattcacttgcttgaactggaaaaagttaatgaactatgcaaggatttctgctctaggtatatcgcttgtttaaaaactaaaatgaactcagaaaccctgctgtccggagagccgggctccccttatagccccgtgcagtcccagcaaattcagtccgcgatcacaggtactatttcaccccaggggattgtggtgccagcaagtgccttgcagcagggtaacgtcgcaatggccaccgtcgccggcggcaccgtgtaccagccagtaactgttgtcactcctcagggccaggtggtaacccagactctctcgcccggcactatccgtatacagaacagtcagctacagctccagttgaatcaagacctgtctattctgcatcaggatgatggcagcagtaaaaacaagcgaggagttcttccaaagcatgctacgaacgtcatgcggagttggctgttccaacacattggacatccgtacccaactgaagatgagaagaaacagatcgcagcacaaacgaatctgacactgctccaggttaacaactggtttattaacgccaggagacgaatccttcagcccatgctcgacagcagttgcagcgagacgcctaaaacaaaaaaaaaaacagcacagaataggcccgtgcaaaggttctggcctgactccatcgcttctggagtggcacagccacctccgtctgagctgaccatgtcagaaggggccgtggtgaccattactactcccgtgaatatgaacgtcgatagtctgcagtccctgagttcggacggtgctaccctggcggtgcagcaggtgatgatggccggtcagtctgaggatgaatcggttgacagtacagaagaagacgccggagcgcttgctcccgctcacatttccggtctcgtgctcgagaattccgactcactgcagtag

SEQ ID NO: 127979 - DNA, 1260 bp, synthetic construct
  misc_feature 1..1260: note = Description of Artificial Sequence: Synthetic coding sequence
  source 1..1260: mol_type = other DNA
atgatggccacccaaacactgagcattgatagctatcaggatggccagcaaatgcaggtggtgacagagcttaaaacagaacaggatccaaactgttccgagcctgatgccgagggggtgagcccccccccagtggagtctcagacacccatggacgtggacaagcaagccatttatagacatccactttttcctcttcttgccctattattcgagaagtgtgaacaaagtacacaaggctccgagggcaccacttccgcctcatttgacgtggacatcgagaactttgtcaggaaacaggaaaaggagggaaagcccttcttttgtgaagaccccgaaaccgataaccttatggtgaaagcgatccaggtcctgagaatccatctccttgagctcgagaaagtgaatgagctgtgcaaagacttctgctcccgctatatcgcttgcttgaagactaagatgaactcggaaaccctcctgtccggagaaccaggctccccctactcacctgttcagagccaacagatccagtcagcgatcacagggacaatctctccccaaggcatagtggttcccgcgagtgcgctccaacaaggcaacgtggccatggccactgtggcagggggaactgtctatcagcccgtaactgtggtgactccacaggggcaggtggtgacacagaccttgtccccgggaactatccggattcagaacagtcagctgcagcttcagctgaaccaagacctgtcaatcctccaccaggacgacgggagcagcaagaacaagcgcggtgtccttcctaaacacgctactaatgtcatgaggagctggctcttccagcatatcggccatccgtatcccacagaggacgaaaagaaacagatagctgctcagaccaatttgacactcctccaggtgaacaattggttcatcaatgccaggagaaggatcttacagcctatgttagattcgtcgtgtagcgaaaccccaaagaccaaaaagaaaacagcccaaaatcgccctgtccagcgattttggcctgactccatcgcctctggggtggcacaaccacccccttcagagctgaccatgagcgagggaactggggggcgcccccgaccagatatggtcgaccacggcgtagggattatgaataagaggccgggctctggtctccttgcacccccccgcccggccgagaacgacattttgaaacccccattgcggtcaagctttgtgaattgtcttctaatcttctag

SEQ ID NO: 127980 - DNA, 1419 bp, synthetic construct
  misc_feature 1..1419: note = Description of Artificial Sequence: Synthetic coding sequence
  source 1..1419: mol_type = other DNA
atgatgcagcatgccagcccggccccggcattgacaatgatggccacccaaaacgtcccccctcccccctaccaagactcccctcagatgactgccactgctcagcccccgtcaaaggctcaagcggtgcatatcagtgcgccaagtgccgctgcatctacgcccgtgcccagcgcgccaattgacccgcaggctcagctggaggctgacaaacgggccgtttacaggcatcctctctttcccttactgactctgttgtttgagaagtgcgaacaggccacacaaggatctgaatgcataacttccgcaagcttcgacgtggacattgagaattttgttcatcagcaggaacaggagcacaagcctttctttagtgatgaccctgagctggacaatctcatggtgaaagctatacaagtgctgaggattcacctgttggagctggagaaggttaatgaactttgcaaagacttttgtaacagatatattacgtgtctgaaaaccaagatgcactcagacaacctactgaggaacgatctggggggtccctacagcccaaaccaacctagtattaaccttcactcgcaagacctgctccaaaactcccccaatagtatgtcaggagtttccaataatccccaaggcattgtggtacccgcttcagcactgcagcagggcaatatcgccatgaccacagtcaactctcaggtggtctccggaggtgccctgtatcaaccagtgaccatggtgacctcacaggggcaagtggttacccaggctattccccaaggcgccatccagatccaaaatacccaagtgaatcttgacctcaccagcctgctggataacgaggataagaagagtaagaacaaacggggcgtgctgcccaaacatgccacaaatattatgcggagctggctatttcagcacttaatgcacccgtaccctaccgaagacgagaagcgacaaattgctgctcagacaaacctgactctgcttcaggttaacaattggtttatcaacgctagaagaagaattctccagccaatgcttgacgccagcaatcctgaccccgccccaaaggctaaaaaaatcaagtctcagcatagacctacccagcgcttttggcccaattccatcgccgcaggagtgctccagcagcaagggggggcccccgggacaaaccccgacggctcaatcaatctggacaacctccagtctctgtcaagcgactccgctacaatggcaatgcaacaggcaatgatggccgcccacgacgactctctggatggcaccgaggaggaagacgaggatgagatggaggaagaagaggaagaggagctggaggaggaagtcgacgaactgcaaacgactaacgtaagcgacctgggcctggagcactccgatagcctcgaatag

SEQ ID NO: 127981 - DNA, 120 bp, synthetic construct
  misc_feature 1..120: note = Description of Artificial Sequence: Synthetic coding sequence
  source 1..120: mol_type = other DNA
atgatgcagcacgcaagcccggccccggccttgacgatgatggccacacagaatgtcccccccccaccttatcaggatagtccacagatgactgctaccgcccagcctccttccaaatag

SEQ ID NO: 127982 - DNA, 1332 bp, synthetic construct
  misc_feature 1..1332: note = Description of Artificial Sequence: Synthetic coding sequence
  source 1..1332: mol_type = other DNA
atgaccgctaccgcccagccccctagtaaagctcaggccgtccacatttccgccccctcagccgccgcaagcacacccgttccctccgcccccatagacccgcaagcgcagctggaagccgacaagagggcagtgtaccgccatcctctgttccctcttttaacactgctttttgaaaagtgcgagcaggccacccaaggatccgagtgcattacctctgcctcattcgacgtcgacatcgaaaactttgtgcatcagcaggagcaggaacacaaacccttcttttcagatgaccccgaactcgataacctgatggtgaaggctatccaggtactccgcatccacctcctcgagcttgaaaaggtaaatgagctctgtaaggacttctgtaacaggtatatcacctgcctgaaaactaaaatgcattctgataacctcttgaggaacgatctcggggggccgtactctccaaaccaaccatctattaacctgcattcccaagacctgctccagaattctcctaattcaatgtctggggtgtcaaacaatcctcagggaatcgtcgtaccagcctctgcactgcagcaagggaatatcgctatgacaacggtgaactcccaggtagtgtctggtggtgctttatatcagcctgtcactatggtgaccagccagggccaggtggtgactcaagcaattcctcagggggccatccagattcagaacacccaagttaacctcgacctcacttctctgctggataatgaagacaaaaaaagcaagaacaagagaggagtcttgccaaagcatgccactaatatcatgcgctcgtggctattccagcatctcatgcacccctaccctaccgaagacgagaagagacagatagccgcccagaccaacttaacgctgctgcaggtcaacaattggttcatcaatgccagaagacgcattctgcagccaatgctggacgcgtccaaccccgaccccgcacctaaggcgaagaaaattaaaagtcaacatcggcctacacagcgcttctggcccaattccattgcagccggagtgctccagcagcagggcggagcccccggcactaatcccgatgggtccataaatctggacaatctgcaatccctgagcagcgactccgcaaccatggccatgcagcaagctatgatggcggcgcacgacgactcccttgacggtactgaggaggaggacgaagacgaaatggaggaagaggaggaggaagagctcgaggaggaagtggacgagctacagacaacaaatgtgtccgacctaggacttgagcattctgattcactcgagtag

SEQ ID NO: 127983 - DNA, 1332 bp, synthetic construct
  misc_feature 1..1332: note = Description of Artificial Sequence: Synthetic coding sequence
  source 1..1332: mol_type = other DNA
atgaccgccaccgcccagccaccgtccaaagctcaggcagtacacattagcgcgccctccgcagccgcatctacacctgtcccatctgctcccatagacccgcaggctcagctcgaagccgacaagcgggctgtctaccgtcaccctctttttccactgctaacgctgttgtttgagaaatgcgagcaggccactcagggatcagagtgcattacctctgcctctttcgatgtcgacatcgaaaacttcgtgcaccagcaggagcaggagcataagcctttcttcagcgatgatccagagctggacaacttaatggtcaaagccattcaagtcctccggatccatctactggaactagagaaggttaatgagttgtgcaaggacttctgtaatcggtacataacctgtctgaagacaaagatgcactccgacaatcttctgagaaacgaccttggggggccttactccccaaatcagccatccattaatctgcattcacaggaccttctccagaactcccccaattccatgtcaggcgtaagcaataatcctcagggcattgtggttccagccagtgccttgcaacaagggaatatcgccatgaccacagtgaattctcaggtggtgtccggtggtgccctgtatcagcctgtaactatggttactagccagggtcaggttgtaactcaggcaataccacagggcgcaatccagatccagaatacacaagtcaacctcgacctcaccagcttacttgataatgaggataagaaaagcaagaacaaacgaggagttctgcctaaacatgccactaacattatgagatcctggctgtttcagcacctgatgcacccctacccaactgaagatgagaaacggcagatcgctgcccagactaatctgactttactgcaagttaataactggttcatcaatgctagacgcagaattctgcagccaatgcttgacgctagtaacccagatcctgctccaaaggccaaaaagatcaagtcccagcatagaccaacccagcggttttggcccaattccattgccgcaggagtgttgcagcagcagggaggtgctcctggcaccaatcctgatggttccataaacttagacaatctgcagtctctgtcttccgacagcgccactatggccatgcagcaggccatgatggcggctcatgacgattcactggacggaacggaggaagaagatgaagatgaaatggaggaggaggaagaggaggaactcgaagaggaagtggatgagctacaaacgaccaatgtctctgatttagggctggagcattcggactctttggaatag

SEQ ID NO: 127984 - DNA, 123 bp, synthetic construct
  misc_feature 1..123: note = Description of Artificial Sequence: Synthetic coding sequence
  source 1..123: mol_type = other DNA
atgatgcaacacgcatccccagcaccagcgttgactatgatggcgacccagaacgttccgccgcccccataccaagatagcccccagatgacggctactgcgcagccaccttcaaaggcctag

SEQ ID NO: 127985 - DNA, 921 bp, synthetic construct
  misc_feature 1..921: note = Description of Artificial Sequence: Synthetic coding sequence
  source 1..921: mol_type = other DNA
atgatggccactcagaacgttccgccaccaccatatcaagattcacctcaaatgacggccacagcacagcctccgtctaaggcccaggcagtgcacatctcagctccatcagcggcggctagcaccccagtccccagtgcgcccattgacccacaggctcagctggaggctgataaacgcgcagtgtatcgtcaccccctgtttcctcttctgactcttctcttcgaaaaatgtgagcaggcgacccaagggtcagaatgcatcacgagcgcatcttttgacgtggacatcgagaattttgtgcaccagcaggagcaggagcacaaaccgttcttttcggacgaccctgagctcgataatctcatggtcaaagcaattcaagtgctacgcattcacctgttagagctggaaaaggtgaacgaactgtgcaaagatttctgcaacaggtacatcacgtgtcttaaaacaaaaatgcacagcgacaacctgctgcggaacgatctggggggcccgtacagccctaatcagccctctatcaatctacactctcaggacctcctccaaaatagccccaattcgatgtcaggagttagcaataaccctcaaggaatagtcgtccctgcatccgctctacagcagggaaacattgccatgactacagtgaatagtcaggtcgtatcgggcggggccctctaccagcccgtcaccatggtgactagccagggacaggtggtcactcaagccattcctcagggtgcaatccagatacagaacacccaggttaatctggaccttaccagccttctggacaacgaggacaaaaaatctaaaaacaagcgcggagtgcttcccaaacatgctaccaacatcatgaggtcctggctgtttcaacatcacgcaccgttacctcacggagggtag

SEQ ID NO: 127986 - DNA, 1227 bp, synthetic construct
  misc_feature 1..1227: note = Description of Artificial Sequence: Synthetic coding sequence
  source 1..1227: mol_type = other DNA
atgagtcggcctcatccaactcgcacagcccaccgccatcccctgttccctctcctcacattgctgttcgagaaatgtgagcaggccacacagggcagcgagtgcattacctccgcaagttttgacgtggacattgagaatttcgtccaccagcaggagcaggaacataagccttttttttcagatgatcctgagcttgacaatctgatggtgaaggctattcaggtgttacgcattcacctactcgagctggaaaaagtcaatgagctatgtaaggacttctgcaacaggtacattacttgcttgaagacgaagatgcattccgataatctgctcaggaatgacctaggggggccttacagccccaaccagccatcaatcaacttacattcccaagatctattgcagaacagtcccaacagcatgtctggggtctctaataacccccaaggtatcgttgttcccgcctccgcacttcagcaaggcaatattgcaatgacaaccgttaattcccaggttgtgtccgggggagcactctaccagccagtcacgatggtgactagtcaaggtcaagtggtgactcaggctattccccagggtgccatccagatccagaatacacaagtgaatcttgatttaacgtctctgctggacaatgaggataagaagagcaagaacaagagaggcgtgctgccaaagcacgcaaccaacataatgcgcagttggctcttccagcatcttatgcatccctacccgacagaggatgagaaaaggcagatcgcggcgcagactaatttaacgctgctgcaggtgaataactggttcatcaatgcaaggcgtagaatcttacagcccatgctggacgctagcaatccagaccccgctcccaaagcaaaaaaaatcaagtcccagcaccggccaacgcagagattctggcccaactcaattgccgccggggtcctacagcagcaggggggggcaccaggaaccaaccctgacggatctattaatttggacaatctgcagagtctctcctccgactccgccacgatggccatgcagcaggctatgatggcggcgcacgacgacagcttagacggaaccgaggaagaagacgaggacgaaatggaggaagaagaagaggaggagctcgaagaggaagtggacgaactccaaaccaccaacgtgtcagatctggggcttgagcacagcgatagcctcgagtag

SEQ ID NO: 127987 - DNA, 297 bp, synthetic construct
  misc_feature 1..297: note = Description of Artificial Sequence: Synthetic coding sequence
  source 1..297: mol_type = other DNA
atgatgcagcacgcgtcaccggctccagccctgacaatgatggccactcagaacgtccccccccctccttatcaggacagccctcagatgaccgccaccgcccagccccctagcaaggcacaggcagttcatatctcagcccctagtgccgcagcaagtacccctgtccctagcgctccaattgacccacaggcacaactggaagccgataaacgcgccgtttaccgccaccctctttttccactattgacattattattcgagaagtgtgagcaggctactcagggctcggagtag

SEQ ID NO: 127988 - DNA, 234 bp, synthetic construct
  misc_feature 1..234: note = Description of Artificial Sequence: Synthetic coding sequence
  source 1..234: mol_type = other DNA
atgatgcaacatgccagtcctgcccccgccctgaccatgatggcgacacagaacgtgccgccaccaccttatcaggactcccctcaaatgaccgcaacggcccagccacctagtaaagcccaggcagtacatatctccgcaccgtcagccgctgcatccacgccagtcccgagcgcccccattgacccacaagctcaattagaggcagataaaagggccgtgtatagatggtag

SEQ ID NO: 127989 - DNA, 990 bp, synthetic construct
  misc_feature 1..990: note = Description of Artificial Sequence: Synthetic coding sequence
  source 1..990: mol_type = other DNA
atgacacgggattttaaacctggcgatctgatattcgctaaaatgaaaggttacccccactggcccgctcgagtggatgaggtcccggacggagccgtaaaaccccctacgaacaaactccccatcttcttcttcggcacgcatgagacagcctttctgggaccaaaggacatctttccatactccgagaataaggagaaatacggaaaacccaataagcggaaaggttttaatgaggggctctgggagattgacaacaatccgaaagttaaattttcttcccaacaagctgcaaccaagcagtcaaatgcaagctctgatgtggaagtggaagagaaagaaacgagcgtgtcgaaggaggatactgatcacgaggaaaaagccagcaatgaagacgttacgaaggctgttgatattaccactcctaaggcagcgaggcgtggacgaaaaaggaaagccgagaagcaagtggaaacagaggaagctggagtggttacgaccgccaccgcatccgtgaatttaaaagtgtctcctaagcgaggcaggccagctgcaacggaggtgaaaatcccaaaaccccgaggacgtcccaaaatggtcaagcaaccatgcccatccgagtctgatatcatcactgaggaagataagtccaaaaagaaggggcaagaagaaaagcagccaaagaagcaacccaagaaggacgaagagggacagaaagaagaagataaacctaggaaggaaccggacaagaaggaggggaagaaggaggtggagtctaaaaggaagaacctcgctaagactggggtcacaagcacctccgacagcgaggaagagggtgacgaccaggaaggtgagaaaaagcgtaagggcggccgcaactttcagacggcccacaggagaaacatgctgaaaggccaacacgagaaggaagcagccgatcggaaacggaagcaggaggagcaaatggagactgagcattttgcattgtag

SEQ ID NO: 127990 - DNA, 1002 bp, synthetic construct
  misc_feature 1..1002: note = Description of Artificial Sequence: Synthetic coding sequence
  source 1..1002: mol_type = other DNA
atgacgcgggacttcaaaccaggggatcttattttcgcaaaaatgaaaggatatccccattggcctgcccgagtcgacgaagtacctgatggggctgtaaagccaccgactaacaagctgcctatttttttcttcggtacccatgaaaccgcctttctgggacccaaagacatttttccctatagcgagaataaggagaaatatgggaagcctaataaacggaagggtttcaatgaggggctatgggagattgataataatcccaaggtaaagttctcttcccagcaggccgccacgaagcagtcaaatgcaagcagcgacgttgaagtggaggagaaggaaacttctgtaagtaaggaggatacagaccacgaggaaaaggcttcaaatgaagacgttactaaagctgtcgacatcaccactcccaaggccgcacggagagggagaaagcgtaaggccgagaaacaagtggagactgaggaagcaggcgtcgtcaccaccgcgacggccagcgtcaatctgaaggtgagccccaagcgcggaagacctgccgcgacagaagttaagattcctaagccccggggccggcccaagatggtgaagcagccttgcccatcggagtctgatattattaccgaagaagataagtctaaaaagaagggccaggaagagaaacagcctaagaagcagcccaagaaggatgaggagggacagaaagaggaagacaagccccgtaaagagcctgataagaaggagggcaagaaagaggttgaaagcaaacgaaagaatcttgctaagacaggagtcacttcaacatcggatagtgaagaagagggcgacgaccaggagggcgagaaaaagcgaaagggcggaaggaactttcagacagcccacagaaggaacatgctcaaaggtcagcacgaaaaggaggctgcagaccgcaaaaggaagcaggaggagcagatggagacggaacaccaaacaacttgtaatctgcagtag

SEQ ID NO: 127991 - DNA, 1593 bp, synthetic construct
  misc_feature 1..1593: note = Description of Artificial Sequence: Synthetic coding sequence
  source 1..1593: mol_type = other DNA
atgacacgtgatttcaagccgggagacctcatatttgcaaaaatgaaagggtaccctcactggccagctcgggttgacgaagtccctgacggagccgtgaaaccacctacaaacaaactgccaatcttcttttttggaactcacgaaactgcttttcttggccccaaagatatatttccctactctgagaataaagagaagtacgggaagcctaataaaaggaagggcttcaatgaaggtctgtgggaaatcgataataatcctaaagttaaattctcctcacaacaggctgccaccaagcagagcaatgcctcaagtgatgtagaggtcgaggaaaaggaaacctcagtgagcaaagaagacacagaccacgaagagaaggcttccaacgaggatgtgacaaaagccgtggatatcactacaccaaaggcagccaggcggggaaggaagaggaaagcagagaagcaggttgaaaccgaggaagcgggagtggtgacaactgccaccgctagcgtgaacctcaaagtaagtcccaaaaggggacgcccagctgcaacggaagtgaagattcccaaacctcgcggcaggccaaaaatggtgaagcagccttgcccctcggaatcagacataatcacagaggaagacaaatctaagaagaaaggccaagaagaaaagcagcccaaaaagcaacctaaaaaggacgaggagggccaaaaggaagaagacaagccacggaaagagcctgataaaaaggaaggaaagaaggaagtagaatcaaagaggaagaaccttgccaagaccggggtaactagtactagcgacagcgaggaagagggcgacgaccaggaaggggagaaaaagcgaaaaggtggacggaactttcagaccgctcaccgtcggaatatgttgaaaggacagcacgaaaaggaggcggcagacagaaaacgaaaacaggaagagcagatggaaacggaacagcagaataaggacgaaggcaagaaaccggaggttaaaaaggtggaaaaaaagagagaaacaagtatggacagccgactgcagcgcatccacgcagaaatcaaaaactcactgaagattgataacctggatgtgaataggtgtattgaagctctggacgagctcgcttcactgcaggtgacgatgcaacaagcccagaaacacacagagatgattaccacgctcaaaaagattcgcaggttcaaagtcagccaggtgatcatggagaagagcacgatgttatataataagtttaagaatatgtttctggtgggggagggggactccgtcatcacgcaggtccttaataaaagcttagctgaacagcgccaacatgaagaggctaacaaaaccaaggaccaaggaaaaaaagggcctaacaagaagctcgagaaagaacagaccgggagcaaaacactgaatggcgggtccgacgcccaagacggcaaccagccacaacataatggagagagcaacgaagacagcaaagacaaccacgaggctagtacgaagaagaaaccatctagtgaggaaagagaaaccgaaatctccttgaaggattcaactttggacaactag

SEQ ID NO: 127992 - DNA, 1593 bp, synthetic construct
  misc_feature 1..1593: note = Description of Artificial Sequence: Synthetic coding sequence
  source 1..1593: mol_type = other DNA
atgacccgggacttcaaacctggcgaccttatcttcgccaaaatgaaggggtatccccactggcctgcccgggtggacgaagttcccgatggcgccgtaaaaccccccacgaacaagctgcccatcttcttcttcgggactcatgagaccgcgttcttgggcccaaaggatatatttccgtattctgaaaacaaggaaaaatacggcaagcccaataaaaggaagggcttcaacgaaggtctgtgggagatagacaacaatccgaaagtgaaattctcaagccagcaggctgcgactaaacaaagcaatgcaagctccgatgtcgaggttgaagagaaggaaacctcagtgagcaaagaggatacggatcacgaagaaaaggcctccaatgaggatgtgactaaagcagtggacattaccacacccaaagccgcaaggcgggggcgcaaacgcaaggcagaaaagcaagtggaaaccgaagaggccggagtagttacaactgcgaccgcctctgtaaatttgaaggtgtcacctaagcgcggtcgccccgctgctactgaagtaaagattccaaaaccccgcggtcggccaaagatggtaaagcaaccatgcccatctgagagtgatataattactgaagaagacaagagtaagaagaaagggcaagaggagaaacagcctaagaagcagccgaagaaagatgaggagggccagaaggaagaggacaagcctaggaaagaaccggacaaaaaggaaggaaagaaggaagtggagtccaaacgaaagaaccttgccaagacaggcgtcacgagtaccagtgactccgaggaggagggtgacgatcaggagggtgaaaagaaaaggaaggggggccgtaacttccagacggcccacagaagaaatatgctaaaggggcaacatgagaaggaggcggccgatagaaaacggaaacaggaggagcagatggagactgaacagcagaataaagacgagggcaagaagccagaggtgaagaaggtggagaagaagcgcgagacctctatggacagcaggctgcagagaatccatgcggaaataaaaaattcgttaaaaattgataacctggacgtgaatcgctgcattgaagctctggatgaactcgcgtcccttcaggtgaccatgcagcaggctcaaaagcacaccgaaatgattactactttaaagaaaatccggaggttcaaggtcagccaggtgattatggaaaagtcaaccatgctgtacaacaaatttaaaaatatgtttctcgtcggtgagggagactctgtgattacccaggtcctgaataaaagcctagcagagcaacggcaacacgaggaggcaaacaaaacaaaggatcagggcaagaagggacctaacaagaagctggagaaagagcagacaggcagtaagacactcaacggtgggtccgacgcccaagatggcaatcagccacaacacaatggcgagtcaaacgaagatagcaaggataaccatgaagctagcaccaagaaaaaaccgagctccgaagagcgggaaacggagatcagcttaaaagactcaactctggacaattag

SEQ ID NO: 127993 - DNA, 1002 bp, synthetic construct
  misc_feature 1..1002: note = Description of Artificial Sequence: Synthetic coding sequence
  source 1..1002: mol_type = other DNA
atgaccagagacttcaagccaggcgacctgatttttgccaagatgaaaggctatccacattggcctgcacgcgtggatgaggtaccggatggagcagtgaagccacctacaaacaaattgcctatcttctttttcggcacgcacgagacagctttcctcggccccaaggacatctttccttactccgaaaacaaggagaaatacggaaagcccaataaacggaaaggctttaacgaaggactctgggaaattgataataaccccaaggtgaaattttcctctcaacaggcagccactaaacagagcaatgcctcctccgacgttgaagtcgaggaaaaggagacttccgtttccaaagaggatacagatcacgaagagaaggcaagtaatgaagacgtgaccaaggccgtcgatataaccactcctaaagccgctcgtagaggacggaagcggaaagccgaaaaacaggtggaaactgaagaagccggggtcgtgacaactgctacggctagcgttaatttgaaggtttccccaaaaaggggcaggccggctgctacggaagttaagataccaaagccccgaggcaggcccaaaatggtcaaacagccttgtcccagcgaaagcgacattataaccgaggaggataagagcaagaaaaaaggacaagaggaaaaacaacctaagaaacagccaaagaaggacgaagagggccagaaagaagaggataaacctaggaaagagcccgataagaaagaggggaagaaggaagttgagtcaaaacggaaaaatctcgctaaaacaggcgtgacatccactagcgattcggaggaggagggtgacgatcaggagggcgagaaaaaaaggaaaggtggaagaaatttccaaacagcccaccggagaaacatgctaaaaggccaacacgagaaggaagctgccgatcgcaagcgcaaacaggaagaacagatggagacagagcaccagactacatgcaacctacagtag

SEQ ID NO: 127994 - DNA, 1362 bp, synthetic construct
  misc_feature 1..1362: note = Description of Artificial Sequence: Synthetic coding sequence
  source 1..1362: mol_type = other DNA
atggcacatatcactatcaatcagtacttgcagcaggtgtatgaagccatcgattcgcgtgacggggcttcttgcgctgagctcgtatcatttaaacatcctcatgtcgctaacccaagacttcaaatggccagccctgaggaaaagtgtcagcaggttctcgaaccaccatacgacgaaatgttcgccgcccatctgcgttgcacctacgccgtcgggaatcacgatttcatcgaggcctacaagtgccagacagtaattgtgcaatacccattgtctttcatggctgccgtcccacataggacccacgccgttgactacctaggcttggagactcgaaagcactgggcctcctgctcctttctccagctagagcgtaacgacagcgtgttagagcagaagctggtgagcgctctatccctgggtacgagtttcctgagggcatttcaggctcacaaagaggagaattgggctctccccgtgatgtatgccgtggccttagatcttagagtgttcgctaacaacgccgatcagcagctggtgaagaagggaaagtccaaggtcggggatatgctggagaaagcggctgagctccttatgtcatgtttccgcgtctgtgcatctgatacgcgggcagggattgaggattccaaaaagtggggcatgctgttcctggttaatcagctgtttaagatttattttaagattaataaactgcatctgtgcaagccgctcattcgggccatcgactcaagtaacttaaaggacgactattctacagcccagagggtgacatacaaatattacgtaggccgaaaagccatgtttgactctgatttcaaacaggcggaggagtatcttagcttcgcctttgagcactgtcacaggtcttctcagaagaacaagagaatgatactcatatacctgctgcctgtaaaaatgctgctgggacatatgcccacggttgagctgctgaaaaagtatcatctcatgcagttcgccgaagtgacccgagcagtgagcgagggcaacctgcttctgttgcatgaggcactggctaagcacgaggctttttttattagatgtgggatatttctgatccttgaaaaattaaagatcataacttatcgcaaccttttcaaaaaggtctacctgttgttaaagacgcaccagctgtcactggatgcttttcttgtagcactgaaatttatgcaggtggaggacgtcgacattgacgaggtgcagtgtattctggccaacttaatttacatggggcatgtgaagggctacatctctcaccagcatcaaaagctggtggtaagtaaacagaacccttttcctcctctgagtacagtgtgctag

SEQ ID NO: 127995 - DNA, 1200 bp, synthetic construct
  misc_feature 1..1200: note = Description of Artificial Sequence: Synthetic coding sequence
  source 1..1200: mol_type = other DNA
atgcgcttaaccgatgtcgtccagcaattggtttacgaagctattgatagccgcgacggtgctagctgcgctgagctggtatccttcaagcacccccacgtagcaaacccacgactccagatggcatccccagaagaaaaatgccagcaggtgttagagcctccgtacgatgagatgtttgccgcccacttacgctgcacatatgctgtgggcaaccacgactttatcgaagcatataaatgtcagaccgtgattgtccagtacacatctttccttagagcgttccaggcacacaaggaggaaaactgggcgctgcccgtgatgtatgctgtggctctggacctgcgagtcttcgccaataacgcagaccaacagttggtgaagaagggcaagtccaaggttggggacatgctggaaaaggctgctgaactcctgatgtcctgttttagggtttgtgcgtcagacacaagggcaggtatcgaggacagcaaaaagtgggggatgctgtttctcgtgaaccagctgtttaagatctacttcaagatcaacaaactgcacctttgtaaacctctcatccgtgctatagactcttcaaatttgaaagacgactattcgacagcccaacgggttacctacaagtattatgtgggaagaaaggctatgttcgatagcgattttaagcaggccgaggagtacctgagcttcgctttcgaacactgccacaggagcagtcagaagaacaaaagaatgatacttatctatcttttaccggtcaaaatgcttctggggcatatgccaactgtcgagcttcttaagaaatatcatcttatgcagtttgccgaggtgactcgggccgtatctgagggcaacctgctgctccttcatgaggcgctcgctaagcacgaagccttttttattcggtgtggcatcttcctgatcctggagaaacttaagattattacatacagaaacctgtttaagaaagtgtatctgctgctgaagactcaccaactctctctcgacgctttcctagttgcactgaagtttatgcaggtggaagatgtagacattgacgaagttcagtgcatcctcgcaaacctaatttatatggggcacgtgaaggggtacataagtcatcagcaccagaagctggtagtgtctaagcaaaacccatttcctccattatctaccgtttgttag

SEQ ID NO: 127996 - DNA, 1200 bp, synthetic construct
  misc_feature 1..1200: note = Description of Artificial Sequence: Synthetic coding sequence
  source 1..1200: mol_type = other DNA
atggcacacataaccatcaatcaatatctccagcaggtctatgaggccattgactcccgcgatggcgcatcttgcgcagagctggtgagttttaagcatccccatgttgccaaccctcgactgcagatggcatccccagaggaaaaatgtcaacaggtattggagccaccttatgatgagatgttcgccgcccatttgcgctgtacgtacgccgtcggcaaccatgacttcattgaagcctacaagtgccagacagtgattgtgcagagctttctcagagcctttcaggcacacaaagaggaaaactgggcccttcccgtgatgtatgccgtggctctcgacttacgtgttttcgccaacaatgccgatcagcagctggtgaaaaagggaaaatccaaagtcggggacatgttggaaaaggcagccgaactactgatgtcctgttttcgagtctgcgccagcgacactagggctggcatcgaggattcaaaaaagtggggcatgctgttcctagtgaaccagctcttcaagatatactttaaaattaacaagttacacctctgcaagcccctgatccgggctattgattctagcaatcttaaagatgattattccactgcccagagagtgacctataaatactatgtcggtcggaaggccatgttcgattctgacttcaagcaggccgaggaatatttgagcttcgcgttcgaacattgccaccgctcttcccagaagaacaaaagaatgatcttaatatatctgttgccagtgaaaatgctgctcggtcatatgcctactgtggagttacttaagaagtatcacttaatgcaatttgccgaggtgacgcgtgcggtgtccgagggaaacctactgctgcttcatgaagccctcgctaaacacgaagctttcttcatacgatgtggcatttttttaatcctcgaaaagttgaagattatcacttatcgcaacttgtttaaaaaagtgtacctgctgttaaagacccatcaactgagccttgacgcctttttggtagccctcaagttcatgcaggtggaagatgtggacattgacgaagttcaatgtattctagccaatctcatttacatgggacacgtaaagggttacataagccaccagcatcagaagctggtggttagtaagcagaacccatttcctcccttgtctactgtctgttag

SEQ ID NO: 127997 - DNA, 1131 bp, synthetic construct
  misc_feature 1..1131: note = Description of Artificial Sequence: Synthetic coding sequence
  source 1..1131: mol_type = other DNA
atggcccatattactataaaccaatacctgcagcaggtgtacgaggccattgattcacgggacggcgcatcttgcgctgaactggtttcttttaaacatcctcatgtcgccaatccgcgccttcaaatggcctctcccgaagaaaagtgccaacaggtgctcgaaccgccctatgacgaaatgttcgcagcccacctccggtgcacctacgccgttggaaaccacgattttatagaagcttacaagtgtcagaccgtcatcgttcagtatcctcttagcttcatggcagcagtggccgatcagcagctggtcaagaagggtaagtcgaaggtgggagatatgctggaaaaggcagccgaactcctgatgagctgtttccgggtttgcgctagtgacacccgtgctggcattgaggatagtaaaaaatgggggatgctgttccttgtgaaccagctgtttaagatctattttaaaattaacaaactgcatctgtgcaagccactcattcgagcaatcgacagcagcaatctaaaggatgattactctactgcccagcgggtgacctataagtattacgtgggcagaaaggccatgtttgatagcgattttaagcaggctgaagagtacctaagtttcgctttcgaacactgccacagaagttctcagaaaaacaagagaatgatccttatctacctcctgccagtaaagatgctactaggccatatgcctacagtggaactactaaagaagtaccacctgatgcagttcgcggaggtgacgcgcgctgtatccgaaggtaacttgctgttgctgcatgaggccctcgcaaaacacgaggccttctttattcgctgcgggatctttttgatactggagaagctgaaaattatcacttacagaaacttgttcaagaaggtttatcttttacttaaaacccatcagcttagtctggacgcctttctggttgcccttaagttcatgcaggtggaagatgttgatattgacgaggtgcaatgtattctggctaacttgatctacatgggacacgtgaaggggtacatttcacaccagcaccagaagttagtggtgtctaaacagaatcctttccctccactttctacagtctgttag

SEQ ID NO: 127998 - DNA, 1200 bp, synthetic construct
  misc_feature 1..1200: note = Description of Artificial Sequence: Synthetic coding sequence
  source 1..1200: mol_type = other DNA
atggcgcacattaccatcaatcagtacctgcagcaggtgtacgaggccattgactccagggatggcgcgagctgcgctgagcttgtctcctttaagcatccgcatgttgccaatcctcggcttcagatggcctctcccgaagaaaaatgccagcaggtgcttgagcctccttacgatgagatgttcgcagcccatctgcgatgtacttatgcagtgggaaaccacgattttatcgaggcctacaaatgccagactgtgattgtacaaagctttcttcgggcgttccaggctcacaaggaagaaaactgggccttaccagttatgtatgcggtcgctctggacttgcgcgtgttcgccaacaacgcagaccaacagctggttaagaaggggaagtctaaagtgggcgacatgctcgagaaggcggccgagctcttgatgagttgcttccgagtttgcgccagcgacacaagggccgggattgaggacagcaagaaatgggggatgttgtttctcgtgaatcaactttttaagatctactttaagatcaacaagctccatctgtgtaaaccgctcatccgcgccattgatagttctaacttgaaagacgattattcaacagcccagcgtgtgacatataagtactacgtaggaagaaaggcaatgttcgattctgatttcaaacaggccgaggagtacctcagcttcgcttttgaacattgccaccggagcagtcagaagaataaaaggatgatcctcatatatttactgccagtgaaaatgcttctaggccacatgcccactgtggagttgctgaagaagtaccatctaatgcaatttgctgaagtgaccagggccgtgagtgagggcaaccttctcctcctccatgaggccctggccaagcatgaggccttttttatcagatgcggcatctttctgatccttgaaaagttaaagataattacttacaggaacctttttaagaaagtgtacttgctattgaaaacccaccaactgagtctcgacgccttcctcgtcgcgctgaagtttatgcaggtcgaggacgtcgacatcgatgaggtgcagtgtatactcgccaatcttatctatatgggccatgtaaagggttatatctcacatcaacaccagaagttggtcgtgagcaaacagaatcccttccccccactgagtacagtgtgttag

SEQ ID NO: 127999 - DNA, 1200 bp, synthetic construct
  misc_feature 1..1200: note = Description of Artificial Sequence: Synthetic coding sequence
  source 1..1200: mol_type = other DNA
atggcacacattactatcaaccaatacctccagcaggtgtatgaggccattgactctcgagatggtgcatcctgcgcagagcttgtgtccttcaaacacccccacgtcgccaaccctcgacttcagatggccagtccagaagagaagtgccagcaggttctcgagcctccttatgacgagatgttcgcagcccacttgagatgcacatatgctgttgggaaccacgactttatcgaggcctataaatgccagacagtaattgtccagtccttcctacgggcctttcaggcacacaaggaggaaaactgggccctccccgtcatgtacgctgtggccctcgatcttcgggtattcgccaataatgcagaccagcaactggttaaaaagggtaagagcaaagtgggggatatgcttgaaaaggctgcagaactactgatgtcttgtttccgtgtttgcgcctccgataccagggctggcatcgaagactccaaaaaatggggcatgctttttctggtgaatcagttatttaagatttattttaagatcaacaaactgcacttatgtaagcctctcatccgcgctattgacagcagcaacctgaaggatgattatagcactgcccagcgggtcacctataagtactacgtgggccgcaaagccatgtttgactctgattttaaacaggccgaggaatatttgtcatttgcttttgagcattgtcacaggtccagtcagaaaaataaaaggatgattttgatttatctgcttccggtgaaaatgctgctaggacacatgcccaccgtggaattgttgaaaaagtatcatttgatgcagttcgcagaggtgacacgggctgtgtccgagggcaacctcctgcttctccatgaagccctggccaagcacgaggcattctttattcggtgtggaatctttctaatcctcgaaaagcttaaaatcatcacttaccggaacttgtttaaaaaagtgtatctcctgctcaagactcaccagctgtcacttgacgcattcctagtagcactcaagtttatgcaggttgaggacgtggatatcgacgaagtccagtgtatcttagcaaacctcatctacatgggtcatgttaagggatatattagtcaccagcaccagaaactcgtagtgtctaaacaaaacccatttccacctctgtcgaccgtgtgctag

SEQ ID NO: 128000 - DNA, 1194 bp, synthetic construct
  misc_feature 1..1194: note = Description of Artificial Sequence: Synthetic coding sequence
  source 1..1194: mol_type = other DNA
atgcgcctgacagacgtggtccagcaactggtgtacgaagctattgactctcgggatggagcatcatgtgcggaattggtgtcttttaagcatccacatgtcgccaacccacgtcttcagatggcatctcctgaagaaaagtgccagcaggttctggaacctccctatgacgagatgttcgctgctcacctgagatgtacttatgcagttggcaaccatgacttcatagaagcttacaagtgccagactgtcatcgttcagagcttcctgcgagcctttcaggcacacaaggaagagaattgggctctgccagtcatgtacgccgtggcactggacctcagggttttcgctaataacgccgatcagcaactggtgaagaaaggtaaaagcaaagtgggcgatatgcttgaaaaggcagctgagctcctgatgagttgttttcgggtctgtgcatccgatacacgcgcggggatcgaggattccaagaagtggggaatgctgttcctggttaaccagctgttcaagatatactttaagattaataaacttcatctgtgcaagccactgatacgtgcgatcgatagttctaatttgaaagacgattattctactgcgcaacgagttacctacaagtattatgtgggtagaaaagctatgttcgacagtgacttcaaacaggccgaagagtacttatctttcgctttcgagcactgtcaccgatcaagccagaagaacaaaagaatgatactgatatacttgctgcccgtgaaaatgttgctggggcacatgcccaccgttgagctgctgaaaaagtatcatctcatgcagttcgcagaggttacccgagcagtgagtgagggcaatctgctcctactacacgaggccctggctaagcatgaggcattcttcatacgctgtggcatcttcctgattctggagaagctgaaaattattacctacagaaatttatttaaaaaggtatatctgctgctgaagacacatcagctgtccctggatgcgtttctggtcgctcttaagttcatgcaggtggaagacgttgacatcgatgaagtgcagtgtattctcgctaacctgatctacatgggccacgtgaaaggttatatatctcaccagcatcagaagctcgttgtgtctaagcaaaatccattcccacccctcagcacagtttgttag

SEQ ID NO: 128001 - DNA, 546 bp, synthetic construct
  misc_feature 1..546: note = Description of Artificial Sequence: Synthetic coding sequence
  source 1..546: mol_type = other DNA
atgcctaaaggtgggcggaagggaggccacaaaggccgtgctagacaatacacatctcctgaggaaatcgatgcccagcttcaagccgagaagcaaaaggcacgggaagaggaagagcaaaaagagggaggtgatggggccgcgggcgaccctaaaaaagagaagaaatctcttgactcagacgaatccgaggacgaagaggacgactaccaacagaagaggaagggcgtggaaggactgattgacattgagaatccgaatcgtgttgctcagactacgaaaaaggtgacgcagttggacttggatgggcccaaggagcttagtagacgggaaagagaggaaatcgagaagcagaaggctaaggagaggtacatgaagatgcacctcgcaggcaaaacagagcaggcaaaagctgatctcgccagactagcaataattaggaaacagcgcgaggaagcggcacgcaagaaggaagaggaaagaaaagccaaggacgacgcgacactgtccggcaagcgcatgcagagtctctctctgaacaagtag

SEQ ID NO: 128002 - DNA, 1026 bp, synthetic construct
  misc_feature 1..1026: note = Description of Artificial Sequence: Synthetic coding sequence
  source 1..1026: mol_type = other DNA
atggtgtcttcccaaccaaagtatgatctcattcgggaagtagggcgcggatcctacggggtggtctatgaagcagttataaggaagacatctgccagagttgcagtgaagaagatccgatgccacgcaccggaaaatgtagagttagcactgagggagttttgggccctaagctccattaaatcccagcatcctaatgtgatccatctggaagaatgtatcctgcagaaagatggtatggtgcagaagatgagtcacggcagtaactcatcattatacctccagctcgttgaaacgtctctgaaaggtgaaattgctttcgacccaaggtcagcatactacctctggtttgtgatggatttctgtgacggcggcgacatgaatgaatacctcctaagcaggaaacccaatcgcaaaactaatacaagtttcatgctccagctctcaagcgcactggccttcctacacaagaatcagattatccatcgcgacctgaaacccgataacatccttatctcacagacccgactggacacttcagacctggagcccaccctgaaggttgctgacttcggcctgtccaaagtatgctctgcgtcaggtcaaaatccagaggagcctgtatctgtgaacaagtgcttcctttctacagcatgtgggacagacttctatatggctccagaggtttgggagggccactacaccgccaaggccgacatctttgctctcgggatcattatttgggccatgttggagcgcattacctttattgacacagaaaccaagaaggagctgttgggcagctatgttaaacaggggacagaaatcgtcccagtcggtgaggcactacttgagaatcccaagatggaactgcttattccagtaaaaaagaagagcatgaatggaagaatgaagcagcttattaaagagatgttagccgctaatccacaagatcgacccgacgcgttcgaactcgaactgagacttgtccagatagccttcaaggacagttcctgggagacctag

SEQ ID NO: 128003 - DNA, 1026 bp, synthetic construct
  misc_feature 1..1026: note = Description of Artificial Sequence: Synthetic coding sequence
  source 1..1026: mol_type = other DNA
atggttagcagtcaaccgaaatatgacttgatccgcgaagtcggccgcggctcttacggggtggtgtacgaggcggttatacgaaagacaagtgctcgggtagctgtgaagaaaattcggtgtcatgcgcctgaaaatgtggagttggctttgagggaattttgggcactgagctcaatcaagagtcagcatcctaatgtaatccaccttgaagagtgcattctgcagaaagacggcatggtccagaagatgagtcatggctctaactcgtctttatacttgcagctggtcgagactagcctgaaaggtgaaatcgcttttgatcccagatccgcatactatctgtggtttgtgatggatttctgcgatgggggtgacatgaatgagtacctgctttctcgcaagcccaatcgcaagacaaatacgtcctttatgttgcagttgtcttcagctctggccttccttcacaagaaccaaataatccacagagacctcaaacccgacaacatattgataagccagactagactggacacaagcgacctcgaacccactttgaaagtcgcagattttggactgagcaaggtctgctcggctagcgggcagaaccccgaagagccagtttcggtgaacaagtgcttcctgagcaccgcttgtgggacggatttttacatggcccctgaggtgtgggagggacattataccgctaaggcggacattttcgctctcgggatcattatttgggcaatgctggagagaattacattcatcgatacagaaacaaagaaggaactgctgggcagctatgtcaagcagggtacagagattgttccggtgggggaggctttgctggaaaatccgaaaatggaattgctcataccggtcaagaagaagtccatgaacggtcggatgaagcaactgattaaagaaatgctcgccgcaaatccccaggatcgaccagatgccttcgagctggaactccgactggtgcagatcgcattcaaagatagtagttgggaaacgtag

SEQ ID NO: 128004 - DNA, 576 bp, synthetic construct
  misc_feature 1..576: note = Description of Artificial Sequence: Synthetic coding sequence
  source 1..576: mol_type = other DNA
atggtgagctcccagcccaagtatgacctcattcgcgaggttggaagaggcagctatggagtggtgtatgaagccgtcatccggaagacatccgcgagagtggcagtgaagaaaatcaggtgccacgcacctgagaatgtggagctagcgttaagggagttctgggccttgtccagcatcaaatctcagcacccaaatgtgattcatctggaggagtgtattttacagaaggacggaatggtgcaaaagatgtcgcacgggtctaacagctccctctatctgcagctggtcgagacgagcctaaaaggagagattgcctttgaccctcgatctgcatactatttatggttcgtgatggacttctgcgacggaggggatatgaacgagtacctgctgtcgaggaagcctaatagaaagactaatacatctttcatgctacagctgtccagcgccctggcctttctgcataagaaccaaattatccatagggacttaaagcctgacaatatccttatttctcagactcgcctcgacacttcagacttggagccgactcttaaagtcgccgacttttag

SEQ ID NO: 128005 - DNA, 4014 bp, synthetic construct
  misc_feature 1..4014: note = Description of Artificial Sequence: Synthetic coding sequence
  source 1..4014: mol_type = other DNA
atggacttcaccgcccagcctaaaccagctactgctctgtgcggcgtggtctctgccgacgggaaaatcgcctatccacccggcgtcaaagaaattaccgataagataacaacagatgagatgattaagaggctgaaaatggtggtgaagacttttatggatatggatcaagatagcgaagatgagaagcaacaatatctgcccctcgctctgcatcttgcgtcggaattcttcctgagaaatccaaataaggacgtaagacttctcgtcgcatgctgcctggccgacatttttcgcatttacgctcctgaggcgccttacacttctcatgataagttaaaggacatattcctgttcattacccgccagctgaaaggcctcgaggacaccaaaagtccacagtttaatcgatacttttacctgttggagaacctagcatgggtgaagtcttacaacatctgctttgagctggaggattgcaatgaaattttcatccagctctttcgaacattgttcagcgtcattaataactcccataacaagaaggtgcaaatgcatatgctggatttgatgagcagcattattatggagggcgacggggtgacacaagagcttctggactcaattctcattaatctgatccctgcccacaagaacctcaataagcagtcatttgatctcgcgaaggtgctgctgaagcgcactgtacagacaattgaggcctgtatcgcaaatttctttaaccaggtgttggtgctcggacgctcaagcgtgagtgatctctcagaacacgtcttcgatttaattcaggagctctttgcaatcgaccctcatttactgctctcagtgatgccacagttagaattcaaactgaagagtaacgacggagaagagcggctggctgtggttagactgttagccaagttattcggcagcaaggacagcgacctggctacacaaaatcggcctctgtggcaatgtttcttgggacggttcaatgacatccatgtgcccgtccgactcgaatctgtgaagttcgcatcacattgccttatgaaccaccctgacctggcaaaggacctcactgagtatctgaaagtgagatctcacgaccccgaagaggcaatccggcacgatgtcatagtaaccatcatcacagccgccaagcgggatttagcgttggtgaatgatcagctactggggtttgtgcgcgagaggaccctggacaaacgatggagagttagaaaagaggccatgatgggcctcgcccagttatacaagaagtactgtctgcacggagaagcaggaaaggaggctgccgagaaggtatcatggattaaagataagttgttacacatatattaccagaattctatcgatgacaagctcctggtggaaaagatatttgcacaatacctggtcccccacaacctcgaaacggaggagcgtatgaagtgtctctactacctgtacgcatctctcgaccccaacgccgtcaaggccctaaatgagatgtggaaatgccagaacatgcttcgatcacatgtccgggagctgctggatcttcataaacagccgacatcagaggcaaactgctcagcaatgttcggaaaactgatgaccatagcaaagaatctgcccgatcccggaaaggcgcaggatttcgttaagaaattcaaccaggtcttgggcgatgatgagaagctgagaagccagctggagctcctaatctcccccacctgctcctgtaagcaagcggacatctgcgtgagggaaatcgcccgcaagctagcaaacccgaaacaaccaaccaacccattcctcgaaatggtcaaattcctgctcgaaagaatcgcaccagtgcacatcgattctgaggcaatttctgctttagttaagctcatgaacaaaagtatcgaaggcactgctgacgacgaggaagagggcgttagccccgatactgcgatccggtctggcttggagttgctgaaagtactgtcttttacgcatcccacctcctttcactccgctgaaacttatgaatcacttctgcagtgcctgcggatggaggacgacaaagtggccgaagcggcaattcaaatatttcgcaataccggccacaaaattgagaccgacttgcctcagattcgatcaacactgatcccaatcctgcaccagaaggcaaaacggggtacccctcaccaggcaaagcaggcggtgcactgtattcatgccatctttaccaacaaagaagttcagcttgcacaaatctttgaaccgctttcacgctcactgaacgcggacgtacctgaacagcttatcacacccttggtgtctctgggccatatcagtatgttagccccagaccaatttgccagcccaatgaagagcgtggttgcaaattttatcgttaaagatctgctcatgaacgacagaagtaccggtgaaaagaatggcaaactatggagccctgacgaagaggtctctcctgaagtcctggcaaaggtccaggcaataaagcttttggtgaggtggctccttggtatgaagaacaaccaatcaaagagcgccaattccaccctgaggcttctgtccgcgatgttggtatccgaaggcgacttgacagaacagaagaggatctccaaatcagacatgagtaggctgaggctggccgccggatctgctatcatgaaattggcacaggagccctgctatcacgaaataatcaccccagagcaattccagctgtgcgcccttgtcataaacgatgagtgctatcaggtgcggcagatattcgctcagaagctccacaaggctctcgtgaagctcctgcttcccctggaatacatggctatatttgcactgtgcgcaaaggatccagttaaagaaagacgggcccacgcccgacagtgtcttctcaaaaacattagcattagacgagaatatataaagcagaacccaatggccactgagaaactgctgagcctgttaccagagtatgtggttccatacatgattcacctgctggctcatgatcccgacttcaccagatcacaggacgtagaccagctccgggacatcaaagagtgtctctggttcatgttagaggtcctgatgactaagaatgaaaataattctcacgcattcatgaaaaaaatggccgagaatattaagctgaccagagatgctcagagcccagatgaatccaagactaacgagaagctgtatacagtgtgtgacgttgcactctgcgtgattaacagcaaaagcgccctgtgcaacgccgattcaccaaaagatccggtgctccccatgaaattcttcactcagcccgaaaaggacttctgcaatgataagagctatatatctgaggagacccgtgtgctactgctgactggcaaacccaaacccgcaggtgtgttgggcgccgtgaacaaacccctgagtgctaccggaagaaagccatacgttcggtctaccgggacggaaacaggatctaacattaatgtgaactccgagttgaatccttctacgggaaatcggtcgagggaacagtcgtctgaagcggctgaaacaggggtctcggaaaacgaagagaatccagtccgtatcatctcagtgacccctgtcaaaaacattgaccctgtaaagaacaaggaaataaacagcgatcaggccactcagggtaacatatcttcagatcggggaaaaaagcgtacagtgaccgctgccggagccgagaacatccagcagaaaactgacgaaaaggttgatgagagcggtcctccagcaccgtctaagccacggagaggacgacgacccaagtccgagagccaggggaatgctacgaagaacgacgacctcaacaagccaatcaataagggtagaaagcgggccgccgtgggccaggaaagccccggcgggttagaggccggcaatgccaaagcgcccaagctccaagacctggccaagaaagctgcgcccgccgagcgccaaatcgacttacaacggtag

SEQ ID NO: 128006 - DNA, 1803 bp, synthetic construct
  misc_feature 1..1803: note = Description of Artificial Sequence: Synthetic coding sequence
  source 1..1803: mol_type = other DNA
atggattttaccgctcagccaaagcccgcaacagcactctgcggcgtggtgtcggcggacggcaaaattgcttaccctcccggagtgaaagaaatcacagataagataaccaccgacgaaatgatcaaaaggctcaagatggtggtgaagacctttatggatatggaccaagacagcgaggacgagaaacaacagtacctgccactggccctgcacctggcaagcgagttctttctgaggaaccctaacaaagacgttagactcctggttgcctgctgcctggctgacatctttaggatatatgcccctgaagctccatatacatcccacgataagctcaaggacattttcctttttatcaccagacagttgaagggactcgaagacactaaaagccctcaattcaataggtacttttacctcctggaaaacctcgcctgggtcaaaagttataacatctgctttgagctggaagattgtaacgagattttcatacaactcttccgcacgttgttctccgtgatcaataacagccataataaaaaagtacagatgcacatgctggacttgatgagcagtattatcatggagggggacggggtgacacaggagcttttagacagcatcctgatcaacctgattcctgcccataagaacttgaacaagcaatccttcgacctggctaaagtacttctaaagcgcaccgttcagaccattgaggcgtgtatcgcgaacttctttaatcaggtcctggtgctcggcagaagcagtgtgagcgacctgagtgagcatgtattcgatttgatacaggaactcttcgctatagacccccacctgctgctttcagtgatgccccagttagagtttaagcttaagagcaacgacggcgaggagcgtctggcggtcgtgcggctgctagccaagctgtttggcagcaaagactctgatctggcgacgcagaacaggccactttggcagtgcttcttgggtcgcttcaatgatatacacgtcccagtgcgtctggagtcagtcaagtttgcctctcactgtttgatgaaccaccccgatctggccaaggacctcacagaatacctgaaggttcgtagccatgaccctgaggaggcaatcagacacgacgtcattgttacgattattaccgccgccaagcgagatctggccctggtgaatgatcaactgttagggtttgtgcgcgagcggacacttgacaagagatggcgggtgcggaaggaggctatgatgggactggcccagttgtataagaaatactgtctgcacggcgaagccggtaaggaggccgcagagaaagtgagctggattaaggacaaacttctgcacatctactaccagaattcaatcgacgacaaactacttgtggagaagatttttgcgcagtacttggtcccccacaaccttgaaactgaagaaaggatgaagtgcctgtactatttgtatgcatctttggatcccaacgcggtgaaggctctcaacgaaatgtggaagtgccagaatatgcttcggagccacgtgcgggaactcctggacctgcataaacagcccacctctgaagcaaactgcagcgccatgttcggcaaactgatgactatagcgaagaacctcccggatccaggtaaggcccaggactttgttaagaagtttaatcaggtcttaggagacgacgaaaaattgagatcccaactcgagctgttgatctctcctacctgctcctgcaagcaagcggatatttgtgtggtctcaaagagctactttacattgttcctgtag

SEQ ID NO: 128007 - DNA, 990 bp, synthetic construct
  misc_feature 1..990: note = Description of Artificial Sequence: Synthetic coding sequence
  source 1..990: mol_type = other DNA
atgaccactcagcaaattgacttgcagggccctggcccttgggggtttcgcttggtgggcggaaaggacttcgaacaaccgctggccattagccgtgtgaccccagggagtaaggccgctctcgccaatttgtgtattggtgacgtgatcaccgctatcgacggtgagaatacatctaacatgacacaccttgaagcacagaacagaatcaagggctgcacagataacttgacactgaccgtggcaagatccgagcataaagtatggtctccgttagttaccgaggagggcaagagacacccgtacaaaatgaacctcgcttcggagcctcaggaggtcctgcacatcggaagcgcacataacaggagcgccatgccctttaccgccagccccgcctccagcaccactgcccgagtgatcacaaatcagtataataatcctgcaggtctgtactcaagtgagaatatttcgaactttaacaacgcacttgagtctaagactgccgctagcggcgtggaagcaaacagccggcctctggaccacgcacagccacccagttccttggtgatcgacaaggagtctgaggtgtataagatgctacaagagaaacaggagttgaacgagccccctaagcagtccacctcttttctggtcctgcaggagatcctggagtcagaggagaagggcgaccctaataaaccttcaggattccgctctgtgaaggcccctgtgactaaggttgcggcctccatagggaacgcccagaaattgcctatgtgcgataagtgcgggacgggaatagtaggggtgtttgtaaaactccgagatagacatcggcaccctgaatgctacgtgtgcaccgactgcggcactaaccttaaacagaaaggacatttcttcgtagaggaccagatctactgcgagaaacatgctagggagagagttacaccaccagaaggctacgaggtcgttactgtcttccctaagtag

SEQ ID NO: 128008 - DNA, 1101 bp, synthetic construct
  misc_feature 1..1101: note = Description of Artificial Sequence: Synthetic coding sequence
  source 1..1101: mol_type = other DNA
atggccctcaccgtggacgtcgccgggccagctccgtggggctttaggataaccggggggcgcgacttccacaccccaattatggtgactaaggtggctgagcgggggaaggcgaaagatgctgatctgcgccctggggatataatcgtggccattaacggtgagagtgcggagggtatgctccacgcggaggcacagtctaaaattaggcagtctccttctccactgaggcttcaactggacagaagtcaagcgacatctcccggacaaacaaatggggattccagtttggaggtgctggcgacaaggtttcaagggtcagtacgcacatatacagagagccagtctagtctgagatcaagctatagcagtccaacctccctcagccctcgagctggttcgccattctcgccacccccgtcatcaagtagcttgacaggcgaagccgctatatctaggagctttcaatccctagcatgtagccccggcttaccagccgctgaccggctttcctacagcggccgcccggggagccggcaggccggactgggcagggctggggactcggcggtactggtgctcccaccaagccctggcccacgctcctccaggcctagtatggacagtgaaggtgggtcactcttgttagatgaagacagtgaggtctttaaaatgttgcaagagaacagagaggggcgggccgcccccagacaaagctcatcttttcggctactgcaggaagcacttgaggctgaagagcgaggtggcacccctgctttccttcctagcagcctctccccacaatccagcctgcctgccagcagggccctggccacacctcctaagctgcatacttgcgagaaatgttccacttctatcgccaatcaagccgtgagaattcaagaaggccgttaccggcatcctgggtgctacacatgtgcagactgtggcctgaacctgaaaatgcggggtcacttctgggaggacgcatgtgccatggagggcatgagactgtcactggaggccctcgagggtatggtcgaaggcgccaaacgccgagacaggcggaaaacgagaaggcctattcagccttcatggtag

SEQ ID NO: 128009 - DNA, 1809 bp, synthetic construct
  misc_feature 1..1809: note = Description of Artificial Sequence: Synthetic coding sequence
  source 1..1809: mol_type = other DNA
atgagaggaggccgagcccgtccggcttgggaatcattcatggggcttccccctagatcctccgctaaatggggggcaggacagagcctggacaggctttgctgtgctccaggcagccgggggctggcaggcgcacctggccgcatgcgtgccccaccggctggaaggtctcagccggcaggggggcctggcgatagtctgcctcacccccccggcggattgggcccaggaggcagcgcgtgggccagaagagctgaagcagctgccagtcgtgcacgggggggaggccgcgggggccccgggatcacctgggctgaagcaggaccaggcgcaccaggcgggctgtcccccgaaagcgggcgtcggcaacgggaacgttggcggctgccagcattccccccctccagagcatgggcaccatcccggactggcgagaggcaacccggggagcgggcccatctgagattgtccgctaggcccgcactgccgggcgcgggactcctgtctgcacccttgagcgctcgaaaccccggcctagtgcgaggtcctgcaccatggagtctggcctcggctggggcccccccgagggccgccctgagccccgctggggcactgctgcttcagcctcccgctcggagggttctatgcccaagatctgagggtggatcccggaccggacgcgctgggccgtccggatgggcccctcctcggggtgctcgctccgccgaaagcactgacagactgaaggggatggccttaacggtcgacgtcgccggtcccgccccctggggctttcgcataacaggcgggcgggacttccatacacccataatggtgacaaaggtcgcagagcgcggcaaggctaaggatgcggacctgcggcctggcgatattattgtggcaattaatggcgagtctgcagaagggatgctgcatgctgaggctcagtcaaagattagacagtccccaagtcctctgagactacaactcgaccgcagtcaagctaccagtcccggacaaacgaatggcgactcatctttagaggtcctggctacccgcttccaagggagcgtgcgcacttataccgaatctcaatcatccttacgatctagctactctagccccaccagcctgtctccgagggccggctctcctttcagcccccctccttcctctagttctctgaccggcgaggccgccatttcgcggtcctttcagagtctcgcatgctccccggggttgcctgccgccgataggctgtcttactccggccgtccaggctcccgccaggcgggtctcggaagggccggggattccgccgtcctggtgctccctccttctccgggaccccgctcttccaggccatcaatggacagcgaggggggctctctgctgctcgacgaagattcagaggtgtttaaaatgcttcaagaaaacagagaaggacgggccgctccccggcagtcctcctcctttaggctgttgcaagaagccctcgaggcagaagaaagagggggcacccctgcatttcttccttcttctctgtccccccagtctagtttgcccgcgagtagggctttagctacaccaccaaagctccacacctgtgagaaatgctcaactagcattgctaaccaggccgtcagaatccaggagggcagatataggcaccctgggtgttacacctgcgcggattgcggactcaacctcaaaatgcgaggtcatttttgggtgggcgacgagttatattgcgaaaaacacgccagacagaggtattccgcccctgccaccctgtcttcaagggcatag

SEQ ID NO: 128010 - DNA, 837 bp, synthetic construct
  misc_feature 1..837: note = Description of Artificial Sequence: Synthetic coding sequence
  source 1..837: mol_type = other DNA
atggcactgacagtagatgttgccggtcctgccccctggggtttccgcattactggcgggcgagactttcataccccaataatggtgacgaaagtcgccgagaggggaaaagccaaagacgccgatctgcgaccaggagatattatagtggctataaacggggagtcagcagaaggaatgcttcacgctgaagcacagagcaaaatcaggcaatccccaagccccctgagactccagctggacaggtcgcaggccaccagtccgggacagactaacggagatagttctctagaggtcctagccactcgcttccagggcagtgtgagaacttataccgaaagccagtcctctcttcgatctagctactcttcaccaacttccctaagcccacgggcagggagcccatttagtccccctccttcgagtagcagtttgactggggaagctgctataagccgatccttccagagcctggcctgcagtcctgggttgccagccgctgataggcttagttattctggtcgccctgggagcaggcaggccggtttaggcagagcaggggatagtgctgtgctcgtgctccctccctcgcccgggcccaggagctcccgtccctccatggacagcgagggaggatccctgctgctcgatgaagatagcgaggtgttcaaaatgctgcaggaaaatcgcgaggggcgggctgccccacgccagagttcaagtttcagactccttcaggaagccctggaggctgaagagcgcgggacgagactgtgtgcatctaggcgggccggaaccgcgactcccgctgccacacccgtgcctactgtgggatag

SEQ ID NO: 128011 - DNA, 675 bp, synthetic construct
  misc_feature 1..675: note = Description of Artificial Sequence: Synthetic coding sequence
  source 1..675: mol_type = other DNA
atggccctgactgttgatgtggccggcccagccccatgggggttcagaatcacgggaggaagagacttccacacccctatcatggtgaccaaagtagccgagcggggcaaggctaaagacgctgacctgcggccaggtgacattatcgtggcgatcaatggcgaatccgcagagggtatgctgcacgctgaagctcagtctaaaattcgccagtctcctagtcccctgcgactccaattagacaggtcccaagccacatcccccggacagacgaacggtgacagtagtctcgaagtattggccactcggtttcagggcagcgtcagaacatatactgaaagccaaagcagccttcggtcatcctacagcagtccaacaagcctgtcaccccgagctggcagccctttctcccctccacctagcagctcctccctcactggcgaagcagcaatttcaagatctcgcccccggcctagatggcgacttgggggagccggcgctgccgcttttcctggcccgagcttcctgcaggcccaacacggcctcggtagaggtaagccccctcccggtcgtggcttgggctctctccaagacgccgctggtaaaagtcgtgggaccggcggaccaccaacggttcaactcctaagtgcactcgctggctcacctggcggctag

SEQ ID NO: 128012 - DNA, 1059 bp, synthetic construct
  misc_feature 1..1059: note = Description of Artificial Sequence: Synthetic coding sequence
  source 1..1059: mol_type = other DNA
atggccttaacagtcgacgtggctggcccagccccgtggggctttcgtataaccggcggaagagactttcatacacccattatggttaccaaagtagcagaaagggggaaggctaaagacgccgaccttaggccaggagatattattgtggctattaatggcgagagcgccgagggtatgctgcacgccgaagcacagtctaagattagacagagccctagccctctgagactgcagctggaccgctcccaggctacatcaccaggacagacaaacggtgattcaagcttggaggtcctggcgactagattccaaggctctgtgcgcacatacacagagagccagtcttcgctccggagcagttattccagccccacgtctctgagcccacgtgccgggagcccattttcaccgccacctagttccagcagcctgaccggagaggctgccatctccaggtcttttcagagcctcgcgtgtagtcctggattgcctgcagctgatcgtctgtcatattcggggcgcccagggtcccggcaggctgggctgggacgcgcaggtgactccgcagtcttagtgctgccccctagccccggtcctcgatcttcaaggccctccatggattctgagggggggtctctgctcttggacgaggatagcgaggtgtttaaaatgctgcaggaaaatagagaaggcagggccgccccgagacagtcatcttcttttaggttgctgcaggaggccttggaagccgaggagcggggaggcaccccagcctttctacctagcagtctgtcacctcagtcatctctgcctgcctctcgggccctggctacaccgccaaaattgcatacatgcgagaagtgttctacctccatcgccaatcaggctgtcaggatccaggagggtagataccgccacccgggctgctacacttgtgccgactgcgggctgaatctgaaaatgcgcggccacttctgggtcggcgacgagctgtattgcgaaaagcatgcacgacagcgctattccgcaccagccaccctttcttcacgcgcgtag

SEQ ID NO: 128013 - DNA, 1059 bp, synthetic construct
  misc_feature 1..1059: note = Description of Artificial Sequence: Synthetic coding sequence
  source 1..1059: mol_type = other DNA
atggctttaacagtcgatgttgcgggtcctgccccttggggtttcagaatcaccggtggaagagacttccacacccccataatggtcacaaaggtggccgagagaggtaaagcaaaggacgctgatctgaggccgggcgacattatcgtggccatcaatggggagagcgccgagggaatgctgcacgccgaggctcaatcgaagataagacagtcgccatccccacttaggctgcaactagacaggtcccaggcaacgtcccccggacagaccaacggagatagctcgctggaagttttggcaacacgcttccagggcagtgtgcgcacatacacagagtcccagagctctcttcgctcctcctatagcagtcccacatcactgagtcctcgggctgggtcgccttttagtccccccccctcatcctcatcactaactggggaggctgccataagtaggtcatttcagtctctagcatgttcccccgggctgcctgccgctgaccggttgtcttactctggtcgcccagggagtcggcaggccggactcggtagggctggggacagcgccgttctggttctgcctcctagtccaggccctagatcatcccgaccgtccatggatagtgaaggcggctccttattactggatgaggattcggaggtgtttaaaatgttgcaggagaatcgcgagggacgagccgccccacgccagagttccagctttaggctgctacaagaggctttagaggccgaagagcgaggcggaacccctgccttcctgccatccagtctgtcacctcagagctcccttccagcatcaagagccttggccacgcctccgaaactgcacacatgcgagaagtgctctacttccatcgcgaaccaagctgtccggatccaagagggtcggtatcgacatcccggctgttatacatgcgcagattgtggactgaatctgaagatgcgtggacacttttgggtgggggatgagctctactgcgagaagcacgcccggcagcggtacagcgcaccggctacattaagtagcagagcctag

SEQ ID NO: 128014 - DNA, 837 bp, synthetic construct
  misc_feature 1..837: note = Description of Artificial Sequence: Synthetic coding sequence
  source 1..837: mol_type = other DNA
atggcactgactgtcgatgtagccggtcctgccccttgggggttccgaatcacaggcggcagggacttccacaccccaatcatggtgacgaaggtggcagaaagaggtaaggcaaaggacgccgatctcaggcctggagatataatcgttgctatcaatggggaaagtgccgagggaatgctacatgctgaagcacaatcaaaaatccgccagagcccctctcccctgcgactgcagttggacagatcacaggctactagtcccggacagaccaatggggacagttcgctagaggtgttggctacccgattccaaggcagcgtgaggacatacactgaatcacaaagtagcctgaggagctcctactcttcaccgacgtccctgtcccctcgggcggggagcccttttagcccgccccctagcagtagctctctgacgggtgaggcggctatctcccgttctttccaatctctggcttgctcccccggactgcctgcagctgacaggctgagctattccggtcggccaggctcacgccaagccggactgggccgcgcgggcgatagcgctgttctggtgctgccacctagtccaggtccaagaagctccaggccaagtatggattctgaaggcgggtctctcctcttggacgaagatagcgaagtatttaagatgctgcaggagaatagggaaggacgggccgccccccggcagtcttcctcctttcggcttttgcaggaagccctggaagcagaggaacgcgggactcgactgtgtgcctcccggcgggccggaaccgctactccagcagcaacacctgtgcctacagtcggctag

SEQ ID NO: 128015 - DNA, 1059 bp, synthetic construct
  misc_feature 1..1059: note = Description of Artificial Sequence: Synthetic coding sequence
  source 1..1059: mol_type = other DNA
atggcccttacggtggacgtggcaggcccagcaccctggggatttcggatcacggggggacgcgatttccacactcccatcatggtgactaaagtggctgaacgcggaaaagccaaagacgcagacctgcgtccgggagatatcatcgtcgcgataaacggcgaatcagcagagggtatgcttcatgccgaagcgcagtccaagatcagacagtctccatccccgctgcggctccaactggataggtctcaggcaactagccctggacagacaaacggagatagttctctggaggtgctggcgactagattccaagggagcgtgcgaacgtatactgagtctcaaagttctctcagatcttcttactcttctccaacatcactctcaccgcgcgcaggaagccccttctctcccccaccttcctcctcatcccttacaggtgaggctgccatcagccgaagttttcagagcctcgcctgctcacctggactgcctgctgccgatcgtttaagttactctggtcgtcctggcagtcgacaggccggcctgggccgggccggtgactctgctgtgctcgtacttcctcccagccctggccctcgttcttctagaccttccatggactccgaaggagggtccctgctgctggatgaagactcggaagtgtttaaaatgttacaggagaatagggagggacgcgcagcacccagacaaagctcttcattcagactgcttcaagaagctctcgaagcagaagaacgcgggggtactcctgccttcctcccaagtagcctgagtccccagagcagtttacctgccagtagagctctcgccacaccacctaaacttcacacatgtgagaaatgttctacctcgatcgccaatcaagcagttagaattcaggagggtcggtaccggcaccccgggtgttacacctgcgctgactgcggcctgaatctaaaaatgagagggcacttctgggtgggagacgaactgtattgcgagaagcacgcaagacaacgatacagcgcgccagcaactctttcatctcgagcctag

SEQ ID NO: 128016 - DNA, 1560 bp, synthetic construct
  misc_feature 1..1560: note = Description of Artificial Sequence: Synthetic coding sequence
  source 1..1560: mol_type = other DNA
atgacctcgacttttaatccaagggagtgtaaactgtccaaacaggagggccagaactacggcttctttctgagaattgagaaggacactgagggccatctggtgagagtcgtcgaaaaatgttccccagcagagaaagccggtctgcaagatggagacagggttcttagaataaatggagtctttgttgacaaagaggagcatatgcaggttgtagatctggttagaaagtccggaaattccgtaacattacttgtattggatggagatagctatgagaaagccgttaaaaccagagtggatcttaaggaactgggtcaatcgcagaaagagcaggggctctccgacaacatcctctcacccgtgatgaatggaggtgtccagacttggacgcaacccagactttgctacttggtgaaagaaggaggtagctatggattctccctgaagaccgtacagggaaagaaaggcgtctatatgacggatattactccacaaggtgtggctatgcgtgctggcgttctggccgatgaccacctcattgaagtcaacggtgaaaacgtcgaggacgccagccacgaagaggtcgtcgagaaagtgaaaaaatccggctctagagttatgttcctccttgtagataaggaaacagacaaacggcacgtggagcaaaagatccagtttaagcgagagactgcctccctcaagttgctcccacatcagccacgcatcgtggagatgaaaaaaggatctaacggctatggattttatctgagagccggaagtgagcaaaaagggcagattatcaaggacattgactccggctcccccgcagaagaggccgggctgaagaacaatgacttggtggtggccgttaacggtgagtctgtagagaccctggatcatgatagcgttgtcgaaatgatccggaaggggggcgatcaaacctcacttctcgtggtggataaagagactgataacatgtaccggcttgcccacttttcacccttcctttattatcagagccaggagctgcccaacggctctgtgaaagaggcaccagcaccaacgcccacctccctggaagtgtcaagcccacctgacactacagaggaagtcgaccataaaccaaaactgtgtaggttggctaaaggcgaaaacggctacggcttccacttgaatgcaatccggggactgccggggtcgtttatcaaggaagtccaaaaaggaggtcccgctgacttagccgggctagaagatgaagatgtcatcattgaggtcaatggggtaaacgtactggatgagccttacgaaaaggtcgtggacaggatccagtccagcgggaaaaatgttacgctgttggtttgcggtaaaaaagcatatgattacttccaagctaaaaaaattcctattgtgtcgtccctggccgacccgctggatacacctcccgactccaaggaaggaattgtggtggagtccaatcacgattcacatatggcaaaggagagggctcactcaactgcatctcacagcagctccaacagtgaggatactgaaatgtag

SEQ ID NO: 128017 - DNA, 1560 bp, synthetic construct
  misc_feature 1..1560: note = Description of Artificial Sequence: Synthetic coding sequence
  source 1..1560: mol_type = other DNA
atgacgagcaccttcaatcctcgcgaatgtaagttaagcaaacaggaggggcagaattatggctttttcctgcgcattgagaaagacaccgaaggccacctggtgagagttgtcgagaagtgctcccccgctgaaaaggccggccttcaggatggtgaccgagtgttgcgtattaacggagtcttcgtcgacaaggaggagcacatgcaggtcgtcgacctggtccgcaagtcaggaaatagcgtaactctgctcgtgctcgatggagattcgtacgaaaaagcagtgaagacccgcgtcgacttgaaagaattggggcagagtcagaaggagcaggggctgtcagacaacatcctttctcctgtgatgaacggcggagtgcagacttggacgcagcccagactatgctaccttgttaaggagggtgggtcttatggcttttctctgaaaacagttcagggaaagaagggcgtgtatatgactgacataactccccagggggtcgccatgagagcaggagttttggctgatgaccacctgattgaggtcaacggagagaacgttgaggacgccagtcacgaggaagtggttgagaaagttaagaaaagcgggagccgggtcatgtttctgctggtcgacaaagagacagacaaaagacacgtagagcaaaagattcaatttaagcgcgagactgcctcgcttaagctgctcccccaccagccaagaattgtggaaatgaaaaaaggatcaaatggctatggcttttatctcagagccggatccgaacagaaaggccagatcattaaagatatcgactccggaagtcccgctgaagaggccgggttaaagaacaatgatctggtcgttgccgtcaacggcgaaagtgtagagaccctggatcatgattctgtggttgagatgatcagaaagggcggggatcaaacaagtctgttagtagtcgataaagagaccgataacatgtaccggcttgcccacttcagtccgttcctatattaccagtctcaggaacttcctaatggaagtgttaaagaggcacccgcccctacaccaacctcgttagaggtgtcgtcgccccctgacacgactgaggaggtggatcacaagcctaagttgtgccgcctggcaaaaggagagaatggatatgggttccaccttaacgccatccgaggtctgcccggcagttttattaaggaggtacagaaaggtggtcccgcagatcttgccggtctggaagacgaagatgtgatcattgaggtcaacggtgtcaacgtcctggatgaaccttacgagaaggtggtcgatcgtattcagagctccggtaagaatgtgacccttctagtgtgcggaaagaaggcatacgattacttccaggctaagaaaattcctattgtatcatcgctcgccgaccctctggacactccaccagattcaaaggaagggatcgtggtagagagcaaccacgactcccacatggccaaggagcgtgctcactcaacggcgagccattcctcttctaattccgaggacaccgagatgtag

SEQ ID NO: 128018 - DNA, 795 bp, synthetic construct
  misc_feature 1..795: note = Description of Artificial Sequence: Synthetic coding sequence
  source 1..795: mol_type = other DNA
atgacctcgactttcaaccctcgagagtgcaaactatcaaaacaggaggggcaaaactatggattctttttacgcattgagaaagacaccgagggccacctggtgagggtggtcgaaaaatgtagccccgccgaaaaagctggcttacaggacggagatcgcgttctccggattaacggcgttttcgtcgacaaggaggaacacatgcaggttgtggacttagtgcgcaaatcaggcaatagcgttacgcttctggtactcgacggagactcttacgaaaaggctgtgaagacccgggttgatttgaaagaactcggccagtcccagaaagagcaaggactgagcgataacatccttagtccagttatgaacggcggtgtgcagacctggacacaacccaggctctgctacctggtaaaggagggtggatcctatgggttttctttaaaaacagtgcagggcaaaaagggggtctacatgacggatatcaccccacagggcgttgcgatgagggccggtgtcctggcggatgaccatctcattgaggtgaacggcgagaacgtggaggacgctagccacgaagaagtagtagaaaaggttaaaaagagcggatctcgggtcatgttcctgctggtcgacaaggagaccgataagaggcatgtggaacagaagatccagttcaagcgggagaccgcctcgttaaaactgctgcctcaccagccgagaatcgttgagatgaaaaaaggcagtaacggatatgggttctatttgagggcaggctccgaacagaagtag

SEQ ID NO: 128019 - DNA, 1227 bp, synthetic construct
  misc_feature 1..1227: note = Description of Artificial Sequence: Synthetic coding sequence
  source 1..1227: mol_type = other DNA
atgacatccaccttcaatcctagggagtgcaaactttcaaagcaggaaggccaaaactacggcttctttctccgcatcgagaaggacaccgaaggccacctggtaagggtggtggagaaatgttcccctgcagagaaagccggcctccaagacggagatagagtcctgcggataaacggcgtcttcgtagacaaggaggaacatatgcaagtcgtggacttggtaagaaaaagcgggaattccgtgaccctgctggtcctggatggcgacagctatgaaaaagccgtcaaaacccgggtggaccttaaagagctgggtcagtctcagaaagagcagggtttatccgacaacatactgagtcccgtcatgaatgggggcgtgcaaacctggacacaaccaaggctgtgttacctagtgaaggagggcggatcatatggctttagtctgaaaaccgttcagggacagatcattaaagatattgactctggaagtcctgcagaagaagcgggccttaagaacaacgacctggtcgtagccgtcaatggcgagagcgtggagactctagaccacgatagcgttgtggaaatgattagaaaaggaggagaccaaacctcactgcttgtggtcgacaaagaaactgataacatgtaccgccttgcacacttttcccctttcttgtactatcagagtcaggaactgccgaacggatccgtaaaggaggctcctgccccaactcctacctccctggaggtctctagtccgcccgatactacggaggaggtcgaccacaaaccaaaactgtgccggcttgcaaagggggagaacggatatggatttcaccttaacgcaattaggggtttacccggatccttcatcaaggaggtacagaaggggggcccagccgacctggctggactcgaggacgaggacgtgatcattgaagtaaacggagtcaacgtccttgatgagccctacgagaaagtggtcgaccgaatccagagcagtggcaaaaatgttaccttgctggtctgtgggaagaaagcgtatgactactttcaggccaagaagatccccatcgtctccagcctggcagatccactagatacaccacccgacagtaaagagggaatcgtagtggagtctaaccatgacagccacatggccaaggagagagcacattccacagctagccattcatcatcaaatagtgaagataccgaaatgtag

SEQ ID NO: 128020 - DNA, 423 bp, synthetic construct
  misc_feature 1..423: note = Description of Artificial Sequence: Synthetic coding sequence
  source 1..423: mol_type = other DNA
atggattctcggatcccctacgacgactatcctgtcgtcttcctacctgcttacgaaaatccacctgcgtggatccctcctcacgagcgagttcaccaccccgattacaacaatgagcttactcagttcctccctagaacaatcaccctcaaaaagccaccaggagcacagctaggatttaatattcgcggaggaaaggcatcccagctcggtatattcatctctaaggtgatccctgattctgatgcacacagagccggcctgcaggagggggaccaggtgctagccgtgaatgatgtggattttcaggacattgaacatagcaaggccgtggagattcttaaaactgcacgggaaatttctatgcgcgtcagatttttcccatacaactaccatcggcagaaagaacgcactgtccactag

SEQ ID NO: 128021 - DNA, 423 bp, synthetic construct
  misc_feature 1..423: note = Description of Artificial Sequence: Synthetic coding sequence
  source 1..423: mol_type = other DNA
atggactccagaatcccatacgacgactaccccgtggtgtttctacctgcttacgagaacccaccggcctggatcccaccccacgagcgggtgcatcaccctgactacaataatgaattgacacaattcctgccacggaccatcacgcttaaaaagccgcccggggcccaacttggctttaacattcggggaggaaaagcaagtcagcttgggatttttatcagcaaggttatacctgattccgatgcgcacagggctgggttacaggaaggggaccaggtattggccgtaaatgacgtcgattttcaggacattgagcactctaaggccgtcgagatcttgaaaactgccagagagataagcatgagggtgcgattttttccttataattatcatcgccagaaggaacgcacggtgcactag

SEQ ID NO: 128022 - DNA, 8520 bp, synthetic construct
  misc_feature 1..8520: note = Description of Artificial Sequence: Synthetic coding sequence
  source 1..8520: mol_type = other DNA
atgcctatcactcaggacaacgcagtactacacctacctctgttatatcagtggctgcaaaactctctgcaggaagggggggatggccctgaacaaagactgtgccaagccgctattcagaagctccaggaatacattcaactcaactttgccgtcgatgaatcaacagtgcccccagatcacagtcctccagaaatggagatttgtaccgtgtatttgactaaggagctgggggacaccgaaacagtcggtctctcatttggcaacatccccgtgttcggggattatggcgaaaaacggcggggtggaaaaaagagaaaaacccaccaggggcccgtcctcgacgttgggtgcatctgggtcacagaactcagaaagaattcaccagccggtaaaagcggcaaagtgaggctgagagatgagatcctcagcctgaacggtcagctcatggttggggtggatgtgagtggggcatcctaccttgcagaacagtgttggaatggagggtttatttatttgattatgctacgacggttcaagcataaagcccacagcacttataacggtaattctagtaactcctcagaacctggagaaacgcccacactggagttaggagacagaaccgcaaaaaagggcaagaggacacggaagttcggcgtaatcagtagacctccagccaacaaggcccccgaggagagtaaaggaagcgcagggtgtgaggtgagtagcgaccccagcactgagcttgaaaacggacctgatccagagctgggcaatgggcacgtttttcagctcgagaatggacccgatagcttgaaggaggtcgcagggccacacctggagcggagtgaggtcgatcggggcacagagcatagaattccaaaaaccgacgcccctctaaccaccagcaacgacaaaaggcgcttctcaaaaggtgggaagacagattttcagtctagcgattgtctcgctagagaagaggtcggacgaatctggaagatggaactcctcaaagagagtgacgggttaggtattcaggtgagcggaggacggggctccaagaggtctccacatgccatcgtcgtcactcaagtaaaggaaggaggcgccgctcatagggacgggaggctgtccctcggcgacgagttgctcgtcattaacggtcatttgctcgtgggactgagccacgaggaggccgttgcaatactcaggagcgcaaccggaatggttcagctggtagtggcatcgaaagagaattcagccgaagacctgctgaggctgacctctaagtctctgccagaccttacttccagcgtggaagatgtatcctcctggactgataatgaggaccaggaggcagacggcgaggaggacgaagggacaagctcctctgttcagcgtgctatgcctggtactgacgaaccccaagatgtgtgcggggccgaggagagcaaaggtaacctggaaagccccaaacagggaagcaacaaaataaaactgaagtcccgcctgtccgggggcgtgcaccggctggagtcagtggaagagtataacgaacttatggtacgcaacggagatcctagaatccgcatgctggaagttagccgagatggtagaaaacacagtttgcctcagctgcttgactcctcaagtgcctcccaggagtaccacattgtgaagaaatcaaccagatcgttgtccaccacccaggtggagagcccatggcgactgattcggccctccgtgatttcaatcattgggctatataaagaaaaggggaagggtctgggcttctcaattgccgggggtcgggattgcatcagaggacagatgggcatatttgtcaaaaccatcttccccaatggatctgccgccgaagatggaagacttaaagagggcgatgaaatcctagacgtgaatggcattcccataaaggggctgactttccaagaagctatacacacgtttaaacaaattagaagtggcttgttcgtgctgaccgtccggacaaaacttgtctccccaagcctcaccccgtgttctacccccactcacatgagtagaagtgcaagccccaacttcaacaccagcggaggcgccagtgccggtggaagtgatgagggttcttctagctcattgggtaggaaaactcccggccccaaggatagaatcgttatggaagtgaccctgaacaaggagccgcgagtcgggctgggaattggcgcctgctgtctggcgctggagaacagccctcctggcatttacatccactccctggcccccgggtcagtggccaagatggaatccaacctgtcccggggagatcagatcctggaagttaacagtgtcaacgtaaggcatgccgcactatctaaggtccatgcaatcctgtcgaagtgtccacctggcccggtgcgattggtgattggtcgccaccccaaccccaaagtgagtgagcaagagatggacgaggtgatcgctcgcagtacgtaccaagaatcaaaggaggcaaactcttcccctgggttgggaactccccttaagtcgccaagcttggcgaagaaggactccttaatttccgaaagcgagctttcccagtactttgcacatgacgtgcccggccccctgagcgatttcatggtggccggatccgaggatgaagatcacccagggtctggctgtagcacctccgaggaggggtctctgccgccttccaccagtactcacaaggaacctggcaaaccccgggccaatagtttggttacactgggctcccatcgggcctccggattatttcacaagcaggttacagtggctcgtcaagcaagtctgcctggatctccgcaggccctgagaaatcccctccttcgccagcggaaagtgggttgttacgatgccaatgatgcttccgacgaagaggaatttgatagggagggggattgtattagcctcccgggggcccttccaggccccatcaggcctctatcagaggatgatcctaggcgagtgtctataagctcctcaaagggaatggacgtgcacaatcaagaagagcgccccaggaagaccttggtgagcaaagccatttctgctcctcttctgggcagttctgtggacctcgaggaatccattccagagggcatggttgatgccgcatcttatgctgccaaccttacagactcagccgaagctcccaaaggaagtccaggaagttggtggaagaaagagctgtctggttcctctagcgccccaaagttagagtacactgtgcggacggacacgcagtcccccactaatactggctccccaagttcaccacagcagaagtcagagggactaggatctcggcaccggcctgtggcgcgagtgagtccacattgcaagcgtagcgaagctgaagccaagcccagtgggtcccaaaccgtgaacctcaccggcagagcaaacgacccctgcgacctggactcaagagtgcaggccacctctgtgaaagtgactgtagcaggttttcaacccggcggtgctgtggagaaggaatcattaggcaagcttactaccggtgacgcttgcgtgtccacgagttgcgaattggcgtccgccctgagtcacctcgacgcctctcaccttaccgaaaatctgccaaaggccgcctcagagctggggcagcagcctatgaccgaactggattcttccagcgatctgatctctagtccaggcaagaaaggtgcagcacatcccgaccctagcaaaacctcagtggataccggccaggtgtccaggcctgaaaacccttcccaacctgcgtctccgcgcgtgacgaagtgcaaggcgagatcaccagtacgtttgcctcatgagggatcacccagtcccggcgagaaagctgcagctcctcctgattattccaaaacacgctctgcctctgaaacttctacaccccataatacccgccgggttgccgccctgcgcggagcgggtccaggggctgagggcatgactcctgctggtgctgttctcccaggcgaccctttaacatctcaggagcagcggcagggggcccctggaaatcactccaaggccctggagatgacaggaatacacgctcctgagtcatcacaggaaccctccctgttagaaggtgctgacagcgttagctcccgggccccccaggcctctctttccatgttacccagcacagataatacaaaggaggcttgcggccatgtgtctggccactgttgtcccggcggcagccgggaatcccctgtgacagatatcgattccttcattaaggaactggacgcatccgccgctaggtccccttcctcccagactggcgatagtggtagccaggagggatccgcccagggtcatccgcctgcaggcgcagggggcgggtcgagctgtcgtgccgagccggtacctggcggccagacaagttcccccagacgggcttgggccgcaggagctcccgcttatcctcaatgggccagccaaccatccgttctggattctattaatcccgacaaacatttcaccgtaaacaagaacttcctctccaactacagtagaaacttctcctcgttccatgaagactccacctcactgtctggcctcggggatagtactgagcccagtctgagctctatgtatggagacgcggaggactcaagctcagaccctgaatccttaactgaggctcctcgggcatccgcccgcgacggctggtcgcctccgaggtctcgcgtgagccttcacaaagaagacccctcagaaagcgaggaggagcagatagaaatttgctctactcgggggtgcccaaatcccccctcctcacccgcacatctgcccacgcaggccgcaatctgtcccgctagtgcaaaggtgttgagtcttaagtattcgacgcctcgcgagagcgtcgccagtccacgtgagaaggcagcatgtcttccaggctcctacacttcaggcccggacagctcacagccttcctcactcctcgagatgtccagtcaagagcacgagacacacgccgatatatccacttcccaaaatcaccgtccctcgtgcgcagaagagaccactgaagtgacctccgcttcgagtgccatggagaactcccccctgtctaaggtggcccggcacttccacagccctcccatcatactgtcatcccctaacatggtcaacggcttggagcatgatcttctggatgacgaaacacttaaccagtatgaaacttcaattaacgcagctgctagtctttcttcatttagcgtggatgtgcctaaaaacggcgagtcggtcctagaaaatctccatattagtgagtcgcaggacctggacgatcttcttcaaaaacccaagatgatcgcgcgaaggccaatcatggcctggttcaaggaaattaacaagcataaccaaggcacccatctccgatccaaaactgagaaagaacagcctctcatgcctgcccggtcgcctgactccaagatacaaatggtgtcatcatctcagaagaaaggagtgactgttccccattctcctccacagcccaagacaaatttagaaaacaaggacctctcaaaaaagtcccccgccgaaatgctgttaactaacggccagaaggcaaaatgcggccctaagctgaagagactgtcactgaagggaaaggctaaagtgaactcggaggcccctgctgctaatgcagtgaaggctggaggaaccgaccataggaaacccttgatttccccccaaactagccacaaaacactgtctaaagccgtatcccagagacttcatgtggcagatcatgaggacccagaccgaaacacgaccgccgcgccaagatcccctcagtgcgtcctggaatccaaacctcccctagcaacaagtggaccacttaaacccagcgtcagcgacacatcaatccggaccttcgtctcccctttgactagccccaagccagtgcctgagcaaggcatgtggtccagatttcacatggcagttctgagcgagcctgacagaggctgtcctactaccccgaagtcacctaaatgccgggccgaaggcagagccccgcgagcggactctggcccagtgtcacccgctgcctcccgcaacggcatgtctgtcgctggcaatcgccagtccgagccccgtctcgctagtcacgtcgcagcggacactgctcagcctaggcccactggtgagaaaggaggtaacatcatggcttctgaccgcctggaaagaaccaaccagctaaagatagtggagatatccgccgaagccgtcagcgaaactgtttgtggaaacaagcccgctgagtcagataggcgcggtggctgtttggcacagggaaactgtcaggagaagtcagaaatccgcctgtatagacaagtggcggagagctccacaagccaccctagctccctcccatctcatgcctcccaagctgagcaggagatgagtcgatcattttccatggctaagctcgcctcgtccagctctagtctgcagaccgccatacgcaaggcagaatactcccagggcaagtcatccctgatgtccgattctcgaggtgtgcctaggaactcaattccaggtggaccaagcggagaggaccatttgtattttacacccaggcctgccacgcgcacttacagcatgccagcccaattttcaagccatttcggccgagagggtcacccaccacatagcctgggccggtcaagagattctcaggttccagtgacttccagtgtagtcccagaagctaaagcttcccggggaggccttccttcccttgcaaatgggcaaggcatttactcagtcaagcccctcctggatacctctcgaaacctgcccgccacagacgagggcgatattatatccgttcaggaaacaagctgtctggtgacggacaaaattaaagtaactcggaggcactactgctacgaacagaactggccgcatgagtctactagttttttttcagtgaaacagaggatcaagtcatttgagaatcttgctaacgcagaccggcccgtagccaagagtggtgcctccccgtttctgtctgtcagttcgaagcctccgataggacgccgtagcagcggatccattgtctctggcagtctggggcatccaggtgatgccgctgcccgactgcttcgaagatcgctgtcctcgtgttctgaaaatcaaagcgaagccggaacactcttgccacagatggcaaaatcaccctccattatgacgctaaccatttctcggcagaatccacccgaaacatcctccaaaggctccgatagtgaattgaaaaagagcctgggtccactcggcattcctacacccaccatgactctggcctcccctgtaaagaggaataaatctagcgtgaggcatactcagccatcaccagtcagccggagtaaactgcaagaactgagggctctctctatgccagatctcgataaattatgcagcgaggattacagcgctggtcccagcgctgtgttatttaaaactgagctggaaatcacaccccgacgcagtcctggacctcctgcaggcggggtgtcctgtcccgagaagggggggaaccgtgcttgccctggaggttccgggcctaaaacctccgctgcagagaccccctcgagcgcgtccgacactggagaggcagcccaggacctcccattcagaaggagctggagcgtgaatctggaccagctcctagtctccgcaggcgaccagcagcgactgcaatcggtgttaagcagcgtgggatctaaatctactattctcaccctaattcaggaagccaaagcccagtctgaaaatgaggaggacgtctgtttcatcgttctgaataggaaggagggctcaggtctaggattttcggtggctggaggaaccgacgtagaacccaagtctattacagtccatagggttttcagtcagggagctgcctctcaggaggggaccatgaatcgtggtgactttttattgtcggttaacggcgcctccttggcaggcctggcccacggaaacgtgctgaaggtgctacatcaggcacaattgcacaaggacgccctggttgtcatcaaaaaaggtatggaccagcctcgccctagcgcacgtcaagagccccccacagcgaatggtaaaggcctgctgagtcggaaaaccattccgctagaaccagggatcggtcggagtgttgcagtgcacgacgcgctgtgcgtcgaagttctcaagacgagcgctggccttgggctctctttggatggcggtaagtcatcagtgaccggtgatgggcctctcgtcataaaaagggtttataaaggtggcgccgctgagcaggccggtattattgaagcaggcgatgagattttggctatcaacggaaagccactcgtggggttaatgcattttgatgcatggaacatcatgaaaagtgtaccagagggacctgtccagctgttgattcgcaaacatcgtaactctagctag

SEQ ID NO: 128023 - DNA, 7923 bp, synthetic construct
  misc_feature 1..7923: note = Description of Artificial Sequence: Synthetic coding sequence
  source 1..7923: mol_type = other DNA
atgccgatcactcaagacaacgcagtgttgcacctgccactcctgtaccagtggttacagaacagcctgcaggagggtggcgacggtcctgaacaaagactttgccaagctgctattcaaaaacttcaggaatatattcaactcaattttgctgtcgacgaatctacagtgccccctgaccactctccgcccgagatggaaatttgcactgtttacctgacaaaggagttaggcgacaccgagacagtaggcttgtcatttgggaacataccagtgttcggagattatggtgagaaaaggcgcggcggcaagaaacggaagactcaccagggtcctgtcttagacgtcgggtgcatctgggtgactgagctacgtaagaacagccccgccgggaagtctggaaaggtccgcctcagagatgagattctgagtctcaacgggcagcttatggtgggggttgacgtgtcaggcgcctcttacctggccgagcaatgctggaatggaggttttatctatctgataatgctccggcgcttcaaacataaggctcattctacttataatggtaattcatccaattcgtctgagccaggtgaaacgcctacccttgaattgggagaccgaaccgccaaaaaagggaaacgcactcgcaaattcggtgtaatttcacggccacccgccaacaaggccccggaagaatctaagggttccgcggggtgtgaagtgtcatccgacccatctactgagctggagaatggccccgaccccgaactgggtaacggacacgtgtttcagttagaaaacgggccagactctcttaaggaggtggcaggcccacatctggagagaagtgaagtggacaggggcacggagcatagaattccgaagactgatgcaccattaacaacctccaacgataaaaggcgctttagtaaaggcggcaaaactgactttcagagctcggattgtctagctagagaagaagtgggaaggatttggaagatggaattgctgaaagagagcgatggactgggcatccaggtatctggaggtcgtgggagtaagcggagtccacacgcaattgtggtcacacaggtgaaagaaggcggggccgcacaccgtgagtaccatatagtgaaaaagagcacccgctccctgtccacaactcaagtggaatctccatggcgcctcatccgaccatctgttatctctataattggtctgtacaaggagaaggggaaaggactcggcttctccattgccgggggcagggattgtattcggggccaaatgggcatcttcgtaaaaacaatcttcccaaatgggagcgcagccgaggatggccgcctgaaggaaggcgacgagatccttgacgtcaatggtatcccaatcaaaggtttgactttccaggaagcaattcatacatttaaacagatccgatccggacttttcgttctcacagtcaggactaaactcgtgagcccgtctctgactccgtgctcgacacccacccacatgagtcggtctgcatcccccaattttaacacctctggcggcgctagcgcaggggggtcagacgagggctcatcctcctccctgggcaggaagactccagggcccaaagacaggatagtgatggaagtaacccttaacaaagaacctagagtggggctggggatcggcgcctgttgccttgccctagagaattcgcctcccgggatctatatccacagcctagcaccaggctcagtggccaagatggagtctaacctttcgagaggtgatcagattctggaggtgaactccgtgaatgttagacacgccgcactgtcaaaggtacacgcaattttgtcgaaatgtcccgttagtgaacaggagatggacgaggtgattgcgcggtcaacatatcaagagtcaaaggaggcgaactcctcacctgggttgggcacgcctctgaagagtccgtccctggccaagaaggattctctcatcagcgaatcagaattgtcacagtactttgctcacgacgttcccggccccttatccgacttcatggtcgccggctctgaggatgaagatcacccaggctccgggtgcagtacctcagaggagggcagcctgcccccttccacatccaaggagccgggcaagcctcgggccaacagtttagtcactctgggctctcatcgcgcttccggtttattccacaagcaagtgacagtagctaggcaggccagcctgccaggaagtccgcaagcattgcggaatcctctcttgcgtcaacggaaagtagggtgctatgatgcaaatgacgcaagcgatgaggaggaattcgaccgcgaaggagattgcatctctctgcccggtgcattacctggacccattcggccgctatctgaagatgatccgcgaagagtatcaatcagcagttcaaaagggatggacgttcacaatcaggaagaaagaccacggaagactctggtgagtaaggcgatctctgcgcccctgcttggatcaagcgtggatcttgaagagtcaatccctgaagggatggtcgacgccgcttcctacgccgcaaatctcacagactctgctgaagcccctaaagggagtcctggaagttggtggaagaaggagctttcagggagtagctctgccccgaaactagagtacaccgtgaggacggatacacagagccccaccaatacaggaagtcccagttcccctcaacagaaaagtgaaggacttgggtcaagacacagacccgtggcaagagtgtcaccgcactgcaagcggtccgaggcagaggcaaaaccctccgggagccagaccgtcaaccttaccggacgggccaatgatccttgcgacttggattctcgggtgcaggccacctctgttaaggtcaccgtggccgggtttcaacccggaggcgccgttgagaaactatgccaagagagtctgggcaagctcaccactggagatgcgtgtgtcagcacatcttgtgaactcgccagtgccctttctcacctcgacgcgtcccatttaaccgagaatttgccaaaggctgcaagcgagctgggccagcaacccatgaccgctagtgatttgatatcctccccaggcaaaaagggcgccgcccaccccgacccctccaaaacttcagtggacacaggtcaagtgtcacgccctgagaaccctagccaaccagcgtctcctcgtgtcactaaatgtaaagcccgctcaccagttcggctgccccatgagggatcccccagtcccggggagaaggctgcggctccgcctgattattcgaagacgcgctcggcctccgaaactagcacacctcacaatacaagacgggtcgccgcactcaggggagcaggacccggggccgaggggatgacgcctgcaggagcagtgctgcctggtgatcctctgacctcacaggaacagcgccagggcgctccgggaaaccactccaaggccctcgaaatgaccgggatccatgcccccgaaagcagccaggaaccgagcctgttagaaggggccgattccgtgtcctcccgggccccccaggcctcactgagtatgctgccctcgaccgataacactaaagaggcctgcggtcatgtatcaggacattgctgccctggagggagccgggaaagccccgtcacagacattgacagtttcattaaggagctggatgcctccgccgcccgcagcccctcttcgcagaccggggattccggatcacaagagggttctgctcaaggccacccccccgcaggagccggtggaggtagctcatgccgggcagaacccgttccagggggacagacaagttcaccacgccgtgcttgggccgcaggcgcgccagcttatcctcagtgggcgagccagcctagcgttctggacagtatcaatcccgacaagcacttcacagttaacaagaactttttgtctaactacagtcggaacttcagctcttttcacgaggattctaccagtctgtcgggtctgggtgatagcactgagccatcactgagttccatgtatggtgatgccgaagactccagttctgatcccgagagtcttactgaagctcccagggccagcgctcgggatgggtggtcccccccaagatcacgcgttagcctgcacaaggaggaccccagcgagagcgaggaagagcaaatcgagatctgctctacacggggatgtccgaaccctcctagctcccccgcccacttgcctactcaggctgccatttgccctgcctccgcaaaggtgctgtctctgaagtattctacgcccagggagtctgtcgctagtcctcgcgaaaaagctgcctgcctgccggggtcctacacgagcggtcccgattcctctcagccatcctccttgctagagatgtccagccaggaacatgaaacccacgccgacatcagtacaagccagaaccaccgccccagctgcgcagaggagaccacggaggtgacgagcgcatctagcgctatggagaacagtccactctcgaaagttgctagacatttccattccccacctatcatactgagcagccccaacatggtgaatggattggaacatgacctgttagacgatgaaacccttaaccagtacgagacaagcattaacgcagcggcttcacttagctctttctccgtagacgtccctaaaaacggcgaatccgtgctggagaatcttcacatttctgagtcacaggatttggacgacttgcttcagaagcctaaaatgatcgccaggaggcctattatggcctggtttaaggagattaataagcacaatcagggaacccacttaagaagtaagaccgaaaaggaacagccacttatgccagctagatcacctgactccaaaattcaaatggttagtagtagccagaaaaagggagtgaccgtcccccattcaccccctcaacctaagacaaatctggagaacaaagacctaagcaagaaatcccccgctgagatgctccttacaaatggacagaaagctaagtgtgggcctaagctgaagcgattgtcactgaaagggaaagccaaggttaattccgaggcacccgccgcaaatgccgtcaaagccggcggtacagatcatcgcaaacccttgatcagccctcagacaagccataagacactgtcaaaagcggttagtcagagactgcatgtagcggaccacgaggatcctgatcggaatactacagccgccccgagaagtccgcagtgtgtgctcgagtcaaaacccccgctggctaccagcggacccctcaaacctagcgtctcggacacaagcattagaacttttgtgtccccactgacatctcccaagcccgtcccagagcagggaatgtggtcccgattccatatggcagtccttagcgagcccgaccggggctgcccaacgaccccaaaatctcctaagtgcagggccgaggggagagcaccacgagccgatagcggtcccgtgtctcccgctgccagccgcaatggaatgagcgtagcaggcaacagacagagcgagccccgcctagccagtcacgttgctgctgataccgcccagcctaggccaacaggcgaaaagggtggaaacattatggcgtccgataggctggagagaacaaaccaattaaaaatcgtggagatatcagccgaagccgtgagcgaaaccgtgtgcggaaataaacctgctgagtctgatcgcagaggcggatgtctggcacaggggaactgccaagagaagtccgaaatccgtctctacagacaagtggcagagtcgagcactagtcacccaagctccctgccctcgcatgcctctcaggctgaacaagagatgtctaggtctttttctatggctaagctcgcctcttcttcaagctccctgcagactgccatcagaaaggcggaatattcgcagggcaagtcgtcactaatgtcagattcaagaggtgtgccaagaaacagtatcccgggtggacctagtggcgaagatcacctttacttcaccccacgacccgccacccgcacctattcgatgccagcccagttttccagccattttggtagggagggacacccaccacacagtctcggcaggagcagggacagtcaggttccagtgacgtcctctgtggtgcccgaggccaaagcgtcccgaggcggcttacccagcctcgcaaacggccaaggcatatactccgtgaagccactgctggatacctctagaaatctccctgctaccgatgagggtgatattattagcgtgcaagagaccagttgtctcgtcacagataagataaaggtgaccaggcgtcattactgctatgagcagaattggccccatgaaagcacgtccttcttctctgtaaaacagagaatcaagtccttcgagaatttagccaatgccgatagacccgtcgcaaagtctggtgcctcgccattcctctcagtgtcttccaaacccccaattgggaggcgcagctcaggttccatcgtgtcgggctccttgggccacccgggagacgccgcggcacggctcctacgaagaagtctctcatcctgctcagaaaaccagtcggaggcaggcacgctgctgccacaaatggcaaagtccccatcaataatgacactgaccattagtcggcaaaatccccctgagaccagctctaaaggatctgactcagagctgaagaagtccctgggaccactgggtatcccaacccccacaatgaccctagcttcccccgtgaagcggaataaatcgtccgtgcgccacacacagccttcacccgtgtccaggagcaaactgcaggaactgcgagccctgtccatgcctgaccttgacaagctatgttctgaagactactccgccgggccgagcgccgtgctgtttaaaaccgagctcgaaattacgccccggcgaagcccgggtcctcccgctggtggcgtttcatgtcccgaaaaggggggtaatagggcctgccccgggggctccggcccaaagacaagcgccgcggagacccccagttccgcctcagacacaggcgaggccgcacaagatctgccctttagacgcagttggtctgtgaacctggatcagctgctcgtgagcgcaggtgaccagcaaagactgcaatcagtactctcttcggtaggatccaaaagtacaatcttgaccttgatccaggaggctaaagcccagagcgagaacgaggaagatgtctgcttcatcgttctcaacagaaaggagggctccggcctgggtttttcagtagctggaggcacagacgtggagccaaagtcaattaccgtgcatcgggtttttagccagggcgctgcaagtcaggaggggactatgaataggggggatttcctgctgtccgttaatggggcctccttagctgggttagcacacggaaatgtgcttaaagttctacatcaggctcaattgcacaaagacgctctggtagttattaagaagggaatggaccagccacggccatccgcccgtcaggaaccgcctacggctaatgggaaaggactcctgtcccgaaagactattcccttggagccaggcataggaagatcagtcgctgtgcacgatgccctgtgcgttgaggtactaaagacatctgccggccttggcttgagtctggatggcggcaagagttcagtcaccggggatgggcccctggtgatcaaaagagtctataaaggcggcgctgctgaacaagccggaataatagaagctggcgacgagatcctggctatcaacggtaagccccttgtgggcctcatgcacttcgacgcttggaatatcatgaagagcgtacccgaaggaccagtccagcttttgatacgaaaacaccggaattcctcgtag

SEQ ID NO: 128024 - DNA, 8520 bp, synthetic construct
  misc_feature 1..8520: note = Description of Artificial Sequence: Synthetic coding sequence
  source 1..8520: mol_type = other DNA
atgccaatcactcaggacaatgcagtgctgcatctgccgctgctttatcagtggctgcaaaatagcctgcaagagggaggtgacggcccagagcaaagattgtgccaggcagccattcagaagctccaggagtatatccaacttaatttcgccgtagacgaatccacagtgcctcctgatcactctccacctgagatggagatctgtactgtatatctgactaaggagcttggcgatacagagacagtgggtctgtctttcggaaatatccccgttttcggagattacggagagaaacgaagaggcgggaagaagaggaagactcatcagggaccagtgcttgacgtgggatgcatctgggtgacagaacttagaaagaactccccagccggtaagagcggaaaagtgaggttgcgcgacgaaattctgtcccttaatggccagctgatggtaggagtggacgtgagtggagcttcctatctcgccgaacaatgctggaatggtgggttcatatatttgattatgctgcggagattcaagcacaaagcccattcgacatataacggaaactcttccaactccagcgagccaggggagactcctacattagaactgggcgacagaactgcgaaaaaaggcaaaaggacacgaaaatttggcgttatcagtcgaccacctgcaaataaagcgcccgaagagtccaagggatccgccgggtgcgaagtgagtagcgaccccagcaccgagctggagaatggcccagatccagagctgggaaatggccacgttttccagttagagaatggaccagattccctgaaagaagtcgccggaccacatctagagaggtccgaggtggatcgaggtaccgagcatcgtattcccaagacagatgcccctctcaccacctccaatgataagaggcggttctcgaagggaggaaaaacagacttccagagtagcgactgcttggctagagaggaggtcggaagaatatggaaaatggagctcctgaaggaatcagacggactgggaatccaagtatctggtggaagggggagcaaaaggtctccgcatgcaatcgtcgtgactcaggtgaaagagggtggagccgctcaccgagacggaaggctgagcctgggtgatgaactcctggtgatcaacggacacctgctggttggactgtcccatgaggaggcagtagcgatccttcggtccgccaccggtatggtgcaactggtagttgcctctaaggagaacagcgccgaggatctcctgagactgaccagcaagtcgcttcccgacctgacatcatcagtggaggacgtgagctcttggaccgacaacgaggatcaggaggcagatggagaggaagatgaagggacctcctcaagtgtgcagcgagcgatgccaggtacagacgaacctcaggacgtctgtggggccgaagagtcaaaaggcaacttggaatctccaaaacagggtagtaataagataaagctcaagtctcggctgtcggggggagtgcataggctcgaaagtgttgaggaatacaacgagcttatggttaggaacggagatcctagaatccgcatgctggaggtctccagagacgggcgtaagcatagccttccccagttgttagacagtagcagcgcgtcccaggaatatcatattgtaaagaagagtacaaggagtttgagcaccacgcaggtggagtctccatggagactgatccgacctagtgtcattagtattattgggttgtacaaggagaaggggaagggcttgggattttctattgccggggggagagattgcatccgcggacagatgggaatttttgtgaagacaattttcccaaatggatccgccgccgaggatggacggctgaaggaaggtgacgagatcttggatgtcaatggcattcctataaaaggtctgacttttcaggaagcaatccacacattcaagcaaattcggtccggattgttcgtcttgactgttagaacaaaactggtttccccaagcctcacgccttgctcgacaccgacacacatgagcagatccgctagcccgaactttaatacatccggtggcgctagcgctggcggttctgacgaaggatcaagtagctccctaggacgcaaaactcccggccccaaagataggattgttatggaggtcacccttaacaaagaacctcgcgtaggtctggggatcggagcatgttgtctggcactggaaaatagtcctccgggcatctacatacatagtcttgcaccaggctctgtcgctaagatggaaagcaatctgtcccgcggcgaccagattctcgaggtcaactcagtaaacgtgagacatgctgccctctccaaagtacacgccatccttagtaagtgccctccgggcccagtgcgactggtaatcgggagacatcctaacccaaaggtttctgagcaggagatggatgaagtgatcgcgagatcaacataccaggaatccaaagaggctaactcctcccccgggttgggaacaccccttaagtcgccttctttagctaaaaaagattccctgattagtgaaagcgagcttagtcagtactttgcgcatgacgtacccgggcccctgagtgactttatggtggctgggtccgaggacgaggaccaccccggcagcggctgttccaccagcgaggaagggtcactgcctcccagtacatccacccacaaagagccggggaaaccacgggccaacagcttggtcactctcggctctcaccgggcctctggcctctttcacaaacaggtcactgtcgcccggcaggcctctctccccggctctccgcaggcgctcaggaaccctcttcttcgtcaaaggaaggtgggctgttacgatgccaacgacgcctcagatgaagaagagttcgaccgcgagggtgattgcatttcactccccggggcacttccggggcctataagaccactgtcggaagacgaccccaggagggtatcgataagctcatcaaaggggatggatgtgcataatcaagaggagaggccccggaagactctggtgagcaaggcgatctccgcccccttactggggtcctccgtcgacctggaggaaagtattccagaaggtatggtagacgcggcctcttacgccgctaacctgacagatagcgccgaggcacctaagggatctcccggcagctggtggaaaaaagagctgagcggatcaagctctgcgcctaaactggagtataccgttcgaacggatacacaaagtcctacaaatacaggctcccccagttcacctcaacagaaatctgaaggcctgggaagtaggcatcgaccagttgctcgagtgtctccccattgtaagcgatccgaggctgaggccaaacccagcggctctcagaccgtaaaccttaccggcagagctaacgacccgtgcgacctcgactcccgggtgcaggcaacatccgtaaaagttactgtggcgggtttccaaccggggggagctgtggaaaaggaatccctgggcaaactgacaacgggggacgcttgcgtgagcacaagctgcgagctggcgtctgcgctgtctcatttggatgcttcccatttgactgagaacctccccaaggctgcctcagagttgggccagcagccaatgacagaacttgattccagttctgacctgatcagctcccccggaaaaaagggtgcagctcaccccgaccctagcaaaacgtcggtagatacagggcaggtctctagaccagagaacccatctcagccagcttcacctagggtcaccaaatgcaaggcccgatcccccgtacgcctccctcatgaggggtctccttctccgggtgagaaggccgcagcccccccagattattcaaagacaaggagcgcaagtgaaacaagtacgccacacaacacacgccgagtggcagcactgcgaggcgccggtcctggggcagagggaatgactccggctggcgcagtactgcccggcgaccccttaacttcccaagagcagcgccaaggggctcctggaaatcactcgaaagcactcgagatgacgggcatccacgcgcccgagtcttctcaggaacctagcctgttagagggcgccgattcagttagcagtagagccccgcaggcatccctgtccatgttacccagcacggataacaccaaagaggcttgcgggcacgtgtctggacattgttgcccaggaggtagccgcgaatcccctgtgacagacattgacagctttattaaggagcttgacgcatccgccgccaggtctccatcaagtcagacaggggactccggctcgcaagagggttctgcacaagggcatccccctgcgggcgccggcggggggagttcctgcagggctgaacctgtgccaggtggacagacctcatccccccgtcgtgcttgggccgccggcgccccagcatatccgcagtgggcctcccagccttcggtgttggatagtatcaaccccgacaagcactttacagtgaataagaattttctgagcaattatagtcgaaattttagcagtttccatgaggactcgacttctctgagtggtcttggagattcaaccgagccctcactctcctccatgtacggggacgctgaagactcttcctcggaccctgagagcttgacggaagcgccccgcgcgagtgcccgggacgggtggagccctccaagaagtcgagtcagtttgcacaaagaagaccccagcgagtcagaggaagagcagatagaaatctgctcaacccgtggctgccctaacccgccctcttctcctgcccacctgcccacgcaagctgccatctgtcctgcttctgccaaggtcttgtcactgaaatattcaacaccacgagagagtgtggctagccccagagagaaggcggcttgcctgcccggtagctacacaagcggccctgattcatctcagccaagctcgctgttggagatgtcttcacaggaacacgaaacccacgctgatatctctacatcacagaatcaccgcccatcctgcgccgaggagactaccgaggtgaccagcgcgagctctgccatggagaacagtccactgagtaaggtggctcgccacttccactccccgccaattatcttaagctcccccaatatggtcaacggactggaacacgatcttctcgatgacgagaccctgaaccagtacgagacgagcatcaatgcagccgcctccctttcaagcttctccgtggacgtccccaagaatggcgagagcgtgctggagaacctgcatatcagcgaatcccaagatttagacgacctgctgcaaaagcctaagatgatagcccgtcgtcctattatggcctggttcaaggaaattaataaacacaaccaggggacacatctccgttccaagactgaaaaggaacagcctctgatgcctgcccgcagcccggactctaaaatccaaatggtttcaagcagtcagaaaaagggagtcaccgttcctcatagcccaccacagcccaagaccaatctcgaaaacaaagacctgagtaagaaatcccctgccgagatgctgttgacaaacggacagaaggcgaagtgcggacctaaactgaaaaggctgagcttaaaaggaaaggctaaggttaacagcgaagcacctgctgcaaatgccgttaaagcggggggtactgaccatagaaagccattgatttcccctcagacttctcataagacactgagtaaggctgtctcgcagcggctgcacgtcgcagatcacgaagacccagataggaacacaactgccgccccaagatcccctcagtgtgtgctcgagtccaagccccctctcgcaaccagcggcccactcaagcctagcgtctccgacacctccattcgcaccttcgtctcccccttgacatccccaaaaccagtccccgagcaaggcatgtggtcacgtttccatatggccgtactgtcagagccagatcggggatgtccgactaccccgaagtcccctaagtgtagagccgaggggcgggctccgcgggccgattcgggccccgtctcacctgctgcctcacgaaatggcatgagtgttgcgggtaatcgccagtccgagcccagactcgcttcccatgtagccgctgatactgcccagcctcggcccacaggcgagaaggggggcaacattatggccagcgacagactggaacgtacgaaccaactgaaaatcgtggagatatccgccgaggctgtgagtgagaccgtgtgtggaaacaagcctgccgagtcggaccgcagaggcgggtgtcttgcccagggcaattgtcaggagaaaagcgaaattagactctatcgccaggtggcggagagcagtacatctcacccgtcctctctgcccagccatgcgtcccaggctgaacaggagatgtccaggtccttcagcatggcaaaactcgcctcatcctcaagttcactacagactgctatccggaaggccgaatatagccagggtaagagctcgctgatgtcagatagtaggggtgtgccaaggaatagtatccccgggggaccctccggagaggaccacctctactttacaccaagaccagccacccgcacttactctatgccggcacagtttagttcgcactttggacgggaaggacatcctcctcatagtctgggacgatctagagactctcaagtcccagtcacaagtagcgttgtcccagaagcaaaggcctcgagagggggcttgccaagccttgccaacggccaaggcatctattctgttaagccgctgctggatacatcacgcaatttgcccgctactgacgaaggggatatcatttccgtgcaagaaacatcctgcctggttaccgacaagatcaaggtgacccgacggcactattgttatgagcaaaattggccccacgagtctacaagctttttctctgtaaagcagcggataaaatccttcgagaacctcgccaatgcggatagacccgttgcaaagtcaggagccagcccctttctttccgttagcagcaagccacccattgggaggagaagcagcggctctatcgtctccggctcactgggccaccccggtgacgctgctgcccgcctgctacgacggtctctgtcttcttgctccgagaatcagtctgaagctggcacgctactccctcagatggccaagtccccatcgatcatgacgctgacaatcagccgtcaaaacccccctgaaacatcatctaagggctctgactccgagctgaagaaaagcctcggaccattgggaatccccacccccactatgacactcgccagcccagtaaaaaggaacaagtctagcgtacgacacactcagcctagtccagtgtctcgcagcaaattgcaggaacttcgtgctctaagcatgccagacctggacaagctttgttctgaagactacagtgccggcccatctgccgtgttgtttaaaaccgagcttgagatcacgccacggcgaagccctgggccgcccgctgggggagtctcatgccctgaaaagggagggaaccgcgcctgcccaggtgggagtggccctaagacttcagctgccgaaacaccttcatctgcgtcagatacaggcgaagccgcgcaggatcttccatttcgaagaagttggagtgtgaacttggatcagctgctggtatctgcaggcgaccagcaaaggctgcagagcgtactcagcagcgtcgggtctaagtccaccatcctcacgctcattcaggaagccaaggcacaatctgagaatgaggaggacgtatgttttatcgtgctcaaccggaaggaaggatcaggactgggattcagcgtggcgggtggtaccgacgtggagccgaaatccattaccgttcacagggtgttttcccagggggccgcctctcaagagggaaccatgaaccggggagacttcctgctttccgtgaatggagccagcctggctggtctggcccacggtaacgtgctcaaggttctacatcaggctcagctccacaaagacgcccttgtcgttattaagaaaggcatggatcagcccagaccgagtgcccgccaagaaccgcctactgctaacggcaaaggcctactgagtagaaagaccatacctttggagcccggaatcggcaggtccgtcgccgtacacgatgccctatgcgtcgaggtactgaaaacatcggccggtctcggcctttccctggacggggggaagagcagtgtgaccggcgacggtcctctggtcattaagagagtatacaagggcggggccgccgagcaggccggtatcatagaagcgggagacgagatcctcgcaatcaacggaaaacccctcgttggtctgatgcactttgacgcctggaatattatgaagtcagtgccagaaggtccagtgcagctattaattagaaagcaccggaattcgagctag

SEQ ID NO: 128025 - DNA, 45 bp, synthetic construct
  misc_feature 1..45: note = Description of Artificial Sequence: Synthetic coding sequence
  source 1..45: mol_type = other DNA
atgcctatcacccaggacaatgcagtgttacacctcccactttag

SEQ ID NO: 128026 - DNA, 1476 bp, synthetic construct
  misc_feature 1..1476: note = Description of Artificial Sequence: Synthetic coding sequence
  source 1..1476: mol_type = other DNA
atggaaaaagcagctgacctgcaagacaccgctagcttgacgctcaaatttaagtttaaccctaagttgggtatcgataatcccgtgctcagcttagccgaagatcatgacccatacgacccatggtcactggaacggccaaggttttgcctcctctcaaaggaagaggggaaatccttcggatttcacctgcagcaggaactggggagggcaggacacgtggtgtgccgagtcgatcctggaaccagcgcacaacggcaaggcctgcaggaaggggatagaatcttagcagtcaacaatgacgtcgttgagcatgaggattatgcagtcgtggttcgtcgcatccgagcctcatctccaagagtgctgttaaccgtattggcccgacatgcacatgacgtggcccgggcacagcttggcgaggacgcacacttgtgtcctaccctgggaccaggggtacggcctaggctatgtcacattgtgaaagatgagggtggctttgggttctccgttacacatggcaatcagggtcccttttggctggttctttctacgggcggggccgccgagagagcaggagttcctcctggggcacgattgctggaagttaatgggctgtggcagtcaggccagcaggtgacactgttggtcgccggacccgaggtggaggaacagtgtaggcagcttgggctgcccctcgccgctcccctcgccgagggttgggccctgcccacaaaacccagatgtcttcaccttgagaaaggtccccagggatttggctttctactccgcgaggagaaaggactggatgggcggccaggccagtttctatgggaagttgaccccggtttgcctgctaaaaaggccggtatgcaggctggcgataggcttgtcgcggtggctggtgagtccgttgagggcctaggacacgaggagactgtctcaaggatacagggtcaaggtagttgtgtgagcctgactgtggtcgacccagaggcagatcggttctttagtatggtgaggttgtcacccctgttgtttttagaaaacacggaagctccagcctcgcctcgtggcagcagtagtgctagtctcgttgaaacagaggaccctagcctggaagatacatcagtgccttccgtccccctggggtcacgccaatgcttcctataccccgggccaggcggaagttacggatttcggctcagttgtgtggccagcggtccccgtctgtttatttcccaggtcaccccaggaggctctgcagcgagagcgggactgcaggtcggagatgtaattctcgaggtgaatggctaccccgtaggtggacaaaatgacctggaaaggctgcaacagctccccgaggctgaacccccgctctgcctgaagcttgctgccagatctcttaggggtctcgaggcctggatcccccccggtgcagcagaagattgggccctggcgtccgaccttctgtag

SEQ ID NO: 128027 - DNA, 1518 bp, synthetic construct
  misc_feature 1..1518: note = Description of Artificial Sequence: Synthetic coding sequence
  source 1..1518: mol_type = other DNA
atggagaaggctgcagacctgcaggatacagccagcctgacactgaaattcaaatttaaccccaaactgggtattgataatcccgttttgagcctagcagaggaccacgatccttatgatccgtggtcactggaacgccccagattctgcctgctaagtaaggaggaaggcaaatcctttggcttccatttacagcaggagctaggcagggctggacacgttgtttgcagggtggatcctgggacatccgcgcagcgtcagggcctccaggagggggataggatcctggccgttaataacgacgtggttgagcacgaggattatgccgtggtggtgcggaggatacgtgcttcaagccccagagttctgctgacagtgttggcccgccatgctcatgatgttgctagggctcagcttggggaagacgctcatctttgccctaccctgggaccaggcgttaggcccaggctatgtcacatcgtgaaagacgaaggcggcttcggattctccgtgactcacggaaatcaggggccgttctggctcgtgctgtcaaccggcggtgccgctgaacgggcaggcgtcccgcccggggccaggctgctggaagtgaacggggtgtcagtcgaaaagttcacgcataatcagctaacacgcaaactctggcagtcggggcagcaggttacactgctcgtcgccggacccgaggtcgaagagcagtgtcgacagctgggtctgcccctcgccgcgcccctggcggaaggatgggcactgccgacaaagccgcgctgtctccatctggaaaaaggtcctcagggtttcggtttccttctgcgcgaggagaagggcctggatgggcgacctgggcaattcctgtgggaagtggacccaggcttgcctgccaagaaggctgggatgcaagctggtgaccgcctcgtcgcagtagcaggagaatcagtcgagggattagggcacgaggagaccgtcagtcgtatccaaggccaggggagttgcgtgagcctgacagtggtggatcctgaagcggatagatttttttccatggtgaggctgtcccccctgttatttctcgaaaatacagaggctccggccagcccccgcggcagcagtagtgcgagcctggttgagacagaggatccttcactggaggacacaagcgtgccgagcgtgcctctggggtcccggcagtgcttcctttacccaggaccgggcgggtcctacgggtttaggctctcatgtgtagcttctgggcctcggctctttattagccaagtgacccctggggggtccgcagcacgagctggcctgcaagttggagatgtaatactcgaagttaacggctatcctgtcgggggtcagaatgacttggagcgtctccagcagttaccagaggccgagccaccactatgcctaaagctggccgcccgttcactccgtgggctagaggcttggattccgcccggagcagccgaggattgggctctcgcctccgacctgctctag

SEQ ID NO: 128028 - DNA, 1716 bp, synthetic construct
  misc_feature 1..1716: note = Description of Artificial Sequence: Synthetic coding sequence
  source 1..1716: mol_type = other DNA
atggtcactcctagtcccccaggaaaccactctctatcactggaggcccccagactccataccgcatcagaccttctggggaaccactctctggggctccccctgatcacggcccttgtcggttcaagggacaggaggggaagggtgtttagtccggtgcctgttcccttgcctactaacccaacaacccagcaccctacacgccagaagctcccatcaacgttgtctggacatagggtgtgtcaggcccatggcgaacctgtcctcgggctgtgtccactattgcctctcttttgctgccctcctcacccaccagatccatggtccctcgagcgcccacggttttgtctgctgtctaaagaagagggaaagagttttgggttccacctgcagcaggagctggggagggccggtcatgtggtgtgccgagtggatccagggacctcggcccagcggcagggccttcaggaaggcgatcggattctggccgtgaataacgatgttgtcgagcacgaagactacgctgtcgtggtgcggcgcatcagggcgagctcacctcgagttttgctgaccgtgctggccagacatgctcatgacgtggcccgggctcaactgggcgaagatgcccacctgtgtccaacgctcggccccggagtcagacccaggctgtgtcacattgtgaaagacgaaggaggattcggtttcagcgtaacacacggtaaccagggacctttctggttggtgctctcaacggggggcgctgctgagcgtgccggagtgcctccaggggccagattactggaggtaaatggggtctccgtggaaaagttcacccacaatcagctgacccgtaaactctggcagagcgggcagcaggtgacactgctggtggctggccctgaagtcgaggaacagtgtcggcagcttggcctacctctcgcggccccccttgccgaagggtgggcgctccctactaagccacggtgtctccacctggaaaaaggacctcaggggttcggttttctgttgagggaggaaaaaggtttggatggtcgcccaggccaattcctgtgggaggttgacccagggctgcccgccaaaaaagccggcatgcaggcgggtgatcgtctcgttgccgtggcaggcgagagtgtggagggtctcggtcacgaggaaactgtaagtcgcatccagggtcaggggagttgtgtcagcctgaccgtggtcgaccctgaagctgatcggtttttttccatggtacggttatcaccacttcttttcctcgagaacacagaagctcccgccagcccacgcgggagctcctctgcctctctagtggaaacagaagatccctcccttgaagatacttccgtgccatcagtgcccttaggctctagacagtgcttcctttaccccgggcctggcggctcctatggatttagattatcctgtgtggcttccggcccccgtctgttcattagccaggttacaccagggggttctgccgcacgcgccgggctgcaggtcggagatgtaatcttagaggttaatggatatccagtcgggggtcagaacgacttggagcggctacagcagttgcccgaagccgagccccccctctgtctgaaactggcggccagatccctccgcggcttggaagcttggatacctcccggcgctgcggaggactgggccctggcctccgatctcctgtag

SEQ ID NO: 128029 - DNA, 1518 bp, synthetic construct
  misc_feature 1..1518: note = Description of Artificial Sequence: Synthetic coding sequence
  source 1..1518: mol_type = other DNA
atggaggaagccctggatctccaggacaccgcctcgcttacactgaaattcaagttcaatcccaagttgggaattgataatcctgtcttaagcctagccgaagaccacgacccctacgacccttggtcactggagcgccctcgcttttgtctgctaagtaaggaagaagggaagagtttcggctttcatctccagcaagagttggggcgcgccggtcacgtcgtgtgtagagtggacccaggcacaagtgcccagaggcagggcctgcaggaaggtgatagaatattagcagtcaacaatgacgtagtggagcatgaagactatgctgtcgtggtgcggcgcattcgtgcatcttccccacgggtgcttctgacagtgctcgcaaggcacgctcacgatgtcgctcgcgctcaactgggcgaggacgcccacctatgccctaccttggggcctggagtgcgccccaggttgtgccatatcgtgaaagatgaaggcgggttcggcttcagcgtgacacacggaaaccaaggccccttctggctggtcctgtccacaggtggcgccgccgagagggccggagtacctccaggggcccggttgctcgaggttaacggtgtaagcgttgaaaagtttacccataaccagctgactagaaagctttggcagagtggtcagcaggtaactctgctggtcgccggccctgaggttgaagagcagtgtaggcagctgggtttgcctcttgctgccccactcgctgagggttgggcactgccaacgaaacccaggtgccttcacttagaaaagggccctcaggggtttggtttcctccttcgcgaggaaaagggcctagatgggaggccgggacagttcttatgggaggtagaccctggtctgcccgcgaagaaagctggcatgcaagctggcgaccggctggtggcagtggccggcgaaagcgtggagggtctgggacatgaggagacggtctctcgaattcaaggacaaggatcatgtgtcagcctgaccgtagtcgaccccgaggcagataggttctttagcatggttcgactatcccccctcctctttttagagaataccgaagcccctgccagccctagaggcagttccagcgccagtctggtggagacagaagacccaagtctggaggacacgagcgtgccctccgtacctctgggtagtaggcagtgcttcctctacccagggcctggtgggtcatatggctttcgattatcttgtgtcgcttcaggtcccaggttgtttatttcgcaggtgacaccaggcggctcagcagctcgcgctgggctgcaggtgggagacgttatcctggaggtcaatgggtatcccgtcggcggtcaaaacgacctggaacggctgcagcaactgcccgaggccgaacctccactgtgcctgaagctcgccgcacgcagcttacgggggttggaggcatggattccaccaggggcagccgaggactgggccctcgcatcagacctactctag

SEQ ID NO: 128030 - DNA, 1716 bp, synthetic construct
  misc_feature 1..1716: note = Description of Artificial Sequence: Synthetic coding sequence
  source 1..1716: mol_type = other DNA
atggttactccaagcccgcccggcaaccatagtctgtctctcgaggccccccgtctgcacacagcctcagacttgctgggaaaccattccttgggactgccgttgattactgcgctcgtggggagtcgagatcggagagggcgcgtgttcagtcctgtgcctgtaccgctgcctacaaatcccacaacacagcaccccacaaggcagaaactccccagcacactttcaggacaccgcgtgtgccaggcccatggagaacccgtcctggggttatgcccccttctgcccctgttctgctgcccacctcacccgcccgatccctggagtcttgagagaccaagattctgtctgttaagtaaggaggaaggtaaaagcttcgggttccaccttcagcaagaactggggcgcgctgggcatgtcgtgtgtcgcgtggatcctggtacctcagcccaaagacagggcctgcaggaaggggaccgcattctcgctgtaaataacgatgtggttgaacacgaagattatgctgtggttgtgcgtaggatccgggcatcatcccctcgcgtactgttgaccgtccttgcaagacacgcccatgacgtcgcaagggcccagctaggcgaggatgctcatctctgtcctacactggggcccggtgtacgacccaggctgtgtcacatcgtaaaagatgagggcggcttcgggttcagcgtcacacacggaaatcaaggcccattctggctggtcctcagcacaggaggcgctgccgagagggcaggagttcctcccggcgctaggttacttgaggttaatggcgttagcgtggaaaagtttacacacaaccagctgacccggaagctgtggcagtcaggccagcaggtgacactcctggtcgctggacccgaggtcgaagagcagtgccgccagttggggttgcccctcgccgctcccctagccgaaggatgggccctgccaacgaagcctaggtgcctgcatcttgagaaggggcctcagggcttcggcttcctgctccgggaagaaaaaggccttgacgggagacccggacaattcctctgggaggtcgatcccggtcttccagcgaagaaagccggcatgcaggctggagacagactagtggccgtcgccggcgagtcagtggagggcttaggtcatgaagagaccgtcagcagaatacagggccagggtagctgcgtctccttaacggtggtagacccggaagctgatagattcttttccatggtccggcttagtcctctgctgtttctggagaacaccgaggccccggcttcccccagaggttcatcctctgcgagcctggtagaaactgaggaccctagtctggaagacacctccgtgccctccgttcctctgggcagtagacaatgtttcctttacccaggaccaggtggctcctacgggtttcgtttgtcatgtgtagcgtctggaccacgactgttcatatcccaagtgacccccgggggcagtgccgcccgtgctggcttacaggtcggagatgtgatactagaggtgaatggatatccagtcggaggtcagaacgaccttgaaagacttcaacagctaccagaggctgaacctcccctctgcctgaagctggccgcgcggagcctccgggggctcgaggcctggataccgcccggcgccgcggaagactgggccctcgcctccgatctcttgtag

SEQ ID NO: 128031 - DNA, 2310 bp, synthetic construct
  misc_feature 1..2310: note = Description of Artificial Sequence: Synthetic coding sequence
  source 1..2310: mol_type = other DNA
atgggttgtaacatgtgcgtggtgcagaaacctgaggaacagtacaaggtgatgctccaggtcaacggcaaagagctgtctaaattgagtcaggagcagacccttcaggcattgagaagctctaaggagcctttggtgattcaggtccttaggcggtccccacggctgagaggggactctagttgccacgacctgcagcttgtcgattcaggaacccaaaccgatattacatttgagcacataatggccttaggcaagttacgaccccctaccccaccaatggtaatcctcgagccccctccaattagccatgagtattacgatccggctgaattcatggagggcggtccacaagaggcagatcgactagacgaactagagtacgaagaagtggagttgtataagagcagccaccgggataaattgggtctgatggtatgttacagaactgatgacgaggaggatctgggcatttatgtgggagaagtgaaccctaactctatagccgctaaagacggccgcattcgcgaaggggacagaataattcagattaacggtgtggacgtgcagaacagggaagaggcggtcgccattttaagtcaagaggagaatacaaacatctccttgctggttgcacggccagaatcacagctggccaaacgctggaaggatagtgatcgagatgatttcttggacgacttcgggtccgaaaacgaaggagagctgagagctcgtaaactcaagtctccccccgcgcagcagcccggcaatgaggaagagaaaggtgctcccgacgccggccccggcctgtcaaattcacaggagctcgactccggggttggcaggactgacgagtccacacgaaacgaggagagctccgagcatgacttgctcggggatgagcctccatcaagcactaatactccaggcagcctgagaaaattcggactgcaaggagatgccttgcaaagccgagattttcacttttctatggacagccttctggccgaaggggctggtctggggggcggggacgttccaggactcactgatgaggagtacgagcgataccgagagctccttgagatcaagtgtcacctcgaaaatggcaaccagctcgggctcctgttccctcgcgcttctggtgggaattctgcactggatgtgaatcgcaatgagtccctaggacatgaaatggccatgctggaggaggagctgcgacacctggagtttaagtgtcggaacatcctgcgggcccaaaagatgcagcaactcagagaaaggtgtatgaaggcctggcttctcgaagaggagagtttgtacgatcttgccgcttcagagccaaagaaacatgagctgtcggacattagtgaactgcctgaaaaaagcgacaaggactctacaagtgcgtacaacaccggggagtcctgcagatcaacgccattgttagtagagcccctgccagagtctccgctacggcgtgcaatggcaggcaattccaatttaaaccgtactcctcctggacctgcagtagctacgccagccaaagcagcccccccacccggctctcctgcgaagtttcgaagtctgtcgcgtgaccccgaggccggacggcggcagcacgcggaggaaaggggcaggaggaaccctaagaccggcttgacactcgaacgcgtgggccccgagtctagcccatatctctctcgaaggcatagggggcaggggcaggagggcgagcattaccactcgtgcgtacagttggcccctacacggggcttggaggagctgggacatggtccactctccttagcaggcggtcctcgggtgggcggagtagcagccgcggctactgaagcacctcgaatggagtggaaagtgaaggtacgttccgacggaaccagatacgttgcaaagcgcccagtcagggacaggctgctgaaggcaagagccttgaaaatccgcgaagagaggtcaggaatgacaaccgacgacgacgcagtgtcggaaatgaagatgggcaggtattggagcaaagaggaacgaaaacagcatctaattcgcgcccgagagcagcgcaagcggagggaattcatgatgcagagccgcctcgagtgcctcagagagcagcagaatggtgactctaaacccgagctgaatataatcgcacttagccatcgtaagacaatgaaaaagagaaataagaagatcctcgataattggatcacaattcaggaaatgttagctcatggagcgagatccgccgacggtaagcgagtctataatcctctcctctcggtaactacagtctag

SEQ ID NO: 128032 - DNA, 2085 bp, synthetic construct
  misc_feature 1..2085: note = Description of Artificial Sequence: Synthetic coding sequence
  source 1..2085: mol_type = other DNA
atggctcttggcaagttgaggcctcctacaccacccatggtcattctggaaccatacgtattgagcgaattgcccccgatcagccacgaatactatgacccagctgagtttatggaaggcggtccgcaggaggccgatcggctcgacgaattagagtacgaggaagttgaactgtataagagcagccaccgagacaaactaggactgatggtatgttaccggacggatgacgaagaagacttaggaatctatgtcggagaggtgaacccgaacagcatcgccgcaaaagatgggcggatccgagagggagatcggatcatacagatcaacggggtggatgtgcagaaccgagaagaggcagtggccattctgtctcaggaagaaaatacaaacatctcgttactggtggctcgacccgagtctcaactggcaaagagatggaaggatagcgatagggacgacttcctggacgattttgggagtgagaatgagggagaactaagagcccggaagctgaaatcccctccagcccagcagcccggcaacgaggaggagaaaggagcacccgatgccggtcctgggctgagcaacagtcaggagctggactccggcgtgggaaggaccgatgagagtacccggaacgaagagagtagcgagcacgatttgctgggtgacgaaccaccctcgagcaccaataccccaggatccctgcgaaagttcggcctgcaaggtgacgccctgcagagccgcgatttccatttcagtatggattccctactggcagaaggggccgggctaggcggcggtgacgttcccgggctgaccgatgaggaatatgaaaggtatcgtgagcttctagaaattaagtgccatctggagaacggcaatcaacttgggctgctgtttccgagagctagcggtggcaattccgccctggacgtaaataggaatgaatctcttggccacgagatggccatgcttgaggaggaactaaggcatctcgagtttaagtgtcggaacatcctgcgcgcccagaaaatgcaacaacttcgagagcgatgtatgaaggcctggcttttggaagaagaaagtctgtacgacttggcagctagtgaacctaaaaagcatgagctgagtgacatctcagaactgccggagaaatccgacaaagactccacatcagcatacaatactggcgaatcatgtcgctctactcccctgttggttgagcccctccctgagtctcctctccgccgggctatggccggtaatagcaatcttaatcgcacaccgccaggcccggccgtcgccactcctgctaaggccgcaccgcctccaggcagtccagcgaagttccgctctctgtcacgtgatcccgaagcaggccgaagacagcacgctgaagagagaggaaggagaaatcctaagacaggcttgacactggagagggtgggacctgagtcatcaccctacctttctcggcgtcaccgcggtcagggtcaggagggcgagcactaccacagctgcgtccagctggctcccacacggggtctggaagaacttgggcacggccccttgtcattagctggggggcctcgtgtggggggcgttgccgccgctgcaaccgaagcaccaaggatggagtggaaggtgaaggtgcggtcagacggaacaagatatgtggcgaaacgcccggtgcgtgaccggctactgaaagctagggccctgaagattcgcgaggagagatccggcatgaccaccgacgatgatgctgtcagcgagatgaaaatgggccggtactggagtaaagaggaacgcaaacagcatctgattcgcgctcgggagcagagaaagcggagggaatttatgatgcagagtagacttgaatgcctccgcgaacaacaaaatggcgattccaagccggaactcaacattattgcactcagccatcgtaagaccatgaagaaaagaaacaaaaaaattctagacaattggattacaatccaggaaatgcttgcacacggtgccagatcggctgatggaaaacgcgtttacaatccacttctatctgtgacgacagtatag

SEQ ID NO: 128033 - DNA, 2022 bp, synthetic construct
  misc_feature 1..2022: note = Description of Artificial Sequence: Synthetic coding sequence
  source 1..2022: mol_type = other DNA
atgactgcacctcccatctcccatgaatactatgacccagccgaatttatggagggagggccccaagaagctgaccggctggacgaactggagtacgaagaggtcgagctgtataaaagcagccacagggataaattgggactgatggtctgctatcgcactgatgatgaagaagacctcggcatctacgttggggaggttaatcctaacagcatcgccgcgaaagacgggagaatcagggaaggagaccgaatcatccagattaacggtgtggatgtccagaatcgagaggaggctgtcgccatcttatcccaggaagaaaacaccaacatttcactgctggtagctcggcctgaatctcagctggcgaagaggtggaaggacagtgacagagacgatttcttggatgacttcggaagcgagaatgagggcgaactgcgtgcccggaaattgaaatcccctccggcgcaacaacccgggaatgaagaggaaaaaggagcccccgacgctgggcctggactctctaactctcaagagttggactccggagttgggagaacggatgaaagcactcgcaatgaagaatcttctgaacatgatcttctgggagatgaaccccccagcagtacaaatacgcctggttcccttagaaagtttgggctccaaggggatgccctgcagtctagagacttccatttctctatggatagcctgctggccgagggcgccggactcggagggggcgacgtccccggcctgactgatgaggagtatgaaagataccgcgagctgctggagattaaatgtcatctggagaatggcaatcaactggggcttctgttcccccgggcctccggtggaaattcagcgctggacgtcaatagaaatgaaagcttaggccacgagatggctatgctcgaggaggagctgaggcatcttgaatttaagtgcaggaacatcctcagagcccagaaaatgcagcagctccgggagcgatgcatgaaagcctggttacttgaagaagagtcgctttacgacttggcagctagtgagcctaagaaacacgagctttcagacatctctgagttaccagaaaagtctgataaggactctacctcagcgtacaatactggggagagttgccgttccacccccctgctcgtcgagccactgccagagtcaccactgcggcgtgccatggccggcaattctaatctcaaccgtacccctcccgggcctgcggtcgccacccccgcgaaagcagcccctccgccgggctctcccgctaagtttcgaagcctgtcaagagatcccgaagcaggcaggcggcagcacgctgaagagagaggtcgcaggaacccaaaaacaggactcacactggaaagggtgggccccgagagttccccttaccttagccgtcgccaccgagggcaggggcaagagggcgagcactatcatagttgcgtacagttggccccaacccgggggctcgaagagctggggcatgggccgttaagcctggcgggtggaccccgtgttggtggcgtcgctgccgcggccaccgaggccccccggatggagtggaaggttaaggtgcgctccgatggcacccgctatgttgcgaagaggccagttagagacaggctactcaaagcgcgggcgcttaagattcgcgaagagaggtccgggatgacaaccgatgatgacgccgtgagcgaaatgaagatgggtcggtattggtcgaaagaagagaggaaacagcatctgattagggcccgagagcaacggaagcgccgagaattcatgatgcagtcccggctcgagtgcttgcgggagcaacagaatggggactccaagcctgagttgaatatcatcgctctgtcacatagaaagaccatgaagaagaggaacaaaaagattctagacaactggatcacgattcaggagatgctggcccacggcgccaggtcagcagatggcaaacgtgtctacaaccctctgctttccgtgacaactgtatag

SEQ ID NO: 128034 - DNA, 1983 bp, synthetic construct
  misc_feature 1..1983: note = Description of Artificial Sequence: Synthetic coding sequence
  source 1..1983: mol_type = other DNA
atgggatgtaacatgtgcgtggtacagaagcccgaagagcagtacaaggtcatgctacaggaagttgagttatataagagtagtcatagggacaagctcgggctcatggtgtgctatagaacagatgacgaggaagatttgggtatctacgtgggagaggtgaatccaaattccatcgctgcgaaggacggccgaattagggagggcgatagaattatacagattaatggcgtggatgtgcagaaccgcgaagaagcagtggccattttgtcccaagaagaaaacactaacatttctttactcgtagcaaggccagagagccaactggctaagcgctggaaggatagtgatagggatgattttctcgatgattttgggtctgaaaacgagggcgagctgcgcgcaaggaagttgaaaagcccccctgcacagcagccgggaaatgaagaggagaagggcgcgccggatgccggtcctgggctgagtaactcccaggagctggacagcggggtgggaaggaccgacgaaagcacaagaaatgaggaatcctctgagcatgatttgcttggcgacgagccaccaagcagcacgaacaccccgggatctctgagaaagttcggcttgcaaggcgacgccctgcaatcaagggattttcacttttccatggattccctgctggccgagggcgcaggcctgggagggggcgacgtccccggcctgaccgatgaggagtacgagcggtatcgagagctgctggaaatcaagtgccatcttgaaaacggcaaccagctggggttattattcccaagagcatccggcgggaattcagctttagacgtgaatcggaatgaatccctggggcacgaaatggccatgctcgaagaagaactgcggcacttggaatttaagtgtagaaacatcctgcgggcacagaagatgcagcagttgcgagagagatgcatgaaggcttggctgcttgaggaggagtcactttacgatctcgctgctagtgagcccaaaaagcacgaattgagcgacatctcggagctccccgaaaagtctgacaaggactctacaagtgcctacaacacaggagaatcgtgcaggtcaacacccttgctggtcgagccgcttccagagtcaccactgcggagggcaatggccgggaattccaaccttaataggaccccccccggtcccgccgtagccaccccagctaaagcagcaccaccccctggctctcccgctaaattccgatccctcagcagagacccagaggctggccgaaggcagcatgccgaggagcggggacgccggaaccccaaaacaggcctgacactcgagagagtaggaccagagagtagcccttacctgtcacgccgccaccgcggacaaggccaggagggagagcactatcattcctgcgtccagctggctcccacgcgcggcctcgaagaactggggcatggccccctttcattggccggaggcccaagagtgggaggcgtggccgcagcggctacagaagcccctagaatggaatggaaagttaaagtccgttctgacggaacgcggtacgtagccaagcggcccgtgcgcgatcgcctcctgaaagctcgggcattgaaaatcagggaggagcgaagcggcatgactacagatgatgacgctgtgtccgagatgaaaatgggccggtactggtcaaaagaagaaaggaagcaacatctcatccgagccagggagcagaggaaacggcgcgagttcatgatgcagagtcggctggagtgcctgagagagcaacagaacggcgattctaagccggagctcaatataatcgccttgagccaccgcaaaactatgaaaaagcgcaacaaaaagatacttgacaattggattaccatccaggaaatgctcgcccatggcgcaagatctgcggatggaaagcgcgtgtataaccctcttctgagtgttacaaccgtttag

SEQ ID NO: 128035 - DNA, 1554 bp, synthetic construct
  misc_feature 1..1554: note = Description of Artificial Sequence: Synthetic coding sequence
  source 1..1554: mol_type = other DNA
atggcccagggattcgccgtaggctttgatccactaggacttggagatctcagctccgggtccctgtccagcctgagttcgcgtggccatcttggatccgactcagggtcaaccgcgacgaggtatctgcttagaaagcagcagcgcctgcttaatgggccccccaggggtattagggcctcaagccctatgggccgcgtgatcctcattaacagccctatcgaggccaacagcgacgagagcgacatcatacattccgtccgcgtggagaaaagccctgccggcaggttgggattttctgtaaggggcggcagcgagcacggcctcggtattttcgttagcaaagtggaggagggatcttcagcagaacgagctggcctttgcgtgggagataaaataactgaggtgaatggactcagccttgagagcactactatgggaagtgcggtgaaagtgctgacctcctcatctaggctgcatatgatggtgcgcagaatgggtagagtgcctggtattaaattctcaaaggaaaagaccacctgggtagatgtagtaaatagacggctcgtcgttgagaagtgcggatctacacctagtgataccagcagcgaggacggtgtgaggcggattgtacacttgtatactactagcgatgatttctgcctgggcttcaacatcaggggaggaaaagagtttgggctgggcatctacgtaagtaaggtggatcacggcgggctggcagaagagaatggcatcaaggtgggtgaccaggtgttggccgctaatggcgtgcgctttgatgatatcagccacagccaagcagtcgaagtgctgaaaggacaaacgcacattatgttgacaattaaggaaactgggcgataccccgcttacaaagagatggtgagcgagtactgctggcttgaccggctctctaacggggtgctgcagcaactatcacccgccagcgaatcttcttcctcagtgtccagctgcgcatcatccgcgccgtacagcagcgggtccttgccaagtgacagaatggacatttgcctgggccaggaagagcctggtagtaggggccccgggtggggacgggctgacaccgcaatgcagaccgagcccgatgctggggggagggtggagacgtggtgcagcgtccgaccaactgtgatcctgagggataccgccatccgatccgatggtccccatccaggacggcggctggacagcgccctgtcagaatcacctaagacggcgctccttctcgccctgtctcggccacgtccccctattacgcggtctcagtcataccttacactatgggaggagaaacagcagaggaagaaggaaaagtccggttccccaggcgagaagggcgcactgcagcgcagtaagactctgatgaatctctttttcaaaggtggacggcaaggacggctggcccgcgacggaaggagagaggcgtggaccctagattccggttctctcgctaaaacataccctagactggacatagagaaggaaatgggcgtgtccccctgttgtccaggctag

SEQ ID NO: 128036 - DNA, 3102 bp, synthetic construct
  misc_feature 1..3102: note = Description of Artificial Sequence: Synthetic coding sequence
  source 1..3102: mol_type = other DNA
atggcccagggctttgcagtcggattcgacccgttgggtctcggggacctgtcttctggaagtctgtccagcttatcgtctaggggccatctggggtccgattctggctccacagctacaaggtatcttctcagaaagcagcagaggctactgaatggacctcccaggggtattcgcgctagctcccctatgggtcgcgtcattttaatcaactcccctattgaagccaactctgacgaatctgacattatacatagtgtgcgtgtcgaaaaatcaccggccgggcgactgggttttagcgtgcgtgggggttctgagcacggactcgggattttcgtgagcaaggtagaggaggggtcgtcagcagaacgcgctgggctctgcgtgggggataagataactgaagtgaatggcctgagtcttgaatctaccaccatggggagtgccgtcaaagttctgacgtcgagtagtaggctccacatgatggtgaggagaatggggagggtcccggggattaagtttagtaaagagaaaacgacttgggtcgatgtggtgaacaggcggctcgtcgtggaaaagtgcgggtctaccccttctgacacgtctagtgaagacggagtcaggcgcatcgttcatttatacaccacgtcagatgacttttgcttaggatttaacattcgcggtgggaaggagtttggtctgggcatatacgtttccaaagtggaccatggcggactggccgaggagaacggcatcaaggtcggggaccaggtacttgcggccaacggtgtgaggtttgacgatatcagccactctcaggccgtggaagttcttaaggggcaaacccacatcatgctgacgatcaaggagacaggacgataccctgcatataaagagatggtgtccgagtactgctggttagatagactctccaatggcgtgctgcagcagctgtcgccagcttccgagtctagcagtagtgtgtctagctgcgcatccagcgctccgtacagttcagggtctctgcccagcgaccgcatggacatctgccttggacaagaagaacccggctccagaggaccaggatggggacgtgccgacacagccatgcagacggaaccagacgccggcggtcgcgtggagacatggtgctctgtccgcccaaccgtcattttacgcgacacagcgatcaggagcgacggcccgcacccgggacgccgattagattcagctctcagcgagagccctaaaaccgcacttctcctcgcactgtcaagacctcggccccctattacccgatctcagagttacctgacactgtgggaggaaaagcaacagaggaaaaaggagaaatccggctctccgggagaaaaaggcgctctgcagaggtcaaagactttaatgaatttgtttttcaaggggggccgacaggggagactggcaagagacggacgacgtgaagcttggacactggacagtggctctttggctaagacctatccgcgcctggatatcgagaaagctggtggagtcggccctgtacagaaatttgtgacttggcgtcttagaagagatcaggaaagaggcagggctttgttatcagcacgttctggcagccccagctctcagttgcctaatgtggacgagcaggtccaggcatgggagagcagacgaccgttaatccaggacttggcccagcgcctgctgactgacgacgaggtcctcgcagtgaccaggcactgtagtaggtacgtgcatgagggaggcatagaagatttagtgaggccgctccttgccatcctggaccgaccagagaaactgcttcttctgcaggacattagaagcgtcgtcgccccaacagaccttggtcggttcgattcgatggtaatgcttgtggagttagaggcttttgaagcgcttaagtctcgcgccgtgagacctcctgccctgaggccggcccgacaggataccccccctaagagacatttaattactcctgtgccagacagtcgtggcgggttctacctcctgccagtcaatggctttcccgaagaagaggacaacggggaactgcgggagcgcctgggcgctctgaaggtgagtccttcagcctccgcacccaggcacccccataaggggataccgcctcttcaggacgtgcccgtagatgcctttacacccctgcgaatcgcttgtactcccccccctcagctgccccccgtagcacctaggcccctacgtcctaactggctgttgacagagccactgagcagagagcatcctcctcagtcacaaatccggggcagagcccagtcacgtagtcgtagccgctcgcgatccagatcgagatctagccgtgggcagggaaagtcacccggtcgcagatccccatcaccggtgcccacaccagcccccagtatgacaaacgggcggtatcataaaccccgcaaagctcgtccccctctgccaaggcccctggatggcgaagcagcaaaggtgggtgctaaacagggacctagcgaatccggtacggaggggactgcgaaagaagcagccatgaagaacccttccggcgagctgaagactgtcaccttgagtaaaatgaagcagtcattaggaatatccattagcggagggattgagtccaaggtccagccgatggtgaaaatagagaagattttccccggcggagctgcattcctgtccggcgcactgcaggcgggcttcgaactggtggcagtagacggcgaaaatttggagcaagtcacacaccaacgcgccgtggatactatcagaagggcctatcgcaataaagcacgcgagccaatggagctcgtagtgagagtgccagggccgtctcctaggccatctccgtccgatagcagtgcactcaccgacggtggcctccctgcggaccatttgccagctcaccaacccctggacgctgcacctgttcccgcacactggctgcccgagccccccaccaatccacagacccctcctactgatgcccgcctcctgcagccgacaccatcacccgcccctagccccgcactgcagactcccgattcaaagcctgccccttcgcccagaatcccatag

SEQ ID NO: 128037 - DNA, 627 bp, synthetic construct
  misc_feature 1..627: note = Description of Artificial Sequence: Synthetic coding sequence
  source 1..627: mol_type = other DNA
taaccccgacctccgatcactcggagccaatcatacttgaccctgtgggaggagaagcaacagaggaagaaggaaaagtccgggtcacctggcgagaagggcgctctgcagaggtccaagaccctgatgaacctcttcttcaaggggggcaggcaaggaagactggcccgcgacggtcggagagaagcatggacattggacagcgggagcctggcgaagacatatcccaggcttgacattgaaaaggctggcggggtcggtccagtccagaagtttgtgacatggcgcctgaggagggatcaagagagaggcagagccttgctttcggctcgctcaggctccccctcgagtcaactgcccaacgtcgacgagcaggtacaggcatgggaatctagacggcccctcatccaagatctggcacagaggctgctgacggacgacgaggtcctggctgtgacgcgccactgctcgcggtacgtgcacgagggcgggatcgaggacctcgtccgtcctctcttggccatcctggatcgccctgaaaagctgttattactgcaggatatcaggagcgtggtcgctcccactgatctaggcaggttcgattctatggtgatgttggtggaatag

SEQ ID NO: 128038 - DNA, 3465 bp, synthetic construct
  misc_feature 1..3465: note = Description of Artificial Sequence: Synthetic coding sequence
  source 1..3465: mol_type = other DNA
atgggtctgctcctgatgatcctggcctctgcggtgctgggatccttcctgaccctgctcgcacagtttttcttgttgtacaggcggcaacctgagccaccagctgacgaagctgccagagccggcgagggcttccggtatatcaagccagtgccggggttactgttacgcgagtatttatacggggggggcagggatgaggaaccaagcggagccgcaccggagggtggggccacccctaccgccgccccagagacaccagcaccccccactcgtgagacctgttacttcctcaatgctactattctgttcctgtttcgtgagctgcgcgacactgccctgaccagaaggtgggttacaaagaagatcaaggtggaattcgaagagcttctgcaaaccaaaactgcagggcggctcctggaggggttaagtctcagagacgtgtttcttggagagactgtgcctttcatcaagactatcagattagtgaggcctgtcgtgccatcagccactggcgagcccgacggacccgaaggggaggccctacccgcagcctgcccagaggaattagctttcgaggccgaagtcgaatacaacggcgggttccatttggctatcgacgttgacctcgtttttggaaaatccgcgtacctgttcgtgaaacttagccgggtggtgggccggctccggctggtctttacacgcgtgcccttcacacattggtttttttcattcgtcgaggaccctctaatcgattttgaggtgcgcagccaattcgaaggacgaccaatgccacagctcacaagcattattgtgaaccagctgaaaaagattataaagcgaaaacacaccctgcccaattataaaatccggtttaaacctttctttccttatcagaccctgcagggtttcgaagaggatgaagagcacatacatattcaacagtgggcgcttaccgaaggcagactgaaggtgacacttctggagtgctcccgactcctcatatttggaagctatgacagagaggctaatgtgcactgcacactggaactttcttcaagcgtgtgggaggaaaagcagcggagttctattaagaccgtggagctcattaagggtaacttgcagtcagtcggtctaacccttcgcctggtgcagagtacagatggatatgctggacacgtaattatcgagactgtagcccctaacagccctgctgctattgcggatctgcagcgtggcgataggttaattgcgattggaggtgtcaaaatcaccagcaccctgcaggtcttgaagctgataaagcaggccggggaccgagttctcgtctactacgaacggccagtaggccagtctaaccaaggcgcagtgcttcaggacaactttggacagcttgaggaaaattttttatcatcctcttgtcagtccggctacgaagaggaggcagccggcctgaccgtcgatacggaatccagagagctggactctgaatttgaggaccttgcgagtgacgtccgagcacagaatgagtttaaggatgaggcacagtctctgagtcattccccaaaacgagtgccaacaacgcttagtataaaaccattaggtgccatctcacctgtcctaaataggaagctggccgttggatcacatccacttccgccgaaaatccagagcaaggatggtaacaagccgcctccattgaaaacatctgaaattaccgacccagctcaggttagtaagcccactcagggctcagccttcaagcctcctgtaccaccccgaccacaggctaaggttccactgccgagcgcagatgccccaaatcaggccgagccagacgtgctagtggagaagccagagaaggtcgtacccccccccctggtggacaagagtgctgaaaaacaggctaagaatgtggacgcaatcgatgacgccgcagcccccaaacagttcctcgcaaaacaggaggtagctaaagatgtgacttctgaaacatcctgccctacaaaggacagtagcgacgaccgccagacctgggagtccagcgaaatcttataccggaataagctcggcaagtggaccaggacacgtgcctcctgcctgttcgatattgaggcttgtcacagatatctcaacatagccctgtggtgccgagacccgttcaagcttggcgggctcatctgtctgggccatgtatctctcaaactcgaagatgtggctttaggctgtctggctacctccaataccgaatacctgagtaagctgcgactcgaagctccctccccaaaggccatcgtcacccggacagccctccggaatctctcaatgcagaagggcttcaacgataagttctgctatggagatattaccatccacttcaaatacctcaaagagggcgaatctgaccaccatgttgtgacgaacgtcgagaaagaaaaggaaccccatttggtggaggaagtttctgttctgccaaaggaggagcagtttgtggggcaaatgggtctcactgaaaacaaacactctttccaggacacgcagtttcagaatcctacctggtgcgattactgcaaaaagaaagtgtggaccaaagccgcctctcaatgcatgttctgcgcatatgtatgccataagaagtgtcaggaaaaatgcttagccgagaccagcgtgtgcggcgccaccgaccgacggattgataggacactgaaaaatctccgcttagagggtcaggagacgctgcttggcctgccaccccgggtggatgccgaggcgagcaagagtgtgaataagacaacagggttaactcgacatattataaacacatcctccagactcctcaaccttcgccaggtctcaaagacacggctgtctgaaccaggaacagatctcgtggagccatctccgaaacacacccccaatacatcagacaacgagggctccgacaccgaagtttgcgggccaaactccccctctaaaaggggcaacagcactggcatcaaactcgtacggaaagagggtggattagacgactcagtgttcatcgctgtgaaggagatcggacgggatctgtacagagggttgcctaccgaagagcgtatccagaaacttgagttcatgctggacaagctacaaaatgagatcgaccaagagcttgaacacaacaatagccttgtgcgggaagagaaagagaccaccgatacccggaaaaagtctttactgtccgcagccttagcaaaatctggcgaaagactgcaagcgctaaccctgttgatgatccattaccgcgcaggcatcgaggatatcgagacactggaatcattgagtctggaccagcatagcaaaaagatttcaaaatatacagatgacactgaagaagacctggacaatgaaatctcccagctgattgatagccagccgttctcatctatctctgacgacctgtttggaccctcagagtccgtgtag

SEQ ID NO: 128039 - DNA, 3201 bp, synthetic construct
  misc_feature 1..3201: note = Description of Artificial Sequence: Synthetic coding sequence
  source 1..3201: mol_type = other DNA
atgggctttgagctggataggttcgacggggacgtggatcccgacctgaaatgcgccctgtgtcataaggtcttagaggatcccctcaccaccccctgcgggcacgtgttttgcgccggctgcgttttaccctgggttgtgcaggagggcagttgccctgctagatgccgcggacggctctccgcaaaagaattgaaccatgttctcccccttaagaggctgattctcaaattagatatcaagtgcgcatatgctacccgtggatgtggcagagtggtgaagctacaacagctgcccgaacacctggagcgatgcgactttgcacccgcacgttgcagacacgcagggtgtggccaagtgctcctacgccgcgacgtggaagctcatatgagagacgcctgcgatgcacggcccgtcggtcgctgccaagaaggatgcgggctcccactcacccatggcgaacagagggcgggggggcattgctgcgcccgcgccctgagggcccataatggcgccctgcaggcgaggctgggcgctttgcataaagctcttaagaaggaggcgctgcgcgctgggaaacgggaaaaatcactagtggcccaactcgccgccgcacagctagagctgcagatgacagctcttcggtaccagaagaagtttacggaatactctgcgcgactggactctctctccaggtgtgtcgccgcccctccaggcggcaaaggtgaagaaactaagtccctgactctggtcttacaccgcgactccgggtctctgggctttaacatcattgggggacggcccagtgtcgataaccacgacggctcctcgtctgaaggcatttttgttagcaagatcgtggacagtggcccagccgcgaaggaaggcggactccagattcatgacaggattatcgaggtgaatggccgggatctcagcagagcgactcatgaccaagcagtcgaggcattcaaaaccgcgaaagaacctatagtggtacaggtcttgcggcggacacctcgcactaagatgttcactcccccatcagaatctcagttagttgacacagggactcagaccgacattacattcgagcacataatggccctgacaaaaatgagtagcccatctcccccggttcttgacccttatcttctgcctgaagagcaccccagtgcacacgaatattatgaccctaacgactacatcggtgacatacaccaggaaatggatagagaagagctggagctggaagaggtggacttgtacagaatgaattcccaagacaagcttggtttgactgtatgctaccggaccgacgatgaggatgatatcggaatctatatttccgaaatagacccaaattcgatcgccgccaaagatggaagaatcagggaaggcgaccgaataatccagatcaacggcatcgaggtgcaaaacagagaagaggctgttgctctgcttacatctgaggagaataagaactttagtttgctcatagctcgtccagaactgcaactggacgaaggttggatggacgacgaccgcaatgattttttggacgatcttcacatggacatgctcgaagagcagcaccatcaggccatgcagttcaccgcctccgtgcttcaacagaagaaacatgatgaggatggcggcaccaccgataccgccacaattctcagtaatcagcacgagaaggacagtggagttggcaggaccgatgagagtacccgcaacgacgaatcatccgagcaagagaacaacggcgatgatgccactgcgtcttccaaccccctcgccggtcagaggaagctgacctgtagccaggatacattaggatctggagatcttccattctctaacgagagcttcattagcgccgactgcaccgatgctgactatctggggattcctgtggacgagtgcgagcgtttccgagaacttcttgagcttaagtgtcaggttaagagtgcaacaccttacggcttgtattatcccagtggccccctggacgccgggaaatcagacccagagtctgttgacaaagaattagaactattaaacgaggagctgcgatccattgagctggagtgcctctccattgtgagagcccacaaaatgcagcaattgaaggagcagtaccgcgaaagttggatgttacacaattctggtttcaggaactataatacctcgattgatgttcggagacatgagctgtcggacatcacagagctcccagaaaagtcagataaggacagttcttccgcctataataccggcgagagctgtcggtcaactccactgaccctggaaatatctcccgataactcgctccgacgggcggcagaaggaatctcgtgcccatcttctgagggagcagtgggaacaacagaagcatacggaccagcatctaaaaaccttctttccatcacagaggaccccgaggtcggaactccaacctactctccaagcttgaaagaactcgaccccaaccagccattagaatctaaggaacggcgtgcctccgacggttctagaagtccaacaccctcgcagaaactggggtccgcttacctgccatcataccaccattccccttacaagcacgcccacatacctgcgcacgctcagcactatcagtcttatatgcagcttattcaacagaaatcagcagtggaatacgcccagtcacaaatgagcctcgtgtccatgtgcaaagatcttagcagtcctaccccttccgagcctcggatggaatggaaagtgaagatccgctctgatggcacaaggtacataacgaagcggcccgtccgggacagattgctcagagagcgggcactgaaaatccgtgaagagagatctgggatgactacggatgatgacgcagttagcgaaatgaaaatgggtcggtattggtctaaggaagaacgcaaacaacacttagtgaaggctaaagaacagagaaggcgtcgcgagtttatgatgcagagccggttggattgcttaaaggaacagcaagcggcagacgaccggaaggagatgaacatattagagctgtcacacaagaaaatgatgaaaaagcgtaataaaaagatttttgacaactggatgactatacaggaactgctgacacacggaacaaagagtcccgatggcacgagggtttacaactctttcctgagcgtgacaaccgtgtag

SEQ ID NO: 128040 - DNA, 2190 bp, synthetic construct
  misc_feature 1..2190: note = Description of Artificial Sequence: Synthetic coding sequence
  source 1..2190: mol_type = other DNA
atgggctttgagctcgaccgcttcgacggcgatgtggatccagatttgaagtgtgcactgtgccacaaggttctggaggaccctcttacaacgccgtgtggccatgtcttctgcgctggctgcgtgttgccatgggtggtgcaggagggcagttgcccggcccgctgtcgagggagactatctgctaaagagcttaatcacgtcttacctctgaaacgacttatcctgaagctagacatcaaatgtgcctacgccaccaggggctgcggacgagtggtgaagctgcaacaactccccgagcacctggaacggtgtgacttcgcaccagccagatgtaggcacgcaggttgcggccaggtgctgcttcgccgcgatgtggaagcccacatgagggacgcgtgcgacgcaaggcctgtgggccgttgtcaggaaggatgtgggctgcctcttacacacggggaacagagagccgggggtcattgctgtgccagagcactgagggcgcacaatggagctcttcaagctagactgggagcgctgcataaggccctcaagaaagaggcactgagagctgggaagagggaaaagtctttagtggcacagctggctgccgctcaactggaactccagatgacggccctccggtaccagaaaaagttcaccgagtacagcgctcgcctggattccttgtctcgctgtgtggctgctcccccgggggggaagggggaggaaaccaagagtctcactctggttttacaccgggactccggatccttgggattcaatattattggcgggcgaccaagcgtagacaatcatgacgggtctagcagcgaaggtatattcgtcagcaaaattgttgatagcggacctgcagcgaaagaaggcggcctacagattcacgaccgtatcattgaagtgaatggccgggatctgtctcgtgctactcacgaccaggcagtagaggcattcaagaccgctaaggagcccatcgtggttcaggtactccggcgcacgccgcgcactaaaatgttcacacctcctagtgaaagtcagttagtggacactggtacacagaccgatatcacgtttgaacacataatggccttgaccaagatgtcctcccccagcccaccggtcctagacccttacctcctccccgaggagcacccatccgcccatgagtattacgatcccaatgactatattggggatatacatcaggaaatggaccgggaggagttagaactggaggaagtggatctctaccgaatgaactctcaggacaagttaggcctaacagtgtgctataggaccgacgatgaggacgacatcggaatttacataagcgagattgatccgaactctatcgctgcaaaggatgggagaattagagagggagataggataatccagatcaacggaattgaggtgcagaatagagaagaggccgtggccctgctgacatcagaagaaaacaagaacttctctctgctgatcgcacgccccgaacttcaactagacgaggggtggatggacgacgataggaatgattttcttgatgacttacatatggacatgctggaagagcagcaccatcaggctatgcagttcacggccagcgttctgcaacagaagaagcacgatgaggacggcggaaccaccgacaccgcgacaatcctgagcaatcagcatgagaaggatagtggcgtaggccgcaccgatgagtctactcggaacgatgagtcttcagaacaggagaataacggcgatgacgcaactgcatccagcaacccactcgcaggtcagcgtaagctgacatgtagccaggacacactcgggtcaggagatctgcccttcagcaatgagagctttattagcgcagactgcaccgacgcggattatctgggtatccctgtggaaggtgaagacccccagcggcgtgacgcactgcaccaccaagaagcgagggccggaccacccgccgccggggcaaggcctgaagaccccgggcgggcccagagacacgatcatagacggcggaggggggaacgagacgaagatggggccctgctggaacagggtggggaggaggccgcaccaggcgagggccagggggctgccgccgctgctagagttcacgacgctgagcaggttggcctttcacagggcgcagctagctccagatag

SEQ ID NO: 128041 - DNA, 2352 bp, synthetic construct
  misc_feature 1..2352: note = Description of Artificial Sequence: Synthetic coding sequence
  source 1..2352: mol_type = other DNA
atgggatgcagtttgtgctccttgcagaagcaggaagagcaatacaagctgctgtacgaggtttgccaagtgaacggacgcgacctctcccgcgccacccatgatcaggccgtggaagcttttaaaaccgcgaaggagcctatagtggttcaggtgctgaggaggacgcccaggacaaaaatgtttaccccaccttcggagagccagctggtcgacaccgggacacaaacggatatcacatttgagcacatcatggccctgaccaaaatgtcttcaccgtcccctccagttctggacccctacctgttacctgaggaacatccaagcgcccacgagtattacgacccgaacgactacattggcgatatacatcaagaaatggaccgggaggagttggaactggaagaagtcgacttgtatcgcatgaactctcaggataaactggggctgacagtgtgttataggacggacgacgaagatgatatcgggatctatattagcgagatagatccgaattcgattgcagccaaggacggacgcattcgggagggcgacaggattatccagatcaacggaatcgaagttcagaaccgggaggaggccgtcgccctcctgacatctgaggagaataaaaacttttccttgttgattgcgcgtccagagctacaactcgatgagggatggatggatgacgacaggaatgacttcctggacgacctacacatggacatgttggaagagcaacatcaccaggctatgcagtttacagcaagcgttctacaacagaaaaaacacgatgaagacggaggaacaaccgacaccgctaccatcttgagcaatcaacacgagaaggactctggcgtcggtcgaactgatgaaagtacaagaaacgatgaatcttctgaacaggaaaataacggggacgacgccaccgcttcctccaaccctctggccggccagcgcaaactcacttgcagtcaggatactctaggcagtggagatctacctttcagtaatgagagttttatcagcgccgattgcaccgatgcagattatctgggcataccggttgatgagtgtgagaggtttcgagaactgctcgagctgaaatgccaggtgaagtccgcaactccatatgggctctattatccgtccggccctttggatgccggtaaatctgacccggaatcagttgacaaagagctcgaactcctaaatgaggagctacggagcatagagctggagtgcttgagcatcgttagggctcacaagatgcaacagttgaaggagcagtaccgggagtcttggatgctgcataactccgggttccggaattacaacacatccatcgacgtcaggcggcacgaactcagcgacatcaccgaactaccagaaaagtctgataaagattcctctagcgcgtacaatactggtgagtcctgtaggtccactccactgaccctggaaatctcccccgacaactctctgaggagagccgcggaaggtatctcgtgtcctagttcagaaggagctgtgggcacgacagaggcctacggaccggcctccaaaaacctgctctccataacagaggaccctgaagtcggcacccctacttattcgccctcattgaaagagcttgaccctaaccagcccctggagagtaaggaacgtcgagctagcgacggatcccgatctcccactcccagtcaaaaactgggcagtgcttacttgcccagctatcaccatagcccatataagcacgcacatattccagctcacgcccagcactaccagagctacatgcagctgatccagcaaaagagtgcggttgagtatgctcagtcacaaatgagtctggtttccatgtgcaaagacctatccagccctacgccatccgagcctagaatggaatggaaggtgaagatccggagtgatggtactagatacataacaaagaggccagtgcgcgaccgtctactgcgggagcgggccctgaaaatcagagaagagcggagtgggatgaccacagacgacgatgcggtatcggagatgaagatgggaaggtactggtccaaggaagaacgtaagcaacatttggtaaaggccaaggagcagcggagacgcagagaatttatgatgcagtcccggcttgactgcttgaaagaacagcaggccgccgatgatcgtaaggagatgaacattttagagttaagccacaaaaaaatgatgaaaaagcggaataaaaagattttcgataactggatgaccatccaggaattgctgactcatggcacgaagagtcctgatggtaccagggtctacaactcattcctctccgttaccaccgtttag

SEQ ID NO: 128042 - DNA, 2367 bp, synthetic construct
  misc_feature 1..2367: note = Description of Artificial Sequence: Synthetic coding sequence
  source 1..2367: mol_type = other DNA
atgaagatggagcataagcgcatgattcttctgttctcaaagtttacgctgattcataagccccacggggggagatggtatctggtgaacgggagagatctgtccagggctactcacgatcaagccgttgaggcatttaaaacggccaaagagccaattgttgtgcaggtcctacgtagaactcccagaactaagatgtttacacctccctctgaatcccaacttgtcgatactggcacgcaaacagatatcacattcgagcacataatggccctgactaaaatgagctcaccgagccccccggtactagatccgtaccttctgcctgaggagcacccgagtgctcacgagtattacgaccccaatgactatattggggatatacatcaggaaatggaccgtgaggaattggagcttgaagaagttgatctgtatcggatgaattcccaagacaagctcggcctcactgtatgctacagaaccgacgatgaagatgacatcggtatctacattagcgagatcgaccccaacagcattgctgctaaagatggtcggatacgggaaggtgacaggatcatacagattaatggtatagaagtccagaatagagaggaagccgtcgcgctcctgacatctgaagaaaacaaaaacttcagtctcctaattgcacgccctgagttacagcttgacgagggttggatggacgatgataggaacgacttcctcgacgacctgcatatggatatgcttgaagagcagcaccatcaggcaatgcagtttacggcctctgtactgcagcagaagaaacatgacgaagatggaggaaccacggacactgccacgatcctcagcaaccagcacgagaaagattctggcgtggggcgtactgatgaaagcactaggaacgacgaatcttccgagcaggagaataatggtgatgatgccactgcttcatccaatccactggcaggccaacggaagctgacatgctcccaggatacactcggcagcggcgatctccccttcagtaacgagtccttcatatcggcagattgtactgatgctgactatctcggtatccccgttgatgagtgtgaacgatttcgagagttactggagctgaaatgtcaagtgaagtcggccactccatatggcctgtactatccgtcaggacctctggatgcaggcaagtctgacccggaatccgtcgataaagagctcgaactgctgaatgaagaattacggtccattgagctggaatgccttagtatcgtgagagcacacaagatgcaacagctgaaggagcagtaccgcgagtcttggatgctgcacaatagcgggtttcgcaattacaacacaagcattgatgtgcggaggcacgaactgagcgatatcacagagctgcccgagaaaagcgacaaggatagctcctctgcttacaacacaggagagtcctgtcgcagtacccctctaacgctcgagatttctccagataattcgctccgtcgtgccgccgaaggaatttcctgtcctagctcagaaggcgcggttggcacaacagaggcctatggccccgcctccaagaatctgctgtcaattactgaagatccagaagttgggactcccacctactccccatctctcaaggaactcgatcccaatcagccacttgaatctaaggaacgccgcgctagtgacggctccagatcccctactccgagccagaagctggggagtgcttacctgccgtcttaccatcattccccttacaagcatgcccatatcccagcccacgcacagcactaccagtcgtacatgcagctcatccaacagaagagcgctgttgaatacgcccaatcgcaaatgtcactggtgagcatgtgtaaggacctgtcatctcctaccccctctgagcctcgcatggagtggaaggtgaagattagatccgacgggacacggtacatcaccaaacgacctgttcgtgacagactgctgagagagagggccctcaaaattagagaagaacggagtggtatgactacggacgacgatgccgtgagcgaaatgaaaatgggccggtactggtcgaaggaagagcgaaagcagcaccttgttaaggctaaggagcaaagaaggcgcagggagttcatgatgcagagccggctagattgtctgaaagagcagcaagccgccgacgatcgaaaggagatgaatattctcgaactcagccataaaaaaatgatgaaaaagagaaataaaaagatcttcgacaattggatgactattcaggaactgctaacgcacggcaccaagtcccctgacggaactagagtctataatagtttcctcagcgtcacgaccgtgtag

SEQ ID NO: 128043 - DNA, 2331 bp, synthetic construct
  misc_feature 1..2331: note = Description of Artificial Sequence: Synthetic coding sequence
  source 1..2331: mol_type = other DNA
atgtctggaaagcgccagttttttctcaaaccactggcactgctcacgtgctggccctccacagtgaatgggaaagacctctctaaagccactcacgaggaagcagtggaagcgttccggaatgcgaaggagcccatcgtggtccaggttcttcggcgaacacccttgtcccgaccggcttacggcatggcttcagaggtacaattgatgaatgcttctactcagaccgatatcactttcgagcacatcatggcgctggcaaaattgcggcctccgaccccccccgtgcccgacatttgtccatttctgctatccgacagctgccacagcctgcatcctatggaacacgaattctacgaagataatgaatatatcagctcactccccgcggacgcggatagaaccgaagattttgaatatgaggaagtggagctgtgccgcgtgagtagtcaggagaagctggggctgaccgtgtgttatcgtacagacgatgaggaagacacaggcatctacgtgtctgaggtcgacccaaattccatcgctgctaaggacggaaggattagagaaggtgaccgcatcctgcaaatcaatggcgaggatgtacagaacagggaggaagccgtggctttactgtcaaatgatgaatgcaaaaggatcgtgttgcttgttgcccggccagagatacagttggacgaggggtggttggaagatgaacgcaatgaatttctcgaagagctgaacctcgagatgctggaggaagagcacaacgaagcaatgcagccaaccgcgaatgaggtcgaacagcctaaaaagcaggaggaggaagaaggtacaaccgataccgcaacgagctcgtctaacaaccacgagaaggacagcggcgttgggcgcaccgatgaatccttgaggaacgatgaaagctctgagcaagagaacgcagctgaagatcctaatagcacttctctcaaaagtaaacgtgatttaggtcaatctcaggataccctgggatccgtagagctccagtataatgaaagcttggtcagtggagagtatatcgatagtgattgcattggaaatcccgacgaggattgtgagaggtttagacaactactagagctcaaatgcaagatcagaaatcacggtgaatacgacctttactattccagtagcaccatcgaatgcaaccagggagagcaggaaggagtcgagcacgagctgcagttgctcaatgaagagcttaggaacattgagctggaatgccagaacattatgcaagcccaccgtctccagaaggtgaccgaccagtacggcgatatctggactttacacgatggcggattccgcaattataatacttccattgacatgcagcgcggtaagcttgacgatatcatggaacaccccgagaagtccgataaggattcttctagcgcgtacaataccgctgagtcctgccgtagcacccctctcaccgtagacaggtctcctgacagctctctgcccagggtcatcaatctcaccaataagaagaacctgcgatcaaccatggcagcgacccaaagttctagcggtcagagcagcaaggaaagtacgagtaccaaggccaaaacaactgaacaaggctgtagcgctgagagcaaggaaaaggtgctggaggggtcaaagctgcctgatcaagagaaggctgttagcgagcacatcccatacctgtccccttaccactctagttcctataggtacgcgaatatacccgcccacgctcgacactatcaatcatacatgcagctgatccagcaaaagtctgcagtcgagtacgcacaaagccagctgagcttggtcagcatgtgcaaggagtcccagaaatgtagcgagccaaagatggaatggaaagtgaaaatccggtcagatggcacccgatatatcacgaaacgacctgtgcgcgatagaatattaaaggaacgggcgctcaaaattaaggaggaacggtccggtatgacgacagatgacgatacaatgagcgagatgaagatgggaagatactggtcaaaagaggagcggaaacaacatctcgtgcgagcgaaagagcaacgacgccgccgcgaatttatgatgcggtctaggcttgaatgtttgaaagagtcgccccaatcagggagcgagggcaagaaagagataaacataatcgagttgtctcataagaagatgatgaagaaaaggaacaagaagattctagacaattggatgactatacaagaactgatgactcatggagctaaatctcctgatggcactagggttcataatgcttttctttctgtaacaacagtatag

SEQ ID NO: 128044 - DNA, 3111 bp, synthetic construct
  misc_feature 1..3111: note = Description of Artificial Sequence: Synthetic coding sequence
  source 1..3111: mol_type = other DNA
atggggttcgccctggaacgttttgctgaggcagtagatcctgcactggaatgcaagctctgcggacaagttctggaggagcccttgtgtacaccatgcggccatgtgttctgcgcctcttgcctgcttccctgggctgtgagacggcggagatgtccgctccagtgccagccgctggcccctggggaactgtaccgagtgctacctctgcgatctctgatccagaagctgagggttcagtgcgattacagggccagaggctgtggccactccgtccgacttcacgagctggaagcccatgtagagcattgcgactttggtccagccaggagacttcggtccaggggcggatgtgcctccgggctgggaggcggagaggtgccagcaagggggggttgtggccctacaccgagagccggaagaggcgggggtgccagaggcggcccccctggcggacggtgggggcgtggacggggacccggaccccgggtgttagcctggcgtagaagagagaaagccctgctggcccagctgtgggccctgcagggggaggtccagcttaccgcccgcagatatcaggaaaagttcacccagtacatggctcacgtacgcaacttcgtgggcgacttgggaggcggccatcgcagagatggagagcacaagccctttaccattgtactggaaagagaaaacgatacactgggtttcaatattattggcggacgtcccaatcagaataatcaagagggcaccagcacagagggaatctacgtgtcgaaaatactcgagaacggccctgccgatcgggccgatgggctggaaatacacgataaaattatggaagtgaacgggaaggacttatccaaagctactcacgaagaggctgtagaggctttccgcaatgcaaaagaacccatcgtagtgcaggtgcttagacgcactcccctctctcgccctgcgtatggcatggcaagcgaggtacagctaatgaacgctagtactcagactgacatcactttcgaacatatcatggcgttggctaaattgagaccaccgactccccccgtgccagatatctgtccattcctgctgtctgactcctgtcactcacttcatccaatggagcacgagttttacgaggataatgagtatattagttccctgcctgctgatgcagaccggactgaggattttgagtatgaggaagtggaactatgccgcgtgtcatcccaagaaaagctcggcctgacagtctgttacagaaccgacgatgaggaggataccggcatctatgtgtccgaagtagatcctaacagcatcgcagccaaagatggaaggatccgtgagggggatagaattttgcagattaatggtgaggacgtgcagaatcgtgaggaggctgtggctttactgagcaatgatgaatgcaagaggatagtgttgctcgtagctcgcccagagatccagctcgacgaggggtggttggaggacgagaggaatgaatttctcgaggaactgaatctggagatgttggaggaggaacataacgaagcgatgcagcccacagccaacgaggttgagcagccgaagaaacaggaggaagaggagggcacaaccgacaccgctactagtagcagcaataatcatgaaaaggactccggtgtggggaggactgacgaatccttacgaaacgatgagagctcagaacaggagaacgctgccgaggaccccaattccacctcacttaagtcaaaacgtgatctgggacagagtcaggataccttagggtctgttgaacttcagtacaacgaatcactggtgagcggcgaatacattgattcggattgcatcggaaatccagacgaggattgtgagagattcaggcagctgctggaattaaagtgtaaaattcgtaatcacggcgagtatgacctgtactacagttcctccactatcgagtgcaaccagggagaacaggagggggtcgaacatgaactccaactactgaacgaggaactgcggaacattgagttggaatgtcagaacattatgcaagcgcatagactgcagaaagttactgatcaatatggcgatatctggactctgcatgatggcgggttcaggaactacaatactagtatagatatgcagagggggaagcttgatgacatcatggagcacccagagaagtctgacaaagactccagctctgcctacaacacagccgaatcctgtcgttctacccccctgactgtggatcgatccccagactcgtccctcccaagggtgataaatttaactaataaaaagaatctcaggtctactatggcagctactcaatcatccagtggccaatcctcaaaggagtccaccagtacaaaggcgaagaccacagagcaggggtgttccgccgagtccaaggagaaagtgttggaggggtctaagctccccgatcaggaaaaggcagtgtccgagcacattccttacctcagtccatatcacagctcaagctacagatacgcaaatattcccgcccatgctagacattatcagtcctacatgcagctcattcagcagaagtcagccgttgagtacgcccagagccagctctctctcgtgtccatgtgcaaagagtctcaaaaatgctctgagcccaagatggagtggaaagtgaagatcaggtccgacggaacgaggtatattaccaaacgtccagtgcgggatagaattctgaaggagagagcgcttaaaatcaaagaagagcgatccggaatgaccaccgacgacgatacaatgagcgagatgaagatgggcaggtactggtccaaagaggagcggaaacagcatctggtgagggctaaagaacagcggcgccgaagagaattcatgatgaggtcaaggttagagtgtcttaaagaatctcctcagagcgggagcgaaggaaagaaggaaattaacatcatcgagctgtcccataagaagatgatgaaaaaaaggaataagaagattttagataactggatgacaatccaggaactgatgacgcatggagctaagtcgccagatgggaccagagttcataatgcgtttctgtccgtaactaccgtctag

SEQ ID NO: 128045 - DNA, 2337 bp, synthetic construct
  misc_feature 1..2337: note = Description of Artificial Sequence: Synthetic coding sequence
  source 1..2337: mol_type = other DNA
atggggtgtaatttatgtacattccagaagcgggaggagcactacaagctgttatacgaggtgtctcaggttaatggaaaggacctgagcaaggctacacatgaagaagctgtggaggcattccgtaacgcaaaggaacctattgtggtgcaggttctgcgtagaactcctttgagccggccagcttacggcatggcgtctgaggtccagcttatgaatgcttccacacaaacggatattactttcgagcatattatggcactagcgaaactgcgcccacccacgcccccggtgccggatatttgcccctttcttctctccgactcctgtcactcactccacccaatggagcatgagttttacgaggataatgagtacataagcagcctacctgctgatgcagataggactgaggactttgagtacgaggaggtggagctttgcagggtctcttctcaggagaagctgggactcacagtgtgctacaggaccgacgatgaagaggacactggaatctacgtgtctgaggtagatcctaacagtatcgcggccaaggatggacgcataagggagggtgaccggatccttcagattaatggcgaggatgtccagaatcgggaggaggcggttgcattgctctctaacgatgagtgtaaaaggatcgtgctcctcgtagcaaggcccgaaatccagttagatgagggatggcttgaagatgagcgaaacgagtttctcgaggaacttaacctggagatgctcgaagaagagcacaatgaggccatgcagcccaccgccaacgaggtcgaacagcctaagaagcaggaggaagaagagggtactacagataccgctacctcctctagtaacaaccatgaaaaggattccggtgtaggtagaacagatgagtctcttcggaacgatgagtcatcggagcaggagaacgcagctgaagatccaaattctaccagcctaaagtctaagcgtgatctgggacagtcccaagatacactgggttcagtcgaactgcagtataatgagtctttagtttcaggcgagtatatcgatagtgattgcatcggaaatcctgacgaggattgcgagaggtttcgacagctgctggaactgaaatgcaaaatccgcaaccatggggaatatgacttgtactattcttccagcacgattgaatgtaatcagggcgaacaggagggcgttgaacatgaactgcagctgttgaatgaggaactcagaaatatcgagttggagtgtcagaacatcatgcaggcacaccggctgcagaaagtgactgaccagtacggagatatatggacactccatgatggcggcttccgcaattacaatacttccatcgacatgcagcgtggtaagcttgatgatatcatggaacatccggaaaagtctgataaggacagctccagtgcttacaatactgctgaaagctgccggagtacgccgctcactgtggaccggagtcctgattcttcgctgccacgcgtgattaacttgacgaacaagaaaaatcttaggtccaccatggccgctacacaaagctccagtggccagagttctaaggagtcaactagcactaaagcaaagacaacagaacaagggtgcagcgccgagagcaaagagaaagtgttggaaggttccaaactccctgaccaggagaaagcagttagcgagcatattccatacctgagcccctaccatagcagttcctaccgctacgcaaacattcctgcccacgctagacattatcagagctatatgcagctgatccagcagaaaagcgcagtggagtatgcccaaagccagctgtctctggtgagtatgtgcaaggaatcccagaaatgctctgaacctaaaatggagtggaaagtcaaaatccgcagtgatggaacacgctatattacaaagcgacccgtgagggacagaattcttaaggagagagcactgaaaatcaaagaagaacgatccggcatgaccaccgacgacgacaccatgagcgaaatgaagatgggaaggtattggagcaaggaggagagaaaacagcatcttgtgcgggcgaaagaacagaggcgacgcagagagtttatgatgagaagccggcttgagtgtctgaaagagagcccccaaagcggatccgagggcaaaaaggagatcaacatcatcgagctgtcgcacaagaaaatgatgaagaaacgaaacaaaaagattctggataattggatgacaattcaggagttgatgactcatggtgcaaagtctcccgacggtacccgtgtccacaacgccttcctgagtgtgaccactgtgtag

SEQ ID NO: 128046 - DNA, 1158 bp, synthetic construct
  misc_feature 1..1158: note = Description of Artificial Sequence: Synthetic coding sequence
  source 1..1158: mol_type = other DNA
atgaagctcgtgagaaagaacatcgaaaaggacaacgccggacaggttacgctcgtacccgaggagccagaggacatgtggcacacatacaatctcgtccaggttggcgatagcctcagggccagcacaattagaaaggtgcaaacagaatcatctactgggagtgtggggtccaatcgcgtgcggacgacactgacattgtgcgtggaggcaatcgacttcgactctcaggcctgccagcttcgcgtaaaaggcactaatattcaggagaacgagtacgttaagatgggcgcctaccatacaatagagctcgagccgaacagacagtttaccctggccaagaagcaatgggactcggtcgtcctggagaggatcgagcaagcctgcgacccagcatggagtgctgacgtcgcagccgtcgttatgcaggagggactcgctcatatatgtttggttaccccctcaatgacattgacacgggcaaaagtggaagtgaatatcccacggaagagaaagggcaactgctcccagcacgatcgcgctctggagaggttctatgagcaggtggtccaagccatacagaggcacatacactttgacgtggttaaatgtattctcgtcgcgtcaccaggtttcgtcagagagcaattttgcgattacctgttccagcaggccgtaaagactgacaataagctgttactggaaaacagatctaaattcctgcaggtccacgctagttccggccacaaatacagcttgaaggaggccttatgcgatcctaccgtggcctctaggttaagtgatactaaggccgctggcgaggtgaaggcgctcgatgatttctacaaaatgcttcagcacgagccagaccgcgctttctacggattgaagcaagtcgagaaagctaacgaagcgatggcaattgatacactgctcatctccgacgagttgtttaggcaccaggatgtcgcaactcgttcccgatacgtgcgtctcgtagacagcgttaaggagaacgctggcactgtaagaatatttagtagtttacacgtctctggagaacagctgagtcagctaactggggtcgccgctatcttacgcttcccagtcccagaacttagcgatcaggagggggactcctcttcagaagaagactag

SEQ ID NO: 128047 - DNA, 855 bp, synthetic construct
  misc_feature 1..855: note = Description of Artificial Sequence: Synthetic coding sequence
  source 1..855: mol_type = other DNA
atggcttcttatccatacagacaaggctgcccaggtgcagctggtcaggcccccggggccccccccggtagctactaccccgggccacccaactctggaggtcaatatgggagtgggctgccgccgggcggaggatatggggggcctgccccaggtgggccttacggtccaccggccggcggtggaccatatggacacccaaaccctggtatgtttccttcgggaacgcccggagggccatatggcggagctgcacctggcggcccgtatggacagcctcctccatcatcgtatggagcccaacagcctggactgtacggtcagggaggcgccccccccaatgtcgatcccgaagcatactcttggtttcaatccgtggatagcgaccattccggatacatctcaatgaaagagctaaaacaagctctggtgaattgtaattggagctctttcaatgatgagacttgtctgatgatgatcaacatgtttgacaaaaccaagagcgggcggatcgatgtttatgggttttctgcattatggaagttcatacaacagtggaaaaacctgtttcagcagtacgatcgagaccgaagcggctcgatcagttatactgaactacagcaagccctgtcccaaatgggatacaacttgagccctcagttcacccagttgctcgtctctcgatattgccctcgctcggccaacccagccatgcagctggacagattcatacaggtctgcactcagctgcaagtactgactgaagctttccgggaaaaagacaccgccgttcaggggaatatccgactgtcattcgaagattttgttaccatgactgcgtcccgcatgctgtag

SEQ ID NO: 128048 - DNA, 423 bp, synthetic construct
  misc_feature 1..423: note = Description of Artificial Sequence: Synthetic coding sequence
  source 1..423: mol_type = other DNA
atggcctcttatccctacagacagggctgccctggagctgctggccaggcgcccggagccccaccgggaagttactacccaggtcctccaaactcaggaggacagtacggttctggtctgccacccggcggggggtacggaggccctgccccaggcggaccctacggccctcctgcaggcggcggaccctatggccaccccaatccagggatgtttcctagcggaacccctggcggaccatatggcggagccgcacctggtggtccctacggacaaccaccaccctctagctatggcgcccagcagcctggactttacgggcagggcatacatgcggaaggagccgctcccgtttgggacatgttgtccctgtggcagagagaaggggccggcgagctggccagaatgcacaacgcctcatag

SEQ ID NO: 128049 - DNA, 1146 bp, synthetic construct
  misc_feature 1..1146: note = Description of Artificial Sequence: Synthetic coding sequence
  source 1..1146: mol_type = other DNA
atgcacctcctcgccatcctgttctgcgcgctgtggtcagccgtcctcgccgagaactctgatgactacgacttgatgtatgtgaacctcgataatgagattgacaacggcctccaccctacagaggatcccaccccctgcgcctgcggccaggagcattctgagtgggataagctattcattatgttggagaactcgcagatgcgggaacgaatgttgctgcaggcaacagacgacgtactccggggggagttgcaacgactgcgcgaagaactaggccggcttgccgagagcctagcccggccatgcgcaccgggcgcacctgccgaagcaaggttgacgtcagccctcgatgagctgctgcaggctacgagggatgctggcaggaggctggcccgaatggaaggggccgaggcccagaggccagaggaagcaggcagggcattggccgccgttctcgaagaactgaggcagacaagagctgacctgcacgccgtacagggctgggcagcccggagctggctgcccgccggctgcgaaaccgcaatcctcttccccatgagatctaagaagatctttggaagcgtacatccagtgaggccaatgagattggagtccttctcagcttgtatatgggtgaaggcgacagacgtgttaaataaaacaattttattcagctatggaacgaaaagaaatccctacgaaattcagctgtacctgtcataccagagcatagtcttcgtcgtgggaggagaagagaataagcttgtggctgaggcgatggtctctttaggcagatggacgcatctatgcggcacatggaacagtgaagaggggctaaccagtctgtgggtgaacggtgagctagccgccacgaccgtcgagatggccactgggcacattgttcctgagggtggaatcctgcagatcggtcaagagaagaacggttgttgcgtcggcgggggttttgacgagaccctggcctttagtggacggctgactggctttaatatttgggattctgtgctgtccaatgaggaaattagggagaccggcggtgcggaatcctgccacatccggggaaatatcgtaggatggggcgtgaccgagattcagcctcacggtggggcacagtacgtcagctag

SEQ ID NO: 128050 - DNA, 1422 bp, synthetic construct
  misc_feature 1..1422: note = Description of Artificial Sequence: Synthetic coding sequence
  source 1..1422: mol_type = other DNA
atggggtcagggaattgggaagtgacggggccgccttgcggctctcgttgtgagcggccaccaggcctcccgcggggcgtccacggccagttcagatctgccgtgggtctgagcgggctgcgctggtttcgaaggtttcaagaggttacctggacacatttgcaaaatatcgccagcaactataacgttagctataacgtggacgtgaggttcagaagtcttgccgaggagtcacaagctgtggcccaggccgtaaatcgctcacaggccagcgtgcagggtgaactcgcccagttaaaagcctgggtccggaagttacagaggcgcggccgcaaagtcgatacgagacttagagctttggacctgaccctcggcgagaggtcacagcaacgagccagggaacgaaaggcacacaaagctcagagagatgcactgcaagatagcctggctagactcgaaggactggtgcatagccagggcgcccggctggccgccctagagggcaggctgccagtggcgcaccccgggacagccgctctgggtcccgccttggtgcctacgcccacacaacctgaggagcttggtccaacttcgctgaagttgcagagggatcggcaggagctgcgtgcggcctccgagcacagaggaccgccacaagactccagtgcaccccttcaaggccgacgggagccccctgcgagcggatcccaccgtgtcctctccgggaccgcccctaaggatcctcgccagcaggcgtggtcgcctcaagtgcccggcgaaatctgcggcgtgggaccgactctggtgttccctaatgcaagtacacgcaacgtggtgtttctgagtcctggattcgttacagcattgagggctctcagtttctgctcgtgggtccgcaccgccagcggtcggctgggcacactcctctcttacgccacagaggacaacgacaataagctcgtgctccacggcagggacagcttgcttccaggtagcatccattttgtcatcggcgaccctgctttccgcgaactgcctttgcagctgctcttagatgggcaatggcaccacatctgtgtcatctggacatcaacacaagggagatattggctccacgtcgaccgccgcctggtggcgacggggtcacgttttagagaggggtacgagatcccccccgggggctctttggtactcgggcaggagcaagattccgtggggggaggctttgactctagtgaagcattcgtaggcagcatgtctggcctggccatttgggatcgagccctcgtcccaggtgaggtggccaatttagccattggcaaggagttccctacaggagcgatcctgacactagccaacgctgccctggccgggggctttgtccagggggctaactgtacctgtctcgaacgctgcccatag

SEQ ID NO: 128051 - DNA, 1437 bp, synthetic construct
  misc_feature 1..1437: note = Description of Artificial Sequence: Synthetic coding sequence
  source 1..1437: mol_type = other DNA
atgggctgttcatggaggaaaacgcttagtttcttcttggtgttcgttccaatttacctgcacggcgcctctagtcaggaggcggccccagtcggaccccggaaaccgttctttgagaggctgaggaggttagaggagcagtttcggcgtttccaggaagtgacttggacacacctgcagaatattgccagtaattataacgtttcttataacgtcgatgtgcggttccgctccttggcagaagagagtcaagcagtcgcccaagccgtgaacaggagccaggcctcagttcaaggtgaactggcacagcttaaggcctgggtacgcaaactccagagacggggaagaaaggtcgatacacgtctacgagctttagacctgacgctgggggagcggagccagcagagagcaagggagaggaaggcccacaaagctcagcgcgatgccctgcaggactccctcgctaggttggaggggctcgtgcactcccaaggagcgagactggccgcgctggaaggacgactccctgtggcacacccagggactgccgccctgggtccagccttggtaccaacacctacacagcctgaggagttgggcccaacttcactaaaattgcaaagggaccggcaggaactgcgagctgccagcgagcaccgcgggccgccacaggattcttctgcaccactgcaggggagaagggagccacctgcatccggctctcatcgcgtgctctccggcaccgcaccaaaggatccgcgccagcaggcttggtctccacaggtgccaggagagatctgcggtgtgggaccgactctggtcttccccaacgcatcaactaggaacgtggtgtttctgagccctgggttcgtgaccgctctgagggccctgtccttctgttcatgggtgcgcaccgcctccggtcgcttaggaaccttactgagttacgcaacagaggacaatgataataagctagtgctgcacgggagggattcgcttctgccgggtagcattcattttgtcattggggatcccgcgttccgcgagttgcccctgcagctgttgctcgatggccagtggcatcatatttgtgttatctggacctcaacacaggggagatactggctgcacgtcgaccgacgcctcgtggcaactgggagtcggtttagagaaggatatgagataccgcctggaggtagtctcgtattaggccaggagcaggattctgtcggcggcggctttgactccagcgaggcctttgtgggctctatgagtggtctggcaatttgggatcgagctctggtacctggagaggttgccaacttagccatcgggaaagagtttccgactggtgccatcctgacccttgccaatgcggcccttgctggagggtttgtgcaaggcgcgaattgtacttgtctggaacgctgcccttag

SEQ ID NO: 128052 - DNA, 1167 bp, synthetic construct
  misc_feature 1..1167: note = Description of Artificial Sequence: Synthetic coding sequence
  source 1..1167: mol_type = other DNA
atgaaatggctactgctgcttgggctcgtcgcgctgtcagaatgtataatgtacaaagttccactgattcgaaagaagtccttacgcagaacactatctgaacgcgggcttcttaaagactttctcaagaagcacaacctaaatccagcccggaagtatttcccacagtggaaagcgcccactctcgtcgacgagcagcccttagaaaattatctcgacatggagtactttggaaccataggaattgggacaccagcgcaggatttcaccgtggtctttgacacaggcagctccaatttatgggtgccttcggtctactgctccagcctggcgtgtactaatcataaccgattcaacccagaagattctagcacataccagtcgactagtgagaccgtgagtatcacttacggcaccggttcaatgacaggaattctgggctatgataccgtgcaggtgggcggtattagtgacacgaatcagatcttcggtctgagtgagacagagccaggttcctttctgtactatgcccccttcgacggaatcctaggcttggcctacccctcaataagttctagtggtgccaccccggtgttcgataatatctggaaccagggcttagtaagtcaggacctgttcagcgtttacttgagtgcagatgaccaaagcgggtcagtggtgatcttcgggggtatagatagttcctactacactgggagccttaattgggtgcccgtgactgtagagggctattggcagattaccgtcgattccatcaccatgaatggggaagctatagcctgcgctgaggggtgccaggcaatcgtcgacaccgggacctccctattaacaggccccacgagcccaatcgccaatatccaaagcgatattggagccagcgagaatagcgacggcgatatggtggtgagctgcagcgccatctctagcctgcccgacatcgtcttcactatcaacggagtgcaataccctgtgcccccctccgcgtatattctacaatctgagggatcctgcatctctgggtttcaggggatgaacctcccaactgagtccggcgaactgtggatactcggggatgtgttcatcagacagtactttacagtgtttgacagggcaaacaaccaggtcggccttgcacccgttgcctag

SEQ ID NO: 128053 - DNA, 849 bp, synthetic construct
  misc_feature 1..849: note = Description of Artificial Sequence: Synthetic coding sequence
  source 1..849: mol_type = other DNA
atgaagtggctgttgctgctgggcctggtggccttgtcagaatgtataatgtacaaagtccctttgatcaggaagaagagtctccgtaggacgttaagtgaaaggggattgcttaaagatttcttaaagaagcacaatctgaatcctgcccgtaagtattttccccagtggaaagctcccaccctcgtggatgagcagcctttggaaaattatctcgacatggaatatttcggaaccatcggcatcggtacacctgcccaagacttcactgtagtcttcgatacaggctcaagtaacctgtgggtgcccagtgtctactgttccagtctggcctgcacaaatcataacagatttaaccctgaagactcatccacttaccagagcacttccgaaaccgtgtcaatcacttacgggactgggagtatgactggaattcttggttatgatacagttcaaactgtcgcaatttggagatccgccgctatggggttggtaagtcaggacctgttctcggtttatctcagcgccgatgaccagtcgggttcagtcgttattttcggaggcatcgattctagctactacacaggttctttgaactgggtgcctgtaacagttgaggggtactggcaaattaccgtggattctataactatgaacggcgaggcaatagcttgcgcagagggttgtcaggctattgttgatactggaacaagcctcctgacagggccaaccagccctattgcgaatattcagagcgacatcggtgcgtcggagaacagcgacggggatatggtcgtgagttgctccgccatctccagtctcccagacatcgtcttcacgataaactag

SEQ ID NO: 128054 - DNA, 750 bp, synthetic construct
  misc_feature 1..750: note = Description of Artificial Sequence: Synthetic coding sequence
  source 1..750: mol_type = other DNA
atgacgggtattttaggatatgacacggtgcaggtgggtggcatctctgataccaaccagatctttgggctgtcggaaaccgaaccaggcagtttcttgtactacgctccatttgatggcatcttgggacttgcctaccccagtatttcttcgtcgggggcaactcctgtgttcgataatatctggaaccagggtctcgtgtcccaggatctgttctccgtgtatttgtctgccgatgatcagagcggttccgtagtcatattcgggggaattgatagctcctattacaccggttctcttaactgggtgcccgttaccgtggagggctattggcagatcacagtggactccattaccatgaatggcgaggcgattgcgtgtgctgagggctgtcaggctatagtcgacacaggcacttctctgctaaccggtcctacgtcaccaatcgccaatattcagtctgacatcggggccagcgaaaatagtgatggtgatatggtcgtatcctgctctgcaatatccagcctgccggatattgtgtttacaattaatggtgtacagtatccggtgccaccatccgcttacatattgcaactgcccagtgaggggagctgtatcagtggctttcagggcatgaatttgcccactgaatcgggcgagctttggattttgggggatgtatttatacggcagtattttaccgtgttcgatagagccaataaccaggtagggctcgcacccgtggcttag

SEQ ID NO: 128055 - DNA, 1167 bp, synthetic construct
  misc_feature 1..1167: note = Description of Artificial Sequence: Synthetic coding sequence
  source 1..1167: mol_type = other DNA
atgaagtggttgctgctgttgggtctcgtggctctttcagaatgcatcatgtacaaggtcccactgatccgcaagaagtccctcagaaggaccctctctgagagaggccttctgaaagattttctgaagaagcacaatctcaaccctgcccgtaagtatttcccacagtgggaggccccaaccctggtggacgagcagccactggaaaactatctggacatggagtattttgggacaatcgggatcggtacccccgcgcaagacttcacagtggtctttgacacgggctctagcaatctatgggtgccttctgtgtattgcagttccctggcctgtaccaatcacaatcgattcaaccctgaggattcttctacgtaccagtctacgtccgagaccgtgagtatcacttatgggacaggatccatgactggcatccttggttacgataccgtgcaggttggaggcattagcgacaccaaccaaattttcgggctctccgagacagaaccaggttcgttcctgtattatgcccccttcgatggtatcctcggattagcatatccatctatttcctcctctggggcaaccccggtgttcgacaacatctggaaccagggactcgtcagtcaggatttgttcagtgtatacttgtcagccgacgaccagagtggatcggtggtcatttttggaggtattgattcatcatattacacaggctcgttaaactgggtacccgtaactgtggaaggctattggcagattacagtcgactctatcaccatgaacggcgaggccattgcttgcgcagaggggtgtcaggccatagtcgataccggaacatccctgctgaccggaccgacaagtcctatcgctaatatacaatctgatattggggcttcagagaacagcgacggggacatggtcgtgtcatgctccgcaatcagcagtcttcccgacattgtgttcactattaacggcgtgcaataccctgtgcctccctcggcttacatcttacagtccgagggttcctgcatttccggattccaggggatgaaccttccaaccgagagtggcgaactatggattctgggggatgttttcatacggcagtactttacagtgttcgaccgcgctaacaaccaggtgggactggccccagtcgcatag

SEQ ID NO: 128056 - DNA, 1167 bp, synthetic construct
  misc_feature 1..1167: note = Description of Artificial Sequence: Synthetic coding sequence
  source 1..1167: mol_type = other DNA
atgaagtggcttctgctgcttggccttgttgctctttctgagtgtattatgtataaggttcctctgatccggaagaagtcgctgcggcggactctgtccgaaagaggcctactgaaagattttctgaagaaacacaacttaaacccagctagaaagtacttccctcagtgggaagctcccacactcgtggatgaacagccactcgagaattacctggacatggaatatttcggcaccattggcattggaacccctgcccaagattttacggtggtatttgatacaggcagttcgaacctttgggtgcctagcgtgtactgctcatcccttgcgtgtactaaccataataggttcaaccctgaggattctagtacttaccagtcaacatctgaaaccgtctccataacttatggaaccggatcgatgacaggaatccttggttacgacacagtgcaggtgggaggaatcagcgatactaatcagatcttcggcctgtctgagaccgaacctggctccttcctgtattacgcaccctttgatggtatactggggttagcctaccctagcatctcaagctcaggagctaccccagtcttcgacaatatctggaaccagggtttggtcagtcaggatctttttagtgtctatttaagcgctgatgacaagagcggatccgtggtgatttttggcggaattgattcttcctactatacaggatccttaaattgggtgcccgttaccgtggaagggtactggcagatcacagttgattctatcactatgaacggcgagaccattgcctgtgcagagggttgtcaggctattgtagacacgggaacttcattattgacaggacctacaagtcctattgcaaacatccagagtgacatcggagcatcagagaacagtgatggagatatggtcgtctcctgctctgccatttcatcattgcccgatattgtgttcactattaacggggtacagtacccggtcccaccctcagcatatattctacagagtgagggctcgtgtatcagtggcttccagggcatgaatgtacccactgaatcaggcgagttatggatactaggggacgtgtttattcgacagtatttcacagtttttgatcgtgctaacaaccaggtggggctcgcacctgtggcttag

SEQ ID NO: 128057 - DNA, 849 bp, synthetic construct
  misc_feature 1..849: note = Description of Artificial Sequence: Synthetic coding sequence
  source 1..849: mol_type = other DNA
atgaaatggctgctgttgcttggattagtggctttgtccgagtgcataatgtataaagtgcctctcataaggaagaagtccctgagacggaccttgtctgagcggggattgctaaaggattttcttaaaaagcataatctaaatccggccaggaagtactttccccagtgggaggcccctacacttgtggatgaacagcctctggagaactacctcgatatggaatacttcggaaccattggaatcggaacccctgctcaggatttcactgtggtgtttgatacaggatcctccaacctgtgggtaccgtctgtgtactgcagctctctggcatgtacgaatcacaaccgttttaacccggaggactcaagtacatatcagtctacctcggagacagtgtcgatcacatacggaacaggcagcatgacaggaattctaggctacgacaccgtgcagacagtggccatctggaggagtgctgcaatgggtctggtctctcaagatcttttctcagtctacctcagtgcagacgatcagtctggtagcgtggtaatcttcggcgggattgacagcagctactacactggctcacttaactgggtgcccgtgaccgtggagggttattggcaaatcactgtcgactccatcactatgaacggggaggctatcgcttgtgcagaagggtgccaggcaattgttgacactgggacgagcctccttacaggaccgactagccccatcgcgaatatacaatccgacattggcgcttcggaaaattccgacggagacatggtggtgtcttgtagcgcaatcagtagcctgcctgacattgtatttactattaactag

SEQ ID NO: 128058 - DNA, 750 bp, synthetic construct
  misc_feature 1..750: note = Description of Artificial Sequence: Synthetic coding sequence
  source 1..750: mol_type = other DNA
atgacaggcatattgggctacgatactgttcaggttgggggcatcagcgatactaaccagattttcggattgtcggaaactgaaccagggagctttctttattatgcgccgttcgacggtatcctaggccttgcctacccctcgatttccagttccggcgcgacgcccgtgttcgacaacatttggaaccagggcctggtgtctcaagatttgtttagtgtctatttgagcgcggacgaccaaagtgggtccgtggtgatcttcggcgggattgattcatcgtattacaccggaagcttgaattgggtgcccgttaccgttgagggatattggcaaatcacagtcgattctatcaccatgaatggggaggcaattgcctgcgccgagggttgtcaggcaattgtcgatactgggacaagcctgttgactggtcctacaagtccaatcgcgaatatccagtccgatattggcgcctccgagaacagtgatggagatatggtggttagttgttccgctatttcaagtctgccagatattgtgtttaccatcaacggagtccagtatcctgtccccccttccgcctacattctccagctgccctctgaggggagttgtattagcgggttccagggaatgaatctgccgacagagagtggcgaactgtggatcctgggagatgtcttcattcgacaatacttcaccgtattcgatcgggccaataatcaagtgggcctagctcccgtggcttag

SEQ ID NO: 128059 - DNA, 1167 bp, synthetic construct
  misc_feature 1..1167: note = Description of Artificial Sequence: Synthetic coding sequence
  source 1..1167: mol_type = other DNA
atgaagtggctgctgctgctgggcctggtcgctctaagcgaatgcatcatgtacaaggtacccttaattcggaaaaaaagcctccgaaggacgctgtctgaacgtggtctgctgaaggacttcctgaaaaagcataacctcaatccagccaggaagtattttccgcaatgggaggcaccgacgctcgtggacgagcagcctcttgaaaactatctcgatatggaatactttggcacaataggtatcgggacacctgcgcaggactttacggtcgtgtttgacactggttcgtctaacttgtgggtcccatctgtctactgtagttccctggcatgcacgaaccataaccgcttcaacccagaagactcatcaacatatcagtcgacctccgaaaccgtcagtatcacttatgggacgggtagcatgactggaatactggggtatgacacggtccaagtaggcggaatctctgatacaaaccagattttcggtctgtccgaaacagaaccggggagctttctgtactatgcaccttttgacggcattttaggcctcgcttacccctcaatcagttcttcaggcgctacgccggtgttcgacaatatctggaaccaggggctagtctctcaggatctctttagcgtgtatctgtcagccgacgacaagtccggctcagtagtgatcttcggggggattgattctagctactacacaggatcgctaaactgggtgcctgtgacagtggagggctactggcaaattaccgtggattccattacaatgaacggcgagaccatcgcttgtgcggaaggctgccaggcgatcgtggacacgggcacaagtctactcacaggccctacatcgcctattgccaatattcagagcgacatcggggctagcgagaactcagatggggatatggtggtatcctgttcggccatcagctcactgccagatatcgtgtttacaatcaacggagtgcagtaccctgtcccgccgtccgcctacattctccaatcagaggggagctgcatctccggcttccagggaatgaacgtgcccaccgaatccggggaactatggatactgggggatgtgttcattcgccagtactttacggtgttcgaccgagccaataaccaggtggggctggctcccgtcgcatag

SEQ ID NO: 128060 - DNA, 849 bp, synthetic construct
  misc_feature 1..849: note = Description of Artificial Sequence: Synthetic coding sequence
  source 1..849: mol_type = other DNA
atgaaatggttactgctgctcgggctggttgcactctcagaatgtattatgtacaaagttcccctgatccgtaaaaaaagcctccggaggacattgagcgaacgaggtctgctcaaagatttcctcaaaaaacataacttgaacccagctaggaaatacttcccacagtgggaggctccaaccctggtggatgagcagccgctggagaactacctggatatggaatacttcggaaccatcggcatcgggacaccggcacaggattttactgtggtctttgatacaggcagctccaacctctgggtgcccagcgtttattgtagctcccttgcgtgtacaaaccataaccggttcaatccagaagactcctccacttaccagtctacctcagaaacggtgagcatcacttatggaactggcagcatgacagggatcttagggtatgacaccgtgcaaacagtcgctatatggcggtctgcagcaatgggtctcgtctcccaagaccttttcagcgtgtacctgtccgccgatgacaaatcaggctctgtggtaattttcggaggtatcgactcatcctactacacagggagtttgaattgggtaccagtgaccgttgagggatactggcagatcacagtggattccatcacaatgaacggtgagactattgcctgtgcagagggatgtcaagcaatcgttgacaccgggacctccctgctgaccgggcctacaagccccattgccaacatccagtcagatataggagctagcgagaacagcgacggggacatggtggttagttgttctgctataagctccctgcctgacatcgtgttcacaattaactag

SEQ ID NO: 128061 - DNA, 750 bp, synthetic construct
  misc_feature 1..750: note = Description of Artificial Sequence: Synthetic coding sequence
  source 1..750: mol_type = other DNA
atgactggtatcctcgggtacgacacagttcaggtgggaggaatctccgatacaaaccagattttcgggctcagcgagaccgagcccgggagtttcctgtactatgctccatttgatggtatcttgggactcgcctacccaagcataagttctagcggtgcaacacccgtgttcgataatatatggaaccagggcttggtgagtcaggacttgttcagcgtgtatttgagtgccgatgataaatctggatcggttgtgatctttgggggcattgactcaagctactataccggatccttgaactgggtgcccgtgacagtagaggggtattggcagatcaccgttgatagtatcaccatgaatggagagaccatcgcctgcgccgaaggctgtcaagcaatcgtcgacacaggcacatctttactgactggccctacgagccccatagctaacatccagtctgatattggtgcttcagagaatagcgacggcgacatggttgtctcttgctcggccatcagctcacttccagatattgtgtttactatcaatggggtgcagtatcccgttcctccaagcgcgtacatccttcaactgcctagcgagggcagctgcatttctggttttcagggcatgaacgtgccgactgagtctggcgagctatggattctgggagatgtattcatccgccagtacttcaccgtgtttgacagggcaaacaatcaagtgggtctagcgcccgtagcatag

SEQ ID NO: 128062 - DNA, 1578 bp, synthetic construct
  misc_feature 1..1578: note = Description of Artificial Sequence: Synthetic coding sequence
  source 1..1578: mol_type = other DNA
atggccgcagtcgtgttggccgccactagattactgcgaggcagtgggtcctggggttgttcgcgcctaagattcgggccacctgcctatcgcagatttagcagcggcggagcctacccaaacataccactcagctcccctctcccaggggttccaaaacccgtgtttgccaccgtagatggacaggagaagttcgaaacaaaggtcacaactcttgataacggtctgagggtggcatcacagaataagttcggtcagttttgtaccgtggggatcctgatcaacagtggctctagatacgaagccaagtacctatccggaattgcacactttcttgaaaagttggccttcagttctactgcaaggttcgactcaaaagacgaaatcttgttgaccctcgagaaacatgggggcatctgcgattgccagacctcccgtgataccactatgtacgcggtttctgcagactcaaaagggttagacaccgtcgtagctttgctcgccgacgtagtccttcaaccccgcctgaccgacgaggaggtggagatgacgcgcatggcagtccagttcgaactcgaggatctaaatttacggccagatcctgaaccgctgcttaccgagatgatccatgaggccgcatacagggaaaataccgtcggcctgcacagattttgccctaccgagaatgtagccaaaatcaatagagaggtgctccactcttatctcagaaactattatacaccagaccgtatggtcctggccggagttggtgtcgaacatgagcacctggtggattgtgcacgtaaatatctgctgggagtgcagcccgcctgggggagtgccgaagctgtcgatatcgacaggtccgtcgcgcagtataccggtgggattgctaagctagaaagagatatgagcaacgtttccctggggcccactcctatcccagagcttacacatattatggtgggtttagagagttgtagcttccttgaggaggacttcattccttttgcagtgttgaacatgatgatggggggaggcggtagtttctccgcaggtggaccaggaaagggcatgtttagccgcctgtacctgaatgtcctgaatcgtcaccactggatgtataatgccacatcctaccaccattcttatgaagataccgggctgctgtgcattcacgcaagcgccgatccgaggcaggtgcgtgagatggttgaaatcattaccaaggagtttatcctcatgggtgggacagtggataccgtcgaacttgagcgggctaagacacagctgactagtatgcttatgatgaatctggaatccaggccggtgattttcgaagatgttggccgacaggttctggctacaagatctcggaagttgccgcacgaattgtgtaccctgatccgaaatgtcaagcccgaagatgtgaagcgggtagcttccaaaatgctccgtgggaaaccagccgtagccgcactgggcgatctgacagatctccctacatacgaacatatccagaccgccctgtcctccaaagacggtcggcttccccggacatatcggttattccggtag

SEQ ID NO: 128063 - DNA, 441 bp, synthetic construct
  misc_feature 1..441: note = Description of Artificial Sequence: Synthetic coding sequence
  source 1..441: mol_type = other DNA
atggcagccgtggtgctcgcagccactaggttgttgaggggaagcggatcctggggttgctcacgtctgcggttcgggccccccgcttacaggcgattttcctctggaggagcctacccgaacattcctttgtctagtcccctccccggcgtgccgaagcctgtgtttgccaccgtggacggccaggaaaagttcgaaacaaaggtcaccaccctcgacaatggcctgcgggtggcttcacagaacaaattcggccagttttgtactgtcggcattctgatcaattctggtagccggtacgaggcgaagtacttgtctggcattgcacactttctggagaaactggcctttagctcaacagctcgctttgacagcaaagacgaaatcctcttgacgctggagaagcacggcgggatctgtgattgtcagacttcaagatag

SEQ ID NO: 128064 - DNA, 1185 bp, synthetic construct
  misc_feature 1..1185: note = Description of Artificial Sequence: Synthetic coding sequence
  source 1..1185: mol_type = other DNA
atgaagcgcaacactttggtggaactgttgacattctggaaaaattggcacttcagactgttgttggatttgacagccaagatgaaattttgcctcaggtggaagagcatgggcgtcagtgtgaccgccaggcatcaggatgaagaagtcgagatgacccggatggcagtccagtttgaactggaagacctgaacctacgtcccgatccagagccattgttgactgagatgattcacgaagccgcatatcgtgagaatacggtgggactgcataggttttgccctacggaaaatgttgccaaaattaacagagaggtgctgcacagttatctccgcaactactacacaccagatcgcatggttctggccggcgttggagttgagcatgagcacctggtcgactgcgctcgtaaatatctgcttggtgtccagcccgcctgggggagtgccgaggctgtggatatagatcggtcagtcgcccagtacacggggggcattgccaagctcgagagggatatgtctaacgtgtccttgggcccgaccccaatcccagagctcacccatattatggtgggtctggagtcctgttctttcttagaggaagacttcatccctttcgccgttctgaatatgatgatggggggtggggggtcattttccgccggcggccccggcaaaggcatgttttcacgtctctatctgaatgttcttaatagacatcattggatgtataacgctacatcctatcatcattcctacgaggacaccggactgctctgcatccacgcctccgccgatccccggcaggttagggagatggtggagattatcacgaaggagttcatcctcatgggcggcactgttgatacggtagaacttgagcgggcaaagacgcaattgacatccatgctcatgatgaatctggagagccggcccgtcattttcgaggacgttggacgtcaggtgctggcgaccaggtcccgtaagctgccacatgaactttgcactctcatccggaatgtgaagccagaggacgtaaagagggtggcttccaagatgctgaggggcaagcctgcagtcgcggcactgggggacttgacggatctcccgacctatgaacacatacagaccgcattgtcttctaaggatggacgtctgcctaggacctacaggctgtttagatag

SEQ ID NO: 128065 - DNA, 816 bp, synthetic construct
  misc_feature 1..816: note = Description of Artificial Sequence: Synthetic coding sequence
  source 1..816: mol_type = other DNA
tacaccgggggcattgccaagctggagcgtgacatgtccaatgtgtcccttgggccgacaccaataccagaacttacccatatcatggtcggcttggagagctgttcctttttagaggaggatttcataccattcgcagtgctgaatatgatgatgggcggcggtggcagtttctcagcaggaggccctggaaagggcatgttttctaggctgtacttaaacgtattgaatagacatcactggatgtacaacgcaacctcctaccaccattcgtatgaggataccgggcttctatgcatccatgcaagcgctgatccaaggcaggttagggaaatggtggaaattattacaaaagaattcatactgatgggggggaccgttgataccgtggaactcgagcgtgcaaaaacacagctgacgagtatgttgatgatgaacctcgagtctagacctgtgatttttgaggacgtcgggaggcaggtactggcaacccggagccgcaagctgccccacgagctatgcacactcatccgcgagtatcggaggggcagcgagggcctgcctcaagcttcggcacgactccgtggtggccggttagctctcccacaagcagtggtcggcctgtggtatgttcatcatacccaaaatctcggaccttctcccgtcgtactcagcagggggggacagggacagggccgcggcgtggctgacctggtgtccctacccgggccaacaatgcatctgcttccaccttggcaggtcaccccaccgtctgcccctctcggtggtgccgtgaccactgctcagtcttgttag

SEQ ID NO: 128066 - DNA, 1482 bp, synthetic construct
  misc_feature 1..1482: note = Description of Artificial Sequence: Synthetic coding sequence
  source 1..1482: mol_type = other DNA
atggccgctgcaactggcccgagcttttggctgggcaatgagacgcttaaggtacccctcgcactcttcgctctcaacaggcagcgcttatgtgagaggctgcgaaaaaaccctgctgttcaggcagggagcatagtagtccttcagggcggagaggagactcagcgatattgtactgatacgggcgtgcttttccgccaagagagcttctttcattgggcctttggtgtaacagagcctgggtgctatggcgttattgatgtggatactgggaagtccactctgttcgttccgaggcttcctgcatctcacgccacatggatgggcaagattcacagtaaggagcatttcaaagagaagtacgctgttgacgatgtgcagtacgttgacgaaatagccagcgtgttaacatctcagaagccctcggttctgcttacgctgcgcggagtgaacacagacagcgggagcgtgtgcagggaggcctctttcgatggtatttcaaagttcgaggtgaataatacaattctccatccagaaatagtagagtgcagggtcttcaagacagacatggagttggaggtcctacgatatactaacaaaatatctagtgaagcgcaccgggaggttatgaaggctgtgaaggtgggcatgaaagagtatgagctcgaaagcctcttcgaacattattgctactctcgaggcggcatgagacactcatcatacacatgcatctgcggctccggggagaatagcgccgtgctacattacggtcacgccggcgccccaaatgaccgcacgatacagaatggcgatatgtgtttgtttgatatgggtggcgagtactactgcttcgccagcgacatcacctgttctttcccagccaacgggaagtttacagccgaccagaaagctgtgtatgaggccgtgttacgctcctcacgcgcagtgatgggcgcaatgaagcccggggtgtggtggcccgacatgcacagacttgctgaccggattcacttagaggagctggcccacatggggattctctccggaagcgtggacgctatggtgcaggcacatctcggggctgtgtttatgccccacggcctgggacacttcctgggcatcgatgtgcatgacgtaggaggttaccctgagggggtggagaggatcgatgaacctggcttgagaagcctgcgaacggctcggcatcttcagccaggcatggttttgacagtcgagccgggcatatattttatcgatcacctcctggacgaagcgcttgctgaccccgccagagcatcatttcttaatcgcgaggtgctgcagagatttaggggcttcggaggtgtgagaatagaagaagacgtcgttgtgacagattccggcattgagttactaacatgtgtgcccagaaccgtcgaggagatcgaagcgtgcatggccggttgtgacaaggcattcactccgttttccggaccaaagtag

SEQ ID NO: 128067 - DNA, 1359 bp, synthetic construct
  misc_feature 1..1359: note = Description of Artificial Sequence: Synthetic coding sequence
  source 1..1359: mol_type = other DNA
atggcagccgcaacaggtccttccttctggctgggcaacgaaaccttgaaagtgccactcgccctcttcgctctaaatagacagagactgtgcgaaaggcttcggaagaacccagctgtccaggcaggttccatcgtggtgctgcagggcggcgaggaaactcagcgctactgcacagatactggcgtactatttcgacaggagagcttcttccattgggcgttcggagtgacagaacccgggtgctacggcgtgatcgacgtagacacaggaaaatccacactcttcgtgccaagattgccagcttcacacgctacatggatgggaaagatccactcgaaggagcactttaaggagaaatacgccgtggacgacgtgcagtatgtagatgagattgcatctgtccttacctcccagaagccatccgtacttcttactctccggggtgtaaacacagactctggatcagtatgtagagaagcaagtttcgacggtattagcaaattcgaggtgaataacacaatactccaccccgagattgtggagtgcctcttcgaacactattgctattctagaggcgggatgaggcactcatcctacacttgtatctgcggctcgggagaaaacagcgcagtgctccattacgggcacgccggagccccgaatgaccgtaccatccagaacggcgacatgtgcctatttgatatgggcggagagtattattgtttcgctagtgacatcacctgtagcttccctgctaacggcaagttcacagccgaccagaaggctgtctacgaggctgtgctgagaagctctagagctgtgatgggtgctatgaagcctggcgtttggtggccagacatgcacaggctagccgacaggattcacctggaagaacttgctcacatgggaattctctctggatctgtcgatgccatggtccaggctcatttgggcgcagtatttatgcctcatggtctggggcatttcctggggatcgacgtgcacgatgtgggcggctatccagagggggtggagcgcattgacgaacccgggctgcgaagcctgagaacggccagacatctgcaaccagggatggtacttactgtggagccgggcatttattttatcgaccatctgttggacgaggcgctcgccgatccagccagagccagctttcttaatcgggaggtgctccaaaggtttcggggatttggaggagttcgcattgaggaagacgtagtcgtcacagacagcggcattgaactgctgacttgcgttccgagaactgtggaggaaatcgaggcatgcatggcaggatgcgataaagcatttacacctttttcaggacccaagtag

SEQ ID NO: 128068 - DNA, 1290 bp, synthetic construct
  misc_feature 1..1290: note = Description of Artificial Sequence: Synthetic coding sequence
  source 1..1290: mol_type = other DNA
atggcagccgccaccgggccatccttttggctcggcaatgagactttgaaggtcccactggcattgtttgccctcaacagacaacgcctatgtgagcggctgagaaagaatccagcggtgcaggcagggtccattgtcgttttgcagggcggtgaagagacgcaaaggtactgcaccgacacaggagtcttgtttcgccagattgctagcgtgctgacatctcagaagccatctgtcctcctgacactgcgaggggtgaacactgactctgggtccgtttgccgtgaagcctctttcgacggaatcagtaagtttgaagtaaacaataccattttgcacccggaaatcgtagaatgccgggtatttaaaactgatatggagcttgaggtactgcggtatactaacaaaattagctccgaagcacacagagaagtgatgaaggccgtgaaagtgggcatgaaggagtacgagctagaaagcctgtttgagcactattgctattctcgcggcggtatgagacactcgagctacacctgcatttgtggttccggggagaactctgccgtcctacattatggccatgctggagcccctaatgacaggaccattcagaatggggatatgtgtttgttcgacatggggggagaatattattgttttgcaagcgacattacgtgttccttccctgccaatggaaaatttaccgccgatcagaaggccgtttacgaggcggttctgcgctcctcgagagcggtcatgggcgccatgaaacctggggtgtggtggcccgacatgcatcgcttggccgatcgaattcacctcgaagagctggcacatatgggcatcctgtctggcagcgtcgatgcgatggtccaggctcatttgggggcagtctttatgccacatggtctgggtcattttctcggtattgacgtccatgacgtgggaggctaccctgagggcgtggaaagaatcgacgagccaggcctccgatctctgagaacagcgcgccacctacagccaggtatggtgctgactgtggagcctggcatctatttcatagaccatctgctggacgaagccctcgctgaccccgcacgagctagttttctcaaccgggaagtgctgcaaagattccgaggatttggtggcgtaaggattgaggaagacgtcgtggtgacagatagtggaattgagctgcttacctgcgtaccccgcacggtcgaggaaattgaggcttgcatggcaggatgtgataaggcttttacgcccttcagcgggcctaagtag

SEQ ID NO: 128069 - DNA, 354 bp, synthetic construct
  misc_feature 1..354: note = Description of Artificial Sequence: Synthetic coding sequence
  source 1..354: mol_type = other DNA
atgcgcgcgagcagtttcctgatcgtggtcgtgttcctgatcgcaggaactctggtgctggaggctgccgtcactggggtacccgtcaaagggcaagatacagtgaagggaagagtgccctttaatgggcaggatcctgtcaagggtcaggtaagcgtgaagggacaggacaaggtgaaagctcaggaaccagtgaaagggcctgtgtcgaccaagcccggttcatgccctatcatactgattagatgcgctatgttgaatcccccaaaccggtgcctgaaagacactgactgccctggcatcaaaaaatgctgtgaaggcagctgcgggatggcctgcttcgttccccagtag

SEQ ID NO: 128070 - DNA, 732 bp, synthetic construct
  misc_feature 1..732: note = Description of Artificial Sequence: Synthetic coding sequence
  source 1..732: mol_type = other DNA
atggccaggctgtggggcgccttaagcctgtggcccctctgggcggctgtgccctggggaggagccgcagccgtgggcgtgcgggcctgttcttccaccgccgccccagacggggtcgagggcccagctctaagaagatcctattggaggcaccttcggcggctggtgctgggccccccagagcctcccttctcccatgtttgtcaggtcggcgatccagttctgcgaggggtcgccgcacctgttgagagagcccagctgggcggccctgagttgcaaaggctgacccagcgactggtgcaggtgatgagaaggcggcgatgtgtggggctctctgccccccagctgggagtcccaagacaggtactggctctggagctccccgaggctctgtgccgcgaatgcccccctaggcaacgtgctctgcgccagatggagcctttccccctgcgggtgtttgtgaacccttcacttagggtactcgacagtcgactcgtgacttttcccgagggctgtgagtcagtggcgggatttctggcttgcgtgccccggtttcaggccgtccaaatcagtggtttggacccgaacggggaacaggtggtgtggcaggcgtctggctgggctgccaggataatccagcatgaaatggatcacctgcaggggtgcttgttcatcgacaagatggatagtcgcacattcacaaatgtttactggatgaaggtcaatgattag

SEQ ID NO: 128071 - DNA, 294 bp, synthetic construct
  misc_feature 1..294: note = Description of Artificial Sequence: Synthetic coding sequence
  source 1..294: mol_type = other DNA
atggtgtttgttagacgaccctggcctgcactgactactgtgctgctcgccttgctggtgtgcctgggagcactcgtggatgcatatcccatcaaacccgaggcccccagggaagacgcttcccctgaagagctaaacagatactacgctagccttcgacattacctgaatctggtaacacggcagcgttatggcaagagggatgggcctgatacccttctgtcaaagactttcttccccgatggcgaagacaggcccgtacggtctcgatcggaggggccggacttatggtag

SEQ ID NO: 128072 - DNA, 1992 bp, synthetic construct
  misc_feature 1..1992: note = Description of Artificial Sequence: Synthetic coding sequence
  source 1..1992: mol_type = other DNA
atggcaccaaaaagagtagtgcagctttctctgaagatgcccactcacgctgtatgcgttgttggcgttgaggcccacgtggatattcactctgatgtcccaaaaggagctaactcgttcagagtgtcgggcagttccggcgtggaggtgttcatggtgtacaacaggacacgcgtgaaggagcccatcggcaaggccaggtggcccctcgataccgacgccgacatggtcgtttcagtgggcacggcatctaaggaactgaaagattttaaagtgcgggtgagttatttcggcgagcaggaggaccaagctctaggacgatccgttctgtacctgactggcgttgatatttcacttgaggtggacacaggcaggactggaaaagtgaaaagatcacaaggggataagaaaacctggcgttggggacctgagggatacggcgccatactgctcgtgaattgcgatagagacaaccacaggagtgcagaaccagatttgactcacagctggctgatgtcgctagccgacctccaggacatgagcccgatgctactcagctgtaatggtccggataagctgtttgactcacacaaactggtgttgaacgttcctttctctgattcaaagagagtgagagtgttttgcgcacgggggggcaacagcctctctgactacaaacaagtgctgggcccacagtgcttatcgtatgaagtagaaagacaaccaggagaacaggaaatcaagttctatgtagaaggcctgaccttccctgatgctgacttcttaggacttgttagcctcagtgtcagcttggttgaccctgggactctgcctgaggtgacgttattcaccgatactgtgggcttccgtatggccccttggatcatgacacccaacacccagcccccagaggagctgtatgtttgccgcgtcatggatacccatggcagcaacgagaaatttctcgaggacatgtcttacctgaccctgaaggctaactgtaaacttacaatatgtccccaggtagagaatcgcaatgaccgttggattcaagacgaaatggagttcgggtacatagaagccccacataagtctttcccagtggtattcgattcccctagaaaccgcggattgaaggactttccctacaaaagaatcctggggccagacttcggctatgtcactagagaaatccctttaccagggccttcgtcactggactccttcggaaacttagatgtgagcccccctgtgacagttggggggacagaataccctctgggcagaattttgatcggatcatcatttccaaaatcaggagggagacagatggcaagggccgtgcgtaattttttgaaggctcagcaggttcaggcgcctgtggagctttattccgactggctctccgtggggcatgtggatgagttcctcacttttgtgcccacatctgatcagaagggttttagactgttgctggcttccccttctgcttgtttaaaactgtttcaagagaaaaaggaagagggttacggggaagcggcccagtttgacggattaaaacaccaggccaagcgtagtatcaacgagatgttagccgaccggcacctgcaacgcgataatctccacgcacagaagtgtatcgactggaataggaatgttctcaagcgcgaacttggactagcagagtccgatattgttgatatccctcagctgtttttcctaaagaatttctatgccgaagccttcttccccgacatggtgaacatggttgtattagggaaatacctcggcatccccaaaccttacggcccaattattaacgggcggtgctgcctagaggagaaagtgcaatcactattggagccactgggtctccactgtattttcatagacgattatttgtcctatcatgaactacagggcgagatccactgcggtaccaatgtgagaagaaagccctttccgtttaagtggtggaatatggtcccatag

SEQ ID NO: 128073 - DNA, 537 bp, synthetic construct
  misc_feature 1..537: note = Description of Artificial Sequence: Synthetic coding sequence
  source 1..537: mol_type = other DNA
atggcccgcgctgtccggaatttcttaaaggcccagcaggtgcaagcccctgttgagttgtactctgattggctatcagtggggcatgtggacgaattcttaacctttgtgccaacctcagaccagaaggggtttcggttgctgctggcaagcccatctgcttgtctaaaactctttcaggaaaagaaggaggagggctatggcgaagcagcacagttcgatggccttaagcaccaagccaagcgaagcatcaatgagatgctggcggacagacacttgcagagagataaccttcacgctcaggtaaatatggtcgtgttgggtaaatatctaggaatcccaaaaccatatggaccgatcattaacgggagatgctgtctggaggaaaaagtccagtccttgttagagcccctaggcctgcattgtatttttattgacgattacttatcctatcatgagctgcagggggaaattcactgtggaaccaatgtgcgcaggaaaccattcccgttcaaatggtggaacatggtgccctag

SEQ ID NO: 128074 - DNA, 405 bp, synthetic construct
  misc_feature 1..405: note = Description of Artificial Sequence: Synthetic coding sequence
  source 1..405: mol_type = other DNA
atgttggcagatcgacacttacagagagataaccttcatgcccagaagtgcatagactggaaccgcaatgtccttaaacgagagcttggactggctgagagcgacattgtggacatccctcaactcttttttctgaaaaatttctatgctgaggcatttttcccggacatggtcaatatggtggttctcggcaagtatcttgggattcctaaaccctatggccccattatcaacgggagatgttgtcttgaagagaaggttcaaagcctactggagcctttgggactacactgcatattcatcgacgattacctttcttaccacgaactccagggcgagatacactgtggcactaatgtacgccgcaagccattcccgtttaaatggtggaatatggtcccatag

SEQ ID NO: 128075 - DNA, 663 bp, synthetic construct
  misc_feature 1..663: note = Description of Artificial Sequence: Synthetic coding sequence
  source 1..663: mol_type = other DNA
atggctagagctgttagaaattttctcaaagcacagcaggtgcaggcgcctgtcgaattgtactccgattggctcagcgtggggcatgttgacgagttcttaacctttgtaccaacctcagaccaaaaggggtttcggcttctgttagcctcaccctccgcctgtcttaagctgttccaggaaaagaaggaagaggggtacggcgaagccgctcagttcgacggtcttaagcaccaggcaaagcgatccatcaacgagatgctggctgacagacacctccagcgggacaacttgcacgcccaaaaatgcattgactggaatcggaatgttctaaagagagaactcggtctcgcagagtcggacattgttgacatcccccagctgttctttcttaaaaacttttacgcagaagcattttttccagatatggtgaatatggtcgtgctgggcaaatatctgggaattccaaaaccctacgggcccataataaacggtaggtgctgccttgaagaaaaggtgcaatctctgctggaaccacttgggctgcactgcatttttatcgatgactacctgtcttatcacgagctccagggtgagattcattgcggaacaaacgtgcggcgtaagccatttccgtttaaatggtggaacatggtgccctag

SEQ ID NO: 128076 - DNA, 1314 bp, synthetic construct
  misc_feature 1..1314: note = Description of Artificial Sequence: Synthetic coding sequence
  source 1..1314: mol_type = other DNA
atgcttagggaacggacagtgaggctgcaatacggctctagagtcgaggccgtatacgtgctgggaacctacctctggaccgacgtgtattctgctgcgccagccggcgctcagaccttctcactgaagcatagcgagcacgtgtgggtggaagtggtgcgtgacggtgaagcggaggaggtagctaccaatggcaagcagcgatggctgctttctcccagcacaacactccgagttactatgtcccaggcctcgacagaggcctcatccgacaaggtcacagtgaattattatgacgaagaaggcagtattcctatcgaccaagcaggtttgttcctgacggccattgaaattagcttggacgtcgacgcggaccgtgacggcgtggtggaaaagaataatcctaaaaaagcctcgtggacttggggaccagagggccaaggtgccattctcctggtgaattgcgatcgggagacaccctggctgccaaaagaggattgtagggatgagaaggtgtacagcaaggaggaccttaaagacatgtcccaaatgattcttagaactaaggggcccgatagactgccagctgggtatgagatcgtcctgtatatttctatgtcagatagcgataaagtgggagtgttttacgttgaaaacccgtttttcgggcaaaggtatatccatattctgggccggagaaagctctaccacgttgtgaagtacaccggaggtagcgcagagctcctcttttttgtggaggggctatgctttccggacgagggcttcagcggcctggtctctatccacgtaagcctgttagagtatatggcacaggatatccctttgacaccgattttcactgacaccgtaattttccggatcgctccctggattatgacaccaaacattctacctccggtgtccgtttttgtctgttgtatgaaagataattacctgtttctcaaagaggtaaaaaacttggtggagaaaacaaattgtgagctgaaagtatgtttccaatatctgaatcggggcgaccggtggattcaggacgagattgaattcggctatatcgaggccccacacaagggcttccctgtcgtgctggatagcccacgggacgggaatctcaaggattttcccgtaaaagaactgctgggccctgacttcggatatgtcacaagggaaccactgtttgagagtgtcacaagtctggactcctttggcaacttggaggtaagcccccccgtgacagtgaacggaaagacatacccactgggccgcatattgatagggagcagcttccctctgtag

SEQ ID NO: 128077 - DNA, 1998 bp, synthetic construct
  misc_feature 1..1998: note = Description of Artificial Sequence: Synthetic coding sequence
  source 1..1998: mol_type = other DNA
atgcttcgcgaaagaaccgtgcgtctgcagtacgggtctagggttgaggctgtctatgtgctggggacttacctgtggacagatgtgtactccgctgcccccgctggagcccagacgttttcactcaaacactccgagcatgtttgggtggaagttgttagggatggggaagctgaggaggtggcaaccaacggtaagcaacggtggttgctcagtccctccactaccctcagagttacaatgtcacaggcctcgaccgaggcatcatcagacaaggtgacagtgaactactacgacgaggaggggagcatacctatcgatcaggccggcctctttttgaccgctattgagatctcacttgacgtggacgcagatagagacggagtagtggagaagaataacccgaaaaaggcatcatggacctggggccctgaaggccagggggctatactccttgtcaattgtgaccgggaaactccgtggctgccaaaggaggactgcagggatgaaaaggtgtactcaaaggaggacctgaaggatatgtcccagatgattctgcggacaaaaggacccgacaggcttcctgcaggctatgaaattgttctatacattagtatgtcggatagcgacaaagtcggtgtgttttacgtcgaaaaccctttctttggtcaacgatacatccatattctcggccgccggaagctctaccacgtggtcaagtatactggagggtctgctgagttattgtttttcgttgaagggctctgttttcccgacgagggattttccggcctcgtgagtattcacgtatccttacttgaatacatggcacaggatatccctcttaccccaattttcaccgatacagtgatctttaggatcgctccgtggatcatgactcccaatatcctgccccctgttagcgtcttcgtgtgttgcatgaaagataactacctgtttcttaaggaagtgaagaacctggtggagaagacaaactgtgagttgaaggtatgtttccaatatctcaatcgtggcgatcggtggattcaggacgagattgagtttggctacattgaagctcctcataaggggttccccgtggtcttggattcgccacgggatgggaatcttaaagatttccccgtgaaagagctcctgggcccggatttcggctacgtgaccagggagcctttgttcgaatcggtcacatctttggattcttttggcaacctggaggttagcccaccagtcacagtgaacggtaagacgtatcctctggggcgcattctcattggatcttctttccctctctctggcggaagacggatgactaaagtagttcgcgactttttgaaggcccagcaggtgcaagcccctgtagaattgtactccgactggctgacagtaggtcatgtcgatgagttcatgtcctttgtgccaatcccagggacgaaaaagtttctcttgttaatggcttcaacttccgcgtgctacaagctgtttcgagaaaagcagaaggatggccacggagaggcaatcatgtttaagggactgggaggcatgtcttccaagcgaattaccattaacaagattctcagtaacgaatccctggtccaggagaatttgtatttccagaggtgcctcgactggaatcgcgatatcttaaaaaaagagctaggccttacagagcaggacatcatcgacctgccagcgctattcaagatggacgaggatcaccgcgccagagcatttttccccaacatggtgaatatgatcgtcctggataaggatctcgggattccaaagccctttggccctcaggtcgaagaggagtgttgcctcgaaatgcacgtgcgcggcctgttggagccgctgggactggagtgtaccttcatcgacgacatcagtgcctatcataagtttctgggagaagtgcattgcgggacgaacgtgagaagaaaaccttttacgttcaaatggtggcatatggttccatag

SEQ ID NO: 128078 - DNA, 1650 bp, synthetic construct
  misc_feature 1..1650: note = Description of Artificial Sequence: Synthetic coding sequence
  source 1..1650: mol_type = other DNA
atgctgcgggagcgcactgtgcgcctccagtacgggtctcgcgtggaggccgtatatgttctgggcacgtatttatggacggatgtgtactccgccgcacctgccggagcccaaacgttcagcctgaagcatagtgagcatgtttgggtagaggtggtcagagatggagaggcggaagaggtggcaacgaacgggaaacagagatggctactctcaccttccaccacacttcgggtgaccatgtctcaagcgtcaacggaggcttctagtgacaaggttactgtaaactattatgacgaagagggcagcatccccatcgaccaggccggtctctttttgactgccattgaaatttcactggatgtggatgccgaccgggacggagtggttgagaaaaacaaccctaagaagaccaggtcgtctgccaatgcaatctctaccagctgggctggcggatccagtaccatgtggagtagcacaagggtagctcccagatcatgttgctcctcatggaaagcctctgtgtctcccaccagagcgtcccaggcctggagcccctctatgtctgcatgctggtcgacatggccgagtatgaaggacaattatttgtttctcaaagaagtgaaaaatctggtggagaagacaaactgcgaattaaaagtgtgcttccagtatctgaataggggcgaccgatggatccaagacgagatcgagttcgggtatattgaagcaccccacaaaggcttccctgtagtactcgatagccccagagatggtaacttgaaagatttccccgtcaaggaactgctggggccagattttgggtacgtcaccagggaaccattgttcgaaagcgtgacgtccctggactcatttggaaacctcgaggtttccccgccagttacagtgaacggtaagacctatccactgggtaggattctgatcgggtcctctttccccttaagcgggggacgacgaatgaccaaggtggtcagggatttcctgaaggcccaacaggtgcaagcaccggtcgaactttatagcgactggttaacagtcggccacgtagacgaattcatgtccttcgtccctatcccgggcaccaagaagtttctgctgctgatggcgtccacatcagcctgctataagctgttccgagagaaacaaaaggacgggcacggcgaggccatcatgttcaagggcttgggaggaatgtccagtaagcggatcactattaataagatactgtctaatgagagtttggtccaagagaacttgtacttccagaggtgcctggattggaatagagacatcctgaaaaaagaactcggtctgaccgaacaggacatcatcgacctgccggctctgttcaagatggatgaggatcatcgcgctagggccttttttcccaacatggtaaatatgatcgtgctggacaaggacctcggaatccctaagccgttcgggccacaggtggaggaggagtgttgtctggaaatgcacgtacgaggcctgctggagcccctcgggctggagtgcactttcatagacgacatttccgcctatcacaagttccttggtgaagtgcactgcggcacaaacgtccgccgaaagccattcaccttcaaatggtggcacatggtgccatag

SEQ ID NO: 128079 - DNA, 1995 bp, synthetic construct
  misc_feature 1..1995: note = Description of Artificial Sequence: Synthetic coding sequence
  source 1..1995: mol_type = other DNA
atgtcccttcagagaatcgtgagggtttctttggagcatcctacaagcgctgtgtgtgtggcaggggtggaaacactagttgacatctacggcagtgtgcctgagggtaccgagatgtttgaagtgtacggcactcccggagtcgacatctatatcagtcccaatatggaaaggggccgggagcgggcagatacccgccgctggcgctttgacgccaccttagagatcattgttgttatgaacagcccaagcaacgatctgaatgattctcatgtgcaaatctcctatcatagtagtcatgaacccctcccattagcctacgcagtgctatatttgacatgcgtcgatatttccctggactgcgacctgaattgcgagggccgccaggaccggaatttcgtagacaaaaggcagtgggtgtggggcccttccggctatggaggaatattattagtcaattgtgacagagatgatccaagctgcgatgtacaggacaactgtgaccaacacgttcactgcctccaggatctggaagatatgtctgtgatggtcctgagaacacagggtccagctgctctcttcgatgaccataagctggtcttacacacttctagctatgatgcaaaacgcgcccaagttttccatatttgcggaccagaagacgtgtgtgaggcttataggcacgtactcggccaggacaaggtaagttatgaggtgccacgcctccacggcgatgaagaacggttttttgtcgaaggcctgtcttttccagatgctggttttacaggcctgatctcgttccatgtgacattgctggacgatagcaacgaagacttctctgcgagtcccatctttaccgacaccgtggtgtttagagtagcgccctggattatgaccccctccactctgccgcctctggaggtttacgtatgccgggtgaggaacaatacgtgttttgtcgacgccgtcgcggaactggcccgcaaggcaggttgcaagctcaccatttgccctcaggctgagaatcgcaacgatagatggatccaagatgaaatggagttgggatacgtgcaggcccctcataagacgctccccgtggttttcgatagccccaggaatggtgagctccaggactttccgtacaaacgtattttaggacctgatttcgggtatgtcaccagagagccacgcgaccgaagtgtgtctgggcttgacagtttcggcaatcttgaggtatcacctccggtggtagccaacggcaaagaatatcccttaggtcggattctcattggagggaaccttccggggtccagtggaaggagagtcacccaagtggtacgggattttttgcatgctcaaaaggtgcaacctccagtggagttatttgtagactggctagctgtcggacatgtggacgaatttctgagctttgtgcctgccccagacgggaaagggtttcgaatgctgctggcatcacccggagcgtgcttcaagctgttccaggagaaacagaagtgtggtcacggaagagcccttctgttccagggcgtggtagatgatgaacaagtgaaaaccataagcattaatcaggtgctctcaaacaaagacctcatcaattataataaattcgtgcagagctgtattgattggaacagggaagtgctcaaaagagagctggggctcgcagaatgcgatatcatcgacatccctcagctattcaagactgagcgcaagaaagctactgccttttttcctgacttagtgaatatgctggtgcttggtaagcatcttggaataccaaagccgttcggcccaatcattaacgggtgttgttgcctggaggagaaggtccgttccctgttggaacccttgggccttcactgtaccttcatagatgacttcaccccctaccatatgctgcatggtgaggtccattgcggaactaacgtctgtcgtaagcctttttctttcaaatggtggaacatggtcccttag

SEQ ID NO: 128080 - DNA, 645 bp, synthetic construct
  misc_feature 1..645: note = Description of Artificial Sequence: Synthetic coding sequence
  source 1..645: mol_type = other DNA
atggcacagggcacacttataagagtcacccccgagcagcctacccacgcagtctgcgtcctcggtacactcacacaattagatatctgtagcagcgccccagaagattgtaccagcttctctataaacgcctctcctggggtagtggttgacattgcacacggtcccccagccaaaaaaaagtccaccggatcgagcacgtggcctctcgaccctggagtggaagtgacactcacaatgaaagttgcaagcggatccacaggtgatcagaaagtccagatttcttactacgggccgaagaccccacccgtgaaggctttactgtatttgactggggtagatggggtgtcaccctgccatcccggctggtctgcgatgcatgatctggcccactgtaaccttcgcttgcaggtgcaggcaattctttgcttcagtgtgccgagttcatggacaacaggggcatgccaccacgcatggctgatcttcgtcttcctggtggagatggaattccatcacgtagggcaggcaggtctcgaattgcttaccagtggggatctaccagcctcagggtcccaaagcgcgagaatcactggaatgaatcattgcgctaggcccagtatcttcctgatacttaagtatctgtag

SEQ ID NO: 128081 - DNA, 1992 bp, synthetic construct
  misc_feature 1..1992: note = Description of Artificial Sequence: Synthetic coding sequence
  source 1..1992: mol_type = other DNA
atggcccagggaaccctgattcgcgtaacgcctgagcagcccacgcatgcagtgtgtgtgctggggacactgacacaattagatatatgctcgtctgctcctgaggattgcacctccttcagtataaacgcctctccaggcgttgtagtcgatattgcacacggccccccagccaagaaaaagtcgaccggttctagtacttggccgctggatccaggggtggaggtgacgctcactatgaaggtggcctcagggagtacaggagaccagaaggttcaaatatcctactacggtccaaagaccccacctgttaaagccctcctctatcttaccggtgtggaaatttccctgtgcgctgatataacccgaaccgggaaggttaaacctactagggccgtcaaagaccaacgcacttggacttggggaccctgtgggcagggagccatcctgctagtgaattgcgaccgggataatctcgagagttctgccatggactgcgaggacgatgaggtgcttgactccgaagacctgcaggacatgagtctcatgacactgtctacgaaaacccccaaggatttttttaccaaccatacgctcgtgctgcatgttgcaagaagcgaaatggacaaggttcgtgtattccaggctacccgaggcaagctttccagcaagtgttctgtggttcttgggcccaagtggccaagccactacctgatggtgcctggcgggaaacataatatggatttttacgttgaggcgttagcctttccggacaccgactttcccggtctcattacattgaccattagcctgcttgacacatccaacctggagctccccgaggctgtggtgtttcaggactccgtggtgtttagagtggcaccatggataatgacgccaaacacacagcctccacaggaggtctatgcatgttcgattttcgagaacgaagattttttgaagagcgtaacaaccctagccatgaaggctaaatgcaaactaacgatctgccccgaagaggaaaatatggatgaccagtggatgcaagatgaaatggagatcggctacattcaagctccgcataagaccctccccgtagtcttcgattcccctaggaatcgaggactcaaggagttccctatcaagagggtgatggggccagattttggctacgttacccggggtccccagaccggaggtattagtggcctggactctttcggtaacttggaggtgtcgccgccagtcacggtccgtggcaaggaatatccactgggacggattctatttggcgatagttgttatccctcaaacgattcccgccagatgcatcaggctctacaggactttctgagcgcacaacaggtgcaggctcccgtgaagctgtactccgattggctgagcgtcggccacgttgatgagtttctgtcttttgtacctgcgccagacagaaaaggttttcgcctgctgctcgcctctcccagaagctgctataaacttttccaggagcagcagaacgaaggccacggcgaagcactcctttttgaggggataaaaaagaagaaacagcagaagattaaaaatatcttgtccaacaaaacacttcgggaacataacagcttcgtggaaaggtgtattgattggaatagggagttactgaagagagaattaggccttgccgagagcgatatcatagacattccacagctctttaagctcaaggaattttccaaagcggaggcttttttccccaacatggttaatatgctggtccttggcaaacatctgggcattcctaaaccttttggtccagtcattaacggcaggtgttgtctggaggaaaaggtctgctccttgctggagccattaggattgcagtgcactttcattaacgatttctttacatatcatattaggcacggggaggtgcattgcggcactaacgtaaggcgtaaaccttttagcttcaaatggtggaacatggtgccctag

SEQ ID NO: 128082 - DNA, 384 bp, synthetic construct
  misc_feature 1..384: note = Description of Artificial Sequence: Synthetic coding sequence
  source 1..384: mol_type = other DNA
atggctcaaggtactcttatacgagtaactccggagcagcctacacacgcagtctgtgtactgggaacactgacgcaattagacatttgttccagtgcgcctgaggattgtacgagtttcagcataaatgcgagcccaggtgtcgtggtagacatcgcccatgggccccctgccaagaaaaaaagcactggctcctctacttggcccctggatccaggtgtggaggtgactttgaccatgaaggtggcctcaggaagtaccggggatcaaaaagtccagatcagttattacggcccgaaaacaccacctgtgaaggccctgctgtacctgacgggcgtcgatggcgtgagtccttgtcacccaggctggagcgctatggcttag

SEQ ID NO: 128083 - DNA, 2628 bp, synthetic construct
  misc_feature 1..2628: note = Description of Artificial Sequence: Synthetic coding sequence
  source 1..2628: mol_type = other DNA
atggacactgtccaccatatgttgctgtttgggtgcaatatgccatcaagtaccgggagctactggttttgtgatgaggggacttgtacggataaggcaaacatactctacgcgtgggctcgaaacgcgcctccaacccggttaccgaaaggcgtgggctttcgcgtgggaggcgagaccggcagtaagtacttcgtcctccaagttcattatggagacatcagtgctttccgggataataacaaagactgtagcggtgtttctttacatctgactagactccctcagccactgattgcagggatgtacctcatgatgagcgtggacaccgtgataccagcaggggagaaggtagttaactccgacatttcctgtcactacaagaactaccctatgcatgtttttgcctatagggtgcacacacatcatttgggaaaagtggtttctggctatagagtacggaacggacagtggacgctgatcggtaggcagagtcctcagcttcctcaggccttttacccagtgggacaccctgtcgacgtcagctttggggatctattggctgctcggtgcgtgtttacaggcgagggtcgaactgaggcaactcacataggggggaccagttcagacgaaatgtgcaacctgtatattatgtactacatggaagcaaaacacgccgtgtctttcatgacctgcactcagaatgtggctccagacatgttcaggactatcccccctgaagcgaacatccctattccagtgaaatcagatatggtgatgatgcacgagcaccacaaggagaccgagtacaaagacaaaattcctttgctccagcagccgaagcgagaggaagaggaggtcctggatcagggcgacttttactccctgctgtcgaaactactgggggagagagaggatgttgtgcatgtgcacaaatacaaccccaccgaaaaagcagaaagtgagtctgatctagtggcggaaatcgctaatgttgttcaaaaaaaggatcttggccgctccgacgctcgtgaaggggctgagcatgaaaggggtaacgctatcctggtcagagatcgcatccataagtttcatcgcctggtgtcaactctacgccccccagaaagtcgcgtgttcagcctacagcaacctcctccaggggaggggacttgggagcccgaacatacaggagattttcacatggaggaggcactagattggcctggagtgtacttattacccggccaggtctccggcgtggctcttgatcccaaaaataatcttgttattttccaccgaggtgaccacgtgtgggatggaaactcctttgattccaaatttgtgtaccagcagatcggccttggccctatagaggaggataccattcttgttatcgaccctaataatgctgccgtgctgcagagctcggggaagaatctgttttatctgccccacgggctcagcattgataaagatggcaactattgggtcaccgatgtggcgttgcaccaggttttcaaacttgatccaaacaataaggagggcccagtcctgatcctagggagaagcatgcagcccggcagcgatcagaaccacttctgccagcccaccgacgttgccgtggacccagggaccggggccatctatgtgtctgacgggtattgcaattctcgcattgttcaattctctcccagtgggaagttcataactcagtggggtgaagaaagcagcggttcttcccctctgcctgggcaattcactgtacctcactccttagccctggtcccccttctgggtcagctgtgcgttgctgatcgggagaatggcaggatccagtgctttaagactgataccaaggaatttgtgagggaaatcaaacactcatcgttcggcagaaacgtgtttgctatctcttacattcctggactgcttttcgcagtgaacggaaaacctcattttggggatcaagaacctgtgcaaggatttgtcatgaatttcagcaatggtgagatcatcgacattttcaagccagtccgcaagcacttcgatatgccgcatgacattgtagcctccgaggatggaaccgtgtacataggcgacgcgcacaccaatactgtatggaagttcactctaacagagaaactggagcacaggagcgtaaaaaaagcagggatagaagttcaggaaataaaggccgaagcagtcgtggagaccaagatggaaaataagccaaccagcagtgagctgcagaagatgcaggaaaagcagaagctgatcaaggagcccggcagtggggtgcccgtggtcctcattaccactctcctcgtgatacccgtcgtagtactgctggccattgccatcttcatccgatggaagaagagtagggctttcggtgactctgaacacaaattggagaccagctcgggccgcgtgttagggaggttcagaggaaagggctccggggggctgaatcttgggaatttttttgcgagccgaaagggatatagtcgtaaagggtttgaccgtctgagcactgaagggtctgaccaggaaaaggaagatgatggaagcgagtccgaagaggaatactccgcccccctccctgctttggccccttcgagcagctag

SEQ ID NO: 128084 - DNA, 2925 bp, synthetic construct
  misc_feature 1..2925: note = Description of Artificial Sequence: Synthetic coding sequence
  source 1..2925: mol_type = other DNA
atggcgggccgggtgccgagtcttctggtgttactggtttttccttcctcttgcctcgccttcagaagtcctctgtcggtgttcaaaaggtttaaagagactacgcgacccttctccaacgaatgcctcggcacaacaaggccagtggtgcccatcgacagctcagacttcgctttagacatcaggatgcccggagtgactcccaaacaaagcgatacttatttttgcatgtctatgaggatacccgtggacgaggaagccttcgtgatcgattttaaaccacgggcctctatggataccgtacatcacatgttgctcttcggatgcaacatgcctagtagcaccggatcttactggttctgcgacgaggggacctgtaccgacaaggcaaacattctgtatgcctgggcacgtaatgcgccaccaacacggctgccaaagggggtcggctttcgggtcggaggtgaaaccggaagcaagtatttcgttctgcaggtacattacggtgatatttctgccttcagagataacaataaggattgctccggagtgagccttcacttaaccagactaccccaacccttaatcgccgggatgtatctgatgatgagtgtcgacaccgttatccccgctggcgagaaggttgttaattctgacatcagttgtcactacaaaaactacccaatgcatgtgttcgcctaccgggtgcatacccatcatctgggcaaggtggtgtccggctaccgtgtcaggaacggacaatggaccctcatcggccgccagtcacctcagctaccacaggccttctatccagtgggacatcccgtggatgtgtccttcggcgacctgctagcggcccgatgcgtgtttacaggtgaaggaagaactgaagccacacacattggaggaaccagctcggatgagatgtgcaacctctacataatgtactacatggaagccaagcacgctgtctctttcatgacttgtacccaaaacgttgcacctgacatgtttcggaccattccaccagaggctaacattcctattccagtgaagagcgacatggtgatgatgcatgaacaccacaaagagacagagtacaaggataagatcccattacttcagcagccaaaacgtgaggaagaggaggtccttgaccagggcgatttttactccctgttatccaaactgctcggggagagagaggacgtcgtgcacgtgcacaaatataatccgaccgaaaaggcagagagcgagtcagacctggtggccgagatcgccaacgtggtgcaaaaaaaggacttgggacgtagcgacgcccgcgaaggggctgaacatgagcgcggcaatgcaatcctcgtcagggaccggatccacaaatttcataggctggtctcgactctgcggcccccagaatcgcgagtcttctcactccagcagccacccccaggcgagggaacgtgggagccagagcatacaggcgacttccacatggaagaggctctggattggccaggtgtgtatctgctacccggacaagtttccggcgtagccctggaccccaagaacaacctagtgatctttcacaggggggatcacgtctgggatggtaatagttttgattctaaatttgtgtatcagcagatcggactcggcccaattgaagaagatacaatcttggtgattgatccgaataacgctgccgtgcttcaaagtagcgggaagaacctgttttatcttccacacggcctgtctattgacaaggatggtaactactgggttacagatgtggcattgcaccaggtgtttaaactcgatccaaacaataaggaagggcctgtcctgattctcggccgatccatgcaacctgggtccgaccaaaaccatttctgccagcccacggacgttgctgtcgatcctggaaccggcgccatttatgtaagcgacggctattgtaactccaggattgttcaattctctcctagtgggaaatttattacacagtggggggaggagagttccgggtcaagcccactgcccggccaattcaccgttccgcactcactggccttggttcctttgttaggccagctgtgcgtggcagatcgggagaacggcagaatacagtgtttcaaaacagacactaaagaattcgtccgtgaaattaagcacagctcttttggcaggaatgtcttcgcgatttcatacatacctgggctcctctttgccgtaaatggaaagccccacttcggcgatcaggagcccgtgcagggctttgtgatgaacttctccaacggggaaatcatcgatatcttcaagcccgtgagaaaacattttgatatgccccacgatattgttgccagcgaagacgggacggtgtatattggcgacgctcacaccaacaccgtttggaagttcacattaaccgagaagctcgaacatcgtagcgtgaagaaagctggaattgaagtacaagagatcaaagaggctgaggctgtcgttgagaccaagatggagaataaacctaccagcagtgagctacaaaagatgcaggagaagcagaaactaatcaaggaaccgggtagcggcgttcctgtggtcctaattactactttgctggtcatcccagttgtggtgctgctagccatcgctatctttatccgttggaagaaaagtagggcctttggagccgacagcgagcataaactggagacttctagtggaagggtgttaggacgttttaggggaaagggctctgggggtttaaacttaggcaatttctttgcctcacggaagggctattcccgcaaagggttcgacaggctctctacagaggggagtgaccaggagaaggaagatgacggatccgagtctgaggaagagtattccgccccactgccagcacttgctccatcatcgtcatag

SEQ ID NO: 128085 - DNA, 2664 bp, synthetic construct
  misc_feature 1..2664: note = Description of Artificial Sequence: Synthetic coding sequence
  source 1..2664: mol_type = other DNA
atggctggcagagtcccctcacttttggtgctcctggtgtttcctagcagttgtttggccttcaggagcccactgtccgtctttaagcgatttaaggagacaacaaggcccttcagcaacgaatgtttggggactaccagaccagtcgtgcccatagattctagtgactttgctctcgacatcaggatgcctggagttactcccaagcagtcggacacttatttttgtatgagcatgagaatccctgtcgatgaggaagctttcgtcatcgatttcaagcctagggctagcatggatacagtgcatcatatgctgttgtttgggtgtaatatgccatccagcacaggaagttactggttctgcgacgaaggcacctgcaccgacaaggcgaacatactgtacgcttgggcgagaaacgctccacccacccgattgccaaaaggagtgggattccgcgtcgggggtgaaacagggagtaagtatttcgtgctacaggtccattatggggatatcagtgcatttagggacaacaacaaggattgtagcggcgtcagcctccacctaaccagactcccgcagcctttgattgctggtatgtatcttatgatgtccgtcgacactgtgatccctgctggcgaaaaggtagtcaattctgatataagctgccactacaagaactaccctatgcacgtgtttgcctatcgagttcacacacaccatctcggcaaagttgtttccgggtacagggtgcgaaatggacagtggacactgatcgggcggcagagccctcagctgccccaggccttctacccagtgggccatcctgtagatgtctccttcggagacctcctcgccgcaaggtgtgtgtttacaggggaggggagaaccgaagctacacatattggcggtacctcaagtgatgagatgtgtaacctgtatattatgtattacatggaagcaaagcacgccgtgagctttatgacatgtacccaaaatgttgctccagatatgttccgcaccattccccccgaagcaaatatccctatcccagtgaagagcgatatggttatgatgcatgaacaccataaggagaccgagtacaaggataagattcccttgttgcagcagcctaaacgcgaggaggaggaagtactagatcaaggcgacttttatagcctgctaagcaaactgttgggagaacgtgaggacgttgtgcatgttcacaagtacaatcccacagagaaagccgagagtgagagcgatttggtggctgagatcgccaatgtggtccagaagaaggacctggggaggagcgatgccagagagggcgctgagcatgagaggggcaatgccatcctggtcagagataggatacacaagttccatcggttggttagtactttgaggcctcccgaatcacgcgtgttctctctgcagcagcctccaccgggggaagggacctgggagcccgagcacaccggcgacttccacatggaagaagcattggactggccaggcgtgtacctcctaccaggtcaggtctctggcgtggcgctcgatcccaagaacaatctggtcatctttcaccgaggcgatcacgtatgggatggcaatagtttcgatagcaagttcgtctaccagcaaatcgggctggggcctatcgaagaggacactatcctggtcattgaccctaacaacgccgcggtactacagtccagtgggaaaaatctattttatttaccacatggcttgtccatcgacaaggacgggaactactgggtgactgacgttgcgttgcaccaggttttcaagctcgaccccaataacaaggaaggtccggtgctgatcctgggccgcagtatgcagcctgggtcggaccagaatcacttctgccagccaaccgatgtcgccgttgatcccggtactggagcgatctatgtctcagatgggtattgcaacagtcgtatcgtacagttcagcccctcaggtaaattcatcacacaatggggggaggaatcatccggatcaagcccgctgcccggtcagtttactgtcccccactctctggccctggtgccactgttaggtcagctgtgcgtagccgatcgcgaaaatggaagaattcaatgtttcaaaaccgatactaaagagtttgtgagggagatcaagcactccagttttgggagaaatgtatttgccatttcctatatcccagggttattgtttgccgtcaatggaaagccacactttggcgatcaggaaccagtgcagggattcgtaatgaacttttccaatggagaaatcattgatatttttaagcccgtacggaaacatttcgatatgccgcatgacatcgtagcctcggaggatgggaccgtatatattggagatgcccatactaatacagtgtggaaattcacactcacagagaagttagagcaccggtcagtgaaaaaagcgggcatagaggtgcaggagatcaagggaaagggatccggaggccttaacttgggcaacttcttcgcgagccggaaaggatactcccgaaaggggttcgaccggctcagcacggagggcagcgaccaggagaaagaggatgatggcagtgaatcagaagaagaatatagcgccccactgccagcgctcgcacctagtagttcttag

SEQ ID NO: 128086 - DNA, 2601 bp, synthetic construct
  misc_feature 1..2601: note = Description of Artificial Sequence: Synthetic coding sequence
  source 1..2601: mol_type = other DNA
atggccgggcgggtaccttccctgcttgtcctgttggtttttccctccagctgtctcgcctttagatctcccctgagcgtgtttaagcggtttaaagagacaacccggccatttagtaacgaatgcctggggacaacccgccctgttgtgccgatcgactcatctgatttcgcactcgatattcgcatgcccggggtcactcctaagcagagcgacacttacttttgcatgtccatgcggatccctgtcgatgaggaggcatttgtgatcgatttcaaacctcgagcctctatggacactgtgcatcacatgctccttttcgggtgtaacatgccatctagcactggaagctactggttctgcgatgaaggtacatgtactgataaggccaatatcctgtacgcttgggcccgtaatgcacccccaacccgattgcctaagggagtcggattcagagtcggcggagagaccggcagtaaatatttcgttcttcaggtccactacggagacattagcgccttcagagataataacaaggactgttcaggcgtttccctgcacctgaccagacttccacaacctcttattgctggaatgtacctgatgatgtccgtcgacaccgtgatcccagctggcgaaaaggtagttaactccgatatttcatgtcattataagaactaccccatgcatgttttcgcctatcgcgttcacacgcatcacctcggtaaggtggtctcgggttatagagttcggaatggtcaatggaccctcatagggagacagagtccacaactgcctcaggctttttatccagtgggacaccctgtggatgtgagctttggagacctgttagccgctaggtgcgtttttacaggggagggcagaacagaggcaactcatattggtggcacatcaagtgatgaaatgtgcaacctgtatataatgtactacatggaagcaaaacacgctgtgtccttcatgacgtgcacgcaaaacgtggccccggatatgtttaggacaattcctcctgaggctaacataccaattcctgtgaagtctgatatggttatgatgcacgagcaccacaaagagacagagtacaaagataaaatacccctcctccagcagcctaaacgcgaggaggaagaggtcttagaccaagatttccatatggaggaggctctggactggccaggcgtgtacctcctgcctggccaagtgagtggcgtagccctggacccaaagaataatcttgtgatctttcaccggggagatcacgtctgggacggaaattccttcgatagcaagttcgtgtatcagcaaatcgggctgggcccaatagaggaggataccatcctcgtcatcgatcctaacaatgcggcagtccttcagagctcagggaaaaacctgttttacctcccacacgggctgtccattgacaaagacggcaattactgggtaacagatgttgctctccaccaggtttttaaactggaccctaacaacaaggaaggacctgttcttatcctcgggcggagcatgcaacctggttctgaccagaaccatttttgccagccaactgatgttgccgtggatcctggtactggagccatttacgtttctgacggatattgcaattcacgtatagtccagttctcccccagtggtaaatttattactcagtggggcgaagagagttcaggaagtagtccccttcccggtcaattcacagtcccccattcactcgccctagttccactcctgggccaactttgcgtcgcagaccgcgaaaacggtcgcattcaatgtttcaaaaccgacacgaaggagtttgtcagggaaattaagcacagttccttcggtaggaacgtctttgctatctcctacatacccgggctgcttttcgctgttaatggcaaaccacacttcggagaccaggagcctgtgcagggttttgtcatgaatttcagcaatggcgagatcatagacatcttcaagcccgtccgtaaacactttgatatgcctcacgacatcgtggcttctgaagacgggacagtgtacatcggcgatgcacataccaacacagtgtggaagtttacactcaccgaaaaacttgaacatcgttcggtcaagaaggctggcatcgaagtccaggagataaaagaggcagaggccgttgtggagacgaaaatggaaaacaagcccacaagctccgagctccagaagatgcaggagaagcagaaactcataaaggagcccggatcgggggtgcccgtagtgttaatcaccaccctgctggtgataccagttgttgtgctgttagccatcgctattttcatccgctggaagaagagccgggcttttggtgattctgagcacaagttagaaactagtagcgggcgcgtcttggggcgcttccgtgggaaggggagcggcggcctgaacctaggtaatttcttcgcgtcgcgtaagggttacagccgaaagggcttcgaccggctttctactgaggggagtgatcaggaaaaagaagacgatggatcagaatccgaagaggagtactctgcccccctgcccgcactggcgccctcaagctcatag

SEQ ID NO: 128087 - DNA, 1008 bp, synthetic construct
  misc_feature 1..1008: note = Description of Artificial Sequence: Synthetic coding sequence
  source 1..1008: mol_type = other DNA
atgcagccaggatccgaccagaaccacttttgccagcctaccgacgtggcagtggaccccggcactggagcgatctacgtgagcgacggttactgcaacagcagaatagtccagttttccccctctggcaagtttatcactcagtggggagaagaatcgtcaggcagttctccattgcctggccagttcacagtgcctcacagcctggcgctcgtgcccctcctcgggcagctctgtgttgccgatcgcgagaatgggagaatacaatgtttcaagacagatactaaggagttcgtgcgtgagattaagcatagcagctttgggcgcaatgtcttcgccatcagttatattcccggcctgttgtttgcagttaatgggaaaccccacttcggggaccaggaaccggtccaggggtttgttatgaatttcagcaatggagaaattattgacatcttcaagccagtccggaaacactttgacatgccgcacgacatagtggcatcagaagacgggaccgtgtacatcggcgacgcgcataccaatacagtgtggaagttcaccctgactgagaagttggagcaccgttctgttaaaaaggcagggattgaggtacaggaaattaaggaggcagaggcagtggtcgaaacaaagatggagaacaaacctaccagcagcgagcttcagaagatgcaggaaaagcagaagttgatcaaggagccaggttctggagtacctgtggtcctgatcaccaccctgctggtgatccctgtggttgttctcctggcaatcgccatctttatccgatggaaaaaaagtcgcgcctttggtggaaagggttctgggggcctcaacctggggaatttctttgcctctcgtaaagggtattctcgtaaggggtttgaccgactgagcaccgaagggagcgaccaggagaaggaggatgacggaagcgaatcggaggaggagtacagcgcccccctgcccgccctagctcccagcagtagttag

SEQ ID NO: 128088 - DNA, 468 bp, synthetic construct
  misc_feature 1..468: note = Description of Artificial Sequence: Synthetic coding sequence
  source 1..468: mol_type = other DNA
atgcacgagcatcacaaggagaccgaatacaaagataagattcccctgttacagcaacccaaacgagaggaagaggaggtactcgaccagggagatttctatagcctgttgagcaagcttctgggtgagcgggaggacgtcgtccatgtccacaaatacaatcctaccgaaaaggccgagtcagagtccgatctcgtggccgagattgcgaacgtggtgcagaagaaggacctgggccggtcagacgccagagaaggagcagaacacgagcggggcaatgctatactcgttcgtgatcgcattcacaagttccatagactggtgagcaccctgaggccgcccgaaagccgtgtgtttagccttcagcagccaccgcctggcgagggtacttgggagcctgaacacacaggcgctcgacgcgaggacatgaagtgcttccagtgtaaagagatgatttctgtccagtag

SEQ ID NO: 128089 - DNA, 2922 bp, synthetic construct
  misc_feature 1..2922: note = Description of Artificial Sequence: Synthetic coding sequence
  source 1..2922: mol_type = other DNA
atggccggcagggtgcccagcttactcgtgcttctggtcttcccttccagctgcttagcatttcggtcccccctctctgtatttaagaggtttaaggagaccactcggccatttagcaatgagtgccttgggaccacgagacccgtcgtacctattgacagctctgacttcgcactggatatcaggatgcctggggtaacccccaaacagagtgatacttacttctgcatgagcatgcgcattcctgtcgacgaagaagcattcgtgattgactttaaaccgcgcgcttccatggatacagtccaccacatgttactgtttgggtgcaatatgccgtcctctaccggctcctactggttttgcgatgagggcacctgcactgacaaagcgaatattctctacgcgtgggcccgaaatgctccaccaacgaggcttcccaaaggcgtgggatttcgcgtgggaggggagacaggaagcaaatatttcgtactgcaggtccactatggtgacatcagcgcctttcgcgataataacaaagactgctcaggtgtttctctgcatctcacccggttgccacagccactcatagccgggatgtatttgatgatgtccgtggatacggtgatccctgccggtgagaaggtggtcaattccgacatatcgtgccattacaagaattaccctatgcacgtattcgcataccgggtgcatactcatcacctcggaaaagtcgtcagcggctaccgggtgcggaacggtcaatggaccctgatcggcagacagtcccctcaacttcctcaggccttctaccccgtgggacaccctgtagacgtttccttcggcgatctcctggccgcccggtgcgttttcaccggggagggaagaactgaggctacccacataggaggaaccagttccgacgaaatgtgcaacctctatatcatgtactatatggaggctaagcatgccgtgtcttttatgacttgtacccagaacgttgctcctgacatgttcagaacgattcctcctgaagcaaacattccgatcccagtgaagtctgatatggtgatgatgcacgagcaccacaaggagactgaatataaagacaagattccactattacaacagccgaaaagggaagaggaggaggtgttagaccagggtgatttttacagtttactcagcaaacttctgggtgaacgcgaagatgtcgttcatgtacacaaatataacccaacagagaaggctgaaagtgaaagtgatctggtggcagaaatagccaatgtggtgcagaaaaaggatttgggccgatccgacgcgagggaaggtgcagagcacgagaggggcaacgcaattttggtgagagatagaattcataagtttcaccgcctcgtgtcaacattacgaccacctgagagcagagttttttctttgcaacagccaccacctggcgagggcacttgggagcccgagcacactggggatttccacatggaggaagccctggactggcctggcgtttatcttctcccaggacaggtctctggggtggctttagaccccaaaaacaacttggtgatttttcatcgcggagatcatgtgtgggacggaaacagtttcgactccaagttcgtctatcaacagatcggcctcggccctatcgaggaggatacaattctcgtgattgaccccaacaacgccgccgttctgcagagctcaggaaagaaccttttttacctgcctcacgggctgtccatcgacaaggacgggaactattgggtgacggatgtggcgctccaccaagtgttcaagttagatcccaataacaaagaaggccctgtgctgatactgggtcggtccatgcagcctggctccgaccagaaccacttctgccagccaaccgatgttgctgtagaccctggtaccggggctatttacgtgtccgacggttactgcaatagccgtattgtgcagttcagtccgtccgggaaattcatcacccaatggggcgaggaaagcagtggttcatcccctctacccggccaatttacggtcccccacagtttagctctcgtgcccctgctcggccagttgtgcgttgctgatcgggagaatggaaggattcaatgtttcaagacagataccaaggaatttgtacgagagatcaagcattcaagtttcgggcgtaacgtgtttgccatctcttatatccctgggctgcttttcgctgttaatgggaaaccccactttggtgaccaggagccggtgcagggattcgttatgaatttttctaacggcgaaatcattgacatttttaagccagttcggaagcattttgacatgccccatgacatcgtcgctagtgaagatgggacagtgtatataggtgatgctcacactaacactgtttggaagttcacgctgactgagaagctcgaacaccgatcagtaaaaaaggccgggatcgaggtgcaggagatcaaagaggcggaagcggttgtggaaaccaaaatggagaataaacccacttcttccgaattgcaaaagatgcaggagaagcaaaaactcataaaagagcctggatccggggtgcccgtggttcttattactaccttactggttatccctgtggtagtcctcttggccatcgcgatttttataagatggaaaaaatctcgagcctttggagacagtgagcataagttagagacatcttcagggcgggtgctggggaggttcaggggcaaaggaagcggcggacttaatctgggcaactttttcgcctcgaggaaggggtactcccggaagggctttgatagactgagcacagagggctcggaccaggagaaagaagacgacggaagcgaaagcgaggaagagtatagtgcgccactaccagcactagcccctagcagtagctag

SEQ ID NO: 128090 - DNA, 2718 bp, synthetic construct
  misc_feature 1..2718: note = Description of Artificial Sequence: Synthetic coding sequence
  source 1..2718: mol_type = other DNA
atggccggtagagttccatctcttctagttttactggttttcccctcctcctgtctggccttccgctcacccctgagcgtttttaaacgatttaaggaaactactcgcccatttagcaatgagtgtttggggaccactagacctgtggtcccgattgattcctctgattttgccctggacattaggatgccgggagtcacacctaagcagtccgatacttacttctgcatgtcaatgcgcattcccgtggacgaggaggccttcgtgattgatttcaaaccacgcgcaagcatggacaccgttcaccacatgctcttgtttggctgcaacatgccctcttccactggcagttactggttctgtgatgagggaacatgtacagacaaagctaacattctgtacgcttgggcgcggaacgcaccccccacgcgactccccaaaggagtcggattccgtgttggcggtgagacagggtctaagtacttcgttctgcaggtccactacggagacatctcagccttccgggataacaacaaagattgttctggcgtgagtctccacctgacaaggttgccccagcctctaattgctgggatgtacctgatgatgtctgtggacacggttatcccagcaggcgaaaaggtggtgaacagtgatattagctgtcattacaagaactatcccatgcatgtgtttgcctacagggtgcacacacatcatctcggcaaggtggttagcggctatcgggtgcggaatgggcagtggactctaatcggaagacaaagtccccagcttcctcaagcattttatcctgttgggcaccccgttgacgtatctttcggcgacctgctggccgctagatgcgtcttcacaggcgaagggcggacagaagccactcacatcggggggaccagttcagatgagatgtgcaacctctacattatgtattatatggaggctaagcatgctgtgtcttttatgacgtgtacacaaaacgtggccccggacatgtttcgtactatcccaccggaggctaacattcctattcccgtgaagtcagacatggttatgatgcacgagcaccacaaagagaccgaatataaagacaagataccactgcttcagcaaccaaaacgcgaggaggaggaagtcctcgaccagggtgacttctattccctgttgtcgaaactcctgggagaacgggaggacgtcgtccatgtgcacaagtataatccgacagaaaaagctgagtccgaatccgatctagtggctgagattgccaacgtggttcaaaagaaggatctgggtcgctccgatgcccgcgagggggcagaacacgagagaggtaacgctatactggtacgagacagaatccacaaatttcaccgtctcgtgtctacactgcgcccccccgagagccgggtgtttagcctacaacagccaccgcctggcgagggcacttgggagccagagcacacgggcgatttccatatggaagaggcactggactggcccggagtgtatcttctccccggtcaggtttcaggggtggccctggatccaaaaaacaacctggtgatttttcatcgaggcgatcatgtttgggatgggaactcttttgatagcaagtttgtctaccagcagattggactgggcccaattgaggaggataccatcttggtcattgatccgaacaacgccgctgtgctccagagctctggtaaaaacctgttctaccttccacatggactttccatcgacaaggacggtaactactgggtaacggatgttgccttacatcaggtgttcaagctcgacccaaataataaagaggggcctgtgctaatactcggacggtcaatgcagccagggtccgatcagaaccatttttgccaaccaactgacgttgcggtggacccgggcaccggggctatttacgtaagcgatggatattgcaacagtcgtatagtgcagttttctccatccgggaagttcatcactcagtggggggaggaatcttcaggctctagcccactgccaggtcagttcacagtgccccattccctggcgttggtccccctgctcggacagctctgtgtggctgatcgtgaaaacggacgaattcagtgtttcaagaccgatacgaaagaatttgtaagagaaattaaacatagttcctttggcaggaacgtgttcgccatctcgtatattccaggcctgctgttcgccgtgaacggcaaaccccacttcggggaccaggaacctgtccagggctttgttatgaatttcagcaatggcgaaataattgatatttttaagcccgtgagaaaacacttcgatatgccacacgatatcgtggctagcgaagatggaaccgtatacatcggcgatgcacacaccaacacagtttggaaattcacgctgacagagaagctggagcaccgaagtgtgaagaaagccggcattgaagtccaggaaatcaaagacagcgagcacaagctcgaaacctctagcggccgagtgttggggcggttccgaggcaagggctctggggggctaaatctgggcaacttcttcgcctcacgcaaagggtacagccgaaagggattcgatcgactgtctacagaaggttcagaccaagagaaggaagatgatggttctgagagcgaagaagaatattcagcccccctgccagcactcgccccatccagctcctag

SEQ ID NO: 128091 - DNA, 90 bp, synthetic construct
  misc_feature 1..90: note = Description of Artificial Sequence: Synthetic coding sequence
  source 1..90: mol_type = other DNA
atggcagggcgtgttcctagccttctggtattactggtgttcccctctagctgcctggcgtttaggagccccctctccgtttttaagtag

SEQ ID NO: 128092 - DNA, 87 bp, synthetic construct
  misc_feature 1..87: note = Description of Artificial Sequence: Synthetic coding sequence
  source 1..87: mol_type = other DNA
atggctggacgcgtgccaagcctcctggtgctgttagtgttcccttcctcctgtctggcttttcggagcccgctctccgttttttag

SEQ ID NO: 128093 - DNA, 162 bp, synthetic construct
  misc_feature 1..162: note = Description of Artificial Sequence: Synthetic coding sequence
  source 1..162: mol_type = other DNA
atggcagggagagtaccgagcctcctcgtcctgctggtgttcccatcttcctgtctagcattccggtctcccttgtcagtgttcaagaggtttaaggagactactcgaccattctctaatgagtgccttgggacaactagacccgtagtccctattgattag

SEQ ID NO: 128094 - DNA, 129 bp, synthetic construct
  misc_feature 1..129: note = Description of Artificial Sequence: Synthetic coding sequence
  source 1..129: mol_type = other DNA
atggccgggcgggtcccttctctcctcgtgctcttggtatttcccagttcctgcctcgccttcagatcacctctcagtgtctttaagcggtttaaggagacaactcgtccattcagcaacgagtgttag

SEQ ID NO: 128095 - DNA, 207 bp, synthetic construct
  misc_feature 1..207: note = Description of Artificial Sequence: Synthetic coding sequence
  source 1..207: mol_type = other DNA
atggccggtagagtcccctctctgctcgtgctgcttgtttttccatcatcttgtctcgccttccgatcgcctctgagtgtgtttaagaggttcaaggaaacgacacgtccgttctccaacgagtgtctggggacaactagaccagtagtgccaattgacagctctgattttgccctcgacatacggatgccaggggtgaccccgtag

SEQ ID NO: 128096 - DNA, 78 bp, synthetic construct
  misc_feature 1..78: note = Description of Artificial Sequence: Synthetic coding sequence
  source 1..78: mol_type = other DNA
atggcgggcagggtgccaagcctgctggtattactagttttccctagttcatgcctcgcttttcgaagccccctgtag

SEQ ID NO: 128097 - DNA, 501 bp, synthetic construct
  misc_feature 1..501: note = Description of Artificial Sequence: Synthetic coding sequence
  source 1..501: mol_type = other DNA
atggcagccatcccccctgatagttggcagcctccaaacgtgtacttagagacgtccatgggtatcattgtactcgaactgtattggaaacatgcgcctaaaacctgcaagaatttcgccgagctggctagacgtggatactacaacggaaccaagtttcatagaatcattaaagatttcatgatccaagggggcgatcccactggcaccgggcgtggaggcgcttctatctacggaaagcagtttgaggatgaactgcacccagatctgaaattcacaggagccggaattctggcaatggctaatgcaggcccagacactaatggcagccagttttttgtgacgctagcacccacacagtggctcgatggcaagcataccatctttggtagggtttgtcagggaattgggatggtgaatagagtgggcatggtggaaaccaacagtcaggaccgacctgtggacgacgtgaaaataataaaggcatacccatccggatag

SEQ ID NO: 128098 - DNA, 1563 bp, synthetic construct
  misc_feature 1..1563: note = Description of Artificial Sequence: Synthetic coding sequence
  source 1..1563: mol_type = other DNA
atgggcaagcggcagcaccagaaagacaagatgtacatcacctgcgctgagtacactcatttctatggtggaaagaaacctgatcttccccagactaacttcaggcggcttccctttgatcattgtagtctgtctctccagccctttgtctatccagtatgcacaccagacggtattgtcttcgatttgcttaatatcgtgccctggcttaaaaaatatggcactaatcctagtaatggcgagaagctcgatggtcgcagcttgatcaagctgaacttttctaaaaacagcgaaggaaaataccattgccctgtgttgttcactgtgtttaccaataacacccatattgtcgccgtaaggacaacgggaaacgtgtacgcatacgaggctgtggagcagctaaatattaaagccaagaattttcgggacctgttaaccgacgaaccttttagtaggcaggatattataactttacaggacccaaccaacctggacaaattcaatgttagcaatttctaccacgtgaagaataacatgaagattatcgacccagatgaggagaaggctaaacaggaccctagttattatttaaaaaacacaaacgccgagacaagggagacgctccaagagctttacaaggaatttaagggggacgaaatcctggctgccacaatgaaggctcctgagaagaagaaggtggacaagctgaatgccgcccactactcaacgggtaaggtatccgcttctttcacttcaaccgcaatggtaccagagacaacccacgaagccgcagctatcgacgaagacgtgctgcgttaccagtttgtcaaaaaaaaaggctacgtgcggttacatactaacaagggagatctaaacctcgagctgcattgtgatctcacacccaaaacatgtgaaaacttcattaggctgtgtaaaaagcattattacgacggcacgatttttcacaggtctattcggaacttcgtaatccaaggtggagacccaaccggcacaggcactggtggcgagtcctactggggtaagccattcaaggacgaatttcggcccaacctatcccatactggcaggggaatcctatcgatggctaacagcggacctaattcaaatagaagccagttcttcatcacattcagatcgtgcgcctatctggacaagaagcataccatctttggcagggttgtcgggggatttgatgttttgactgccatggagaatgtggagagtgatcctaaaacagacaggcccaaggaagagattcgcattgatgccacaacggtgttcgtagatccttacgaagaagccgacgcccaaatagcccaggaaaggaaaacacagctaaaggttgctcctgagaccaaagtgaagagcagtcagccacaggcgggctcccagggtcctcagactttccgccaaggggtgggcaaatacattaatcccgccgccacaaagcgcgccgctgaagaagaacctagcacgtcagctactgtgcccatgtccaagaagaagcccagcagaggctttggggatttttccagttggtag

SEQ ID NO: 128099 - DNA, 1563 bp, synthetic construct
  misc_feature 1..1563: note = Description of Artificial Sequence: Synthetic coding sequence
  source 1..1563: mol_type = other DNA
atgggcaagagacagcaccagaaggataaaatgtacataacttgcgctgagtacacccacttttatggaggtaagaagcccgacctgcctcagactaacttcagacgcctcccgtttgaccattgttccctgtcattacagccctttgtgtacccagtgtgcacaccagacggcatcgtgttcgacttactaaatattgtgccatggctgaagaaatacggaactaacccttccaatggggagaaactcgacggtcgatccctgattaaactaaatttctccaagaattccgaaggcaagtatcattgccccgtgctgtttaccgtattcaccaataacacacatattgtagctgtgaggacgaccggcaatgtgtatgcctatgaggcagtcgaacagctcaatatcaaagctaaaaatttcagagatctgctgacagacgaacctttcagtcgccaagatatcatcactctgcaggacccaacaaatctggacaaatttaatgtgagcaacttctatcatgtcaagaataatatgaagattatcgacccagacgaggagaaggcaaaacaagaccctagttattacctgaagaataccaacgcggaaactagagagacacttcaggagttgtacaaggagttcaaaggggacgaaattctagcggcaacaatgaaggcacctgaaaagaaaaaggttgataagttaaatgctgctcattattctacaggcaaggtatcggccagctttaccagtacggctatggtgcctgagactactcacgaggctgcagccattgatgaagatgtcctgcggtaccagttcgttaagaagaagggatatgtgaggctgcatactaacaaaggcgacctgaacctggagttacactgtgatctaactcctaagacatgcgaaaacttcattagactgtgcaagaagcactactatgacggaacaattttccaccgatcaatacggaatttcgtgattcagggtggagacccgactggaactggcacaggcggggagtcctactggggcaagccctttaaagacgaattccggcccaatctcagccatactgggagaggcatcctgtcaatggccaattcgggacccaactccaaccgatctcagtttttcattacctttagatcctgtgcatatcttgacaagaagcacaccatattcggccgcgtggtgggcgggttcgacgtgctgaccgccatggaaaacgtcgagtccgacccaaaaaccgatcgacctaaagaggaaattcggattgacgccaccacagttttcgtggacccttacgaggaggccgacgcgcagatcgcgcaggaaagaaagacacagttgaaggttgctcctgagactaaggtgaaaagttcccagccccaggctggatcccaaggcccacagactttccgccagggggtaggcaagtacatcaatcccgccgctaccaaacgggccgccgaagaagaacctagcacctctgcgaccgttcctatgtcaaaaaaaaaaccgagccgcggatttggggatttttcctcttggtag

SEQ ID NO: 128100 - DNA, 1563 bp, synthetic construct
  misc_feature 1..1563: note = Description of Artificial Sequence: Synthetic coding sequence
  source 1..1563: mol_type = other DNA
atgggaaagaggcagcatcagaaggacaaaatgtatataacatgcgcagaatacactcacttctacggaggaaagaagcccgatctcccacagactaacttccgaagactgccgtttgaccactgttcgctttcccttcagcccttcgtctacccagtctgcactccagacggcatcgttttcgacctgctcaatattgtgccatggctcaagaagtatggcaccaatccctctaatggggaaaagctcgacgggcgatctcttattaagcttaactttagcaagaatagcgaaggaaagtaccactgtcctgttcttttcactgtcttcaccaataatacccacattgtcgctgtgcgcacaacagggaacgtatacgcttatgaggctgttgagcaactgaatattaaggcaaaaaacttccgtgaccttctgacggacgaaccattcagtaggcaggatatcattactcttcaggaccccacgaacttggataagtttaacgtgtcaaatttctaccacgtcaagaataatatgaaaatcatagaccccgatgaagagaaagccaagcaagacccttcatactacctgaagaacacaaacgccgagacgagggagacacttcaggagctttataaggagtttaagggtgacgaaattcttgccgccactatgaaagcacctgaaaaaaagaaagtcgataagctcaatgctgcacactatagcaccggaaaagtgtccgctagttttacctctacagccatggtgcctgagacaacacacgaggcagccgccattgacgaagacgtcctgcggtaccagtttgtgaagaagaagggctatgtccgacttcacactaataaaggcgacctaaacctggaacttcactgtgaccttacccccaagacctgcgagaacttcatcaggctgtgcaagaaacactactacgacggcacgatttttcatagaagtattcgaaacttcgtgatccaaggcggggaccctaccgggactgggactggcggcgaaagctattgggggaagccattcaaggatgagttccgacctaacttgtctcataccggacgggggattctctcgatggctaattctggcccaaattccaaccgaagccagttcttcatcacgttccggagctgtgcatacttagataaaaagcacaccattttcggcagggtggttgggggatttgacgtcttaacagcgatggagaacgtcgagtcagacccaaagacagaccgaccaaaggaagaaatacggatagatgccactactgtctttgttgatccatatgaggaggccgacgctcagatcgcccaggagaggaaaactcagctgaaagtggctcccgagacaaaggtcaaatctagccaaccccaggcgggtagccaggggccacagacgtttagacaaggagtgggaaaatacattaacccagctgctacaaagcgagctgcggaggaggagccctctacatccgctaccgtgcccatgtctaagaaaaaaccatcacgcgggtttggagatttttcctcgtggtag

SEQ ID NO: 128101 - DNA, 1584 bp, synthetic construct
  misc_feature 1..1584: note = Description of Artificial Sequence: Synthetic coding sequence
  source 1..1584: mol_type = other DNA
atgggcaagaggcagcatcagaaggacaagatgtacattacgtgtgcagagtacactcatttctatggaggcaagaaacccgacttaccgcagacaaactttcgtcgcctgccgtttgaccactgcagcctgagcttacaacctttcgtgtatccggtttgcacccctgatggaattgtgttcgacctcctcaacatcgttccatggctgaagaagtacggcacgaacccctcaaatggggaaaagttggacggcagatccctgatcaaattgaacttcagcaagaatagtgagggaaagtaccattgtccagtcctgtttaccgtattcactaataacacccacatcgtcgcagtgcggactacaggtaacgtctacgcctatgaagcagtcgagcagctcaatatcaaagccaaaaactttagggacctgctgacggacgaaccattcagcagacaggatatcataaccctgcaggatcccaccaatctcgacaagttcaatgtatctaatttttaccacgttaaaaacaatatgaagattatagaccccgacgaagaaaaagctaaacaggatcccagctattacctgaaaaacaccaatgccgaaacacgcgagactcttcaggaattatacaaagagtttaagggtgacgagatcctggcagccaccatgaaagctcccgagaaaaagaaagtggataaactgaacgccgcgcattactcgaccggaaaagtctccgcatcatttacatcgacagccatggtgcctgaaacaactcatgaagccgctgctattgatgaagacgtgctacgataccaatttgtgaagaagaaggggtatgtgagactccacacaaataagggcgacttgaacctggagctgcattgcgacttaaccccaaagacatgcgagaatttcatcagactgtgcaaaaaacattactacgacggaacaatctttcatcgctcaatacggaacttcgttatccaggggggcgaccctacaggcactggaacagggggtgagtcttattggggtaaaccgttcaaggacgaatttcgaccgaacctctcccacacaggcagaggaattctgagcatggccaatagtggcccaaattctaatcggagccagttctttataacattcaggtcatgtgcctatctggataaaaagcacactatcttcggcagagtggtcggaggctttgacgttcttaccgctatggaaaacgtcgaatccgatcctaagacagaccgaccaaaagaagagatccgcatcgatgccacaactgtgtttgtggatccttacgaggaagctgatgcccaaattgctcaggaacggaagactcagctaaaggtagctcccgaaacaaaggtcaagtcgagtcagccgcaggccggatctcagggcccgcagacctttagacagggcgtcggtaaatacatcaaccctgcggccaccgagcagcagcgtaagagcccccaaccagtgcctcttagcccctgtcccaggcggtccccagttggtgtattgggcacttccgctccaggctcctcacgtcttcctgatgaccattag

SEQ ID NO: 128102 - DNA, 1470 bp, synthetic construct
  misc_feature 1..1470: note = Description of Artificial Sequence: Synthetic coding sequence
  source 1..1470: mol_type = other DNA
atgggtaagcgccagcaccagaaggacaagatgtacatcacatgtgccgagtacacgcatttctatggaggaaagaagcctgaccttccacagaccaactttcggaggctgccatttgaccattgcaggaacatcgtcccctggttgaaaaaatatggcacaaaccccagcaatggggaaaagctggacgggcggagcctcattaaactgaacttttctaagaatagcgagggcaagtaccattgcccagtactgtttactgtgttcactaacaatacgcacatcgtggctgttaggaccactggtaatgtgtacgcctacgaggccgtggagcagctgaatattaaggccaagaatttccgagatctgttaactgatgaacctttctcaaggcaggacatcatcacactacaagatcccaccaaccttgataagtttaacgtatcaaacttctatcacgttaagaataatatgaaaataatcgatcctgacgaggaaaaagcaaaacaagatccttcctattatctgaaaaatactaacgctgaaaccagagagacactgcaggaactttacaaggagtttaaaggcgatgaaattctggccgctactatgaaagcaccagagaaaaagaaagtggacaaactgaacgctgcacactattctactggaaaggtgagcgccagctttacgagtactgccatggtccccgaaactacccacgaggctgctgcgatcgatgaagacgtgttaagataccagttcgtgaagaaaaaaggctatgtgagactccacacaaacaaaggggatttgaatctggagctccactgcgatcttacgcccaagacatgcgaaaacttcatccgtctgtgtaaaaagcattactacgatggcaccatattccatagatcaattcggaacttcgtaatccagggaggtgaccccaccggcaccgggacaggcggcgaaagttattggggaaaaccatttaaagacgagtttcgacctaacctaagccacaccggcaggggcattttgtctatggctaacagcggccctaactccaacagatcacagttcttcataaccttcaggagctgcgcgtatctcgacaagaaacataccatttttggccgcgtggtaggcgggtttgatgtccttaccgccatggagaacgtcgaatcggatcctaagaccgaccgccctaaagaggaaattaggatcgatgctaccaccgtttttgtcgacccttatgaagaagcggatgcgcagattgcgcaggaacgcaagacacagttaaaggaggcctcaagccgaggacgcgcgctaaatcagtgccattgtccacatgtacaggaagaggcacagagtgggttttggggtctccagcttttagtggcagccgcgacttgtaggctgtacttatgcccatctttcagccatcagagcttgatgttgaagctccaggcttag

SEQ ID NO: 128103 - DNA, 1563 bp, synthetic construct
  misc_feature 1..1563: note = Description of Artificial Sequence: Synthetic coding sequence
  source 1..1563: mol_type = other DNA
atggggaaaagacaacaccagaaagataagatgtacatcacatgcgcagagtatactcatttttacggaggaaagaagcccgacctgccgcagaccaacttcaggcggctgccgttcgatcactgttcactgtccctgcaacccttcgtgtatccagtgtgcacccccgatggaatcgttttcgatttgctcaatatcgttccatggctgaagaaatacggcactaacccctctaatggcgaaaaactggacggccgaagcctgattaagctgaatttctctaagaattctgagggtaaataccactgtcccgttctgtttactgtctttacgaataatacacacatcgttgctgtcagaactaccggcaacgtctacgcttacgaagctgtcgaacagctgaacattaaagccaagaatttcagggatctcctgacagacgagcccttttcacgacaggatattataacccttcaggatcccactaatttggataagtttaatgtgtccaacttttaccatgtgaagaacaacatgaaaataattgatcctgatgaagaaaaggcgaagcaggatccttcatactatctaaaaaataccaatgcagagacaagagaaacactgcaggagctgtacaaggaatttaaaggggatgaaattttggctgccaccatgaaggcacctgaaaagaaaaaggtggacaaacttaacgctgcccactacagtacgggcaaggttagtgcctcctttacctccacagccatggtacccgaaacaacccatgaggcggcggccatagatgaagacgttctgaggtatcagtttgtcaaaaagaagggttacgtgcgattgcataccaacaaaggtgatttgaacctggaactgcattgcgatctaacgccgaaaacctgcgagaatttcattcgcctgtgcaagaagcactactacgatggaacaatctttcacaggtcaatacggaacttcgtgattcaagggggagacccgaccggaacaggcaccggcggcgagtcctactggggaaagccgtttaaagacgagttccggcctaatctgagccatacaggccgtgggatcctatccatggctaatagtggacccaactctaacaggtcccagttttttatcactttcaggtcctgcgcgtatctggacaaaaaacatacaattttcggccgcgtggtaggaggctttgatgtgctgacagcgatggaaaacgtggaaagtgaccccaagaccgaccggcctaaggaggaaattcggatcgacgccactaccgtgtttgtggatccttatgaggaggccgatgcgcaaatagcccaggagcgcaagactcagctcaaggtcgcacccgaaaccaaagtgaaaagtagccaaccccaggccggttcacaagggccccagacatttagacagggagtgggaaaatatatcaatccagccgccaccaagcgcgctgccgaggaagagccctctacttcagcgacagtccctatgtcgaagaagaaacccagtagaggattcggtgacttcagttcatggtag

SEQ ID NO: 128104 - DNA, 1479 bp, synthetic construct
  misc_feature 1..1479: note = Description of Artificial Sequence: Synthetic coding sequence
  source 1..1479: mol_type = other DNA
atggctgtgctcttggagactaccctgggggatgtggtgatcgatctgtacacagaggagaggcctcgagcatgcctgaattttttaaagctttgtaagatcaaatattacaattactgccttatccacaacgtgcagagggactttatcattcaaacaggagatccaacaggtaccggacgtggcggcgagtccatttttggccagttgtatggagatcaggctagcttctttgaggccgagaaggtgccacgaataaagcacaagaagaagggtaccgtgagcatggtcaataacgggagcgaccagcatgggtcacagttcctgatcaccaccggtgagaatcttgattacctggatggggtccataccgtgttcggagaggtgaccgaggggatggatatcattaaaaaaatcaacgaaacatttgtggataaggatttcgtcccgtaccaggatatccggatcaatcacactgtcatcctcgatgacccctttgacgatccaccagatctgcttatccccgaccgttctccagaacccactcgagagcagctggattctggaaggatcggcgctgatgaggagatcgacgatttcaagggccgcagcgctgaagaggtggaagaaatcaaggcggagaaggaggcaaaaacccaggcaatcctgctggagatggtaggagaccttcctgatgccgatataaaaccacccgagaacgtactcttcgtttgtaagctgaaccctgtaacaactgacgaagatctggagattattttttccagattcggcccaatacggagttgtgaagtcatccgggactggaaaactggtgagagcctgtgctacgcttttattgaatttgagaaagaggaagactgcgagaaggcgtttttcaagatggataacgtgctcatcgatgacaggaggattcacgtggacttctctcagagcgtcgccaaggtgaaatggaaaggtaaaggcggaaaatacaccaagtccgactttaaggaatacgaaaaggaacaagacaaaccacccaacctggtcttaaaagataaagtgaagccgaagcaagataccaaatacgacctcatcctggacgagcaagctgaagacagtaagtcaagtcacagccatacatccaaaaaacacaagaaaaaaactcaccattgctccgaggagaaggaggacgaagactacatgcctattaaaaacacaaaccaagacatctaccgtgagatgggctttgggcactacgaggaggaggagtcttgttgggaaaaacagaagagcgagaaacgtgatcgcacccagaaccgatctaggtcaaggtcaagagagcgggatggacactactctaactcacataagtccaagtatcaaacggacctgtatgagcgagagcgcagcaagaagagggatcggtctcggtcaccgaaaaagtcaaaggataaagaaaaatcaaaatatcgatag

SEQ ID NO: 128105 - DNA, 384 bp, synthetic construct
  misc_feature 1..384: note = Description of Artificial Sequence: Synthetic coding sequence
  source 1..384: mol_type = other DNA
atgtctcgcccaaagacgcaaaaccaggtaactcatacgcaagttaagaatacacgccggaaaccaattacggttttgaaacggaagaaaatgaggactacctgtcagtccaaaatcctgatccgaattagcattgagaagtgggggctggttacgatgaagaaaaagaaagctgttgggagaaacaagagagtcaaacgcgagacggaactgaggacagaggtcgtcgccgaccttgaacgggggatggctattatcgtgatcgtgatcaaccagaacacgaaacagatctttatgaaagagaaaggagtcaaaagggagacggaggctgaagtccagcggagccctaagattaagaaaaatctgagcattgatgaaaggtag

SEQ ID NO: 128106 - DNA, 318 bp, synthetic construct
  misc_feature 1..318: note = Description of Artificial Sequence: Synthetic coding sequence
  source 1..318: mol_type = other DNA
atgtgccaggggggtgattttacaagacacaacgggacaggcggtaagagtatttatggcgagaaattcgaagatgaaaatttcatcctaaagcacaccggacccggcatcctcagcatggctaacgcagggccaaacactaatggttcccagttttttatttgcactgcgaagacagagtggctggatgggaagcatgtggtgttcggcaaggtcaaagaaggtatgaacatcgtggaggcaatggagcgttttggcagcagaaacggcaagacatctaagaaaatcactattgctgactgtggacagctggaatag

SEQ ID NO: 128107 - DNA, 390 bp, synthetic construct
  misc_feature 1..390: note = Description of Artificial Sequence: Synthetic coding sequence
  source 1..390: mol_type = other DNA
atggtgaatccgacggtgttctttgatatcgctgtcgacggagaacccttgggcagagtgtcttttgagctcttcgccgacaaagtgccgaaaactgccgagaatttccgtgcactctccacaggcgagaagggctttgggtacaagggatcttgctttcacaggataatccccgggttcatgtgtcaaggtggtgacttcaccagacataatggcacaggcggcaagtcgatctgcacagcaaagacagagtggcttgatgggaaacacgttgtcttcgggaaggttaaagaggggatgaacattgttgaagcaatggagcgcttcggatcaaggaacggcaagacaagcaaaaaaattactattgccgattgcggccagctggagtag

SEQ ID NO: 128108 - DNA, 498 bp, synthetic construct
  misc_feature 1..498: note = Description of Artificial Sequence: Synthetic coding sequence
  source 1..498: mol_type = other DNA
atggtgaacccaactgtgtttttcgacatcgccgtcgacggagagcccctcggcagggtgtcgttcgagctgtttgccgacaaagtcccgaagaccgccgagaactttcgggcactgtctacaggcgagaaaggctttggctacaaagggagctgcttccatcgcatcattccaggatttatgtgccaagggggggattttacccgccacaacgggaccggagggaaaagcatctacggagaaaaatttgaagatgaaaactttatcctgaagcacacaggacctggaattttaagcatggcaaacgccgggcctaacacgaatggttcgcagttttttatttgtactgccaagacagagtggctggacggcaaacatgtggttttcgggaaagttaaagaggggatgaacatcgtggaggccatggagcgcttcggcagccgcaacgggaaaacctctaaaaagattacaatcgccgactgcggccagctggagtag

SEQ ID NO: 128109 - DNA, 495 bp, synthetic construct
  misc_feature 1..495: note = Description of Artificial Sequence: Synthetic coding sequence
  source 1..495: mol_type = other DNA
atggtgaattctgtggtctttttcgacatcactgtcgacggaaaaccattggggcgcattagcataaaattatttgctgataagatcctgaaaaccgcggaaaactttcgggccctgtcgacaggagagaaaggttttcgctataaggggagttgcttccacagaattatccccggcttcatgtgtcagggcggggacttcacacggcacaacgggaccggcgacaagtctatctatggcgaaaagttcgacgatgaaaatctcattcggaagcacacaggcagcggtatcctcagcatggcaaatgccggcccaaacacaaatggaagccagttcttcatttgtgcagccaagacggagtggcttgatggtaagcacgtagcttttggcaaggttaaagagagggttaacatcgtggaagctatggagcactttggttatcgcaactctaaaacttctaagaaaattactatcgcagattgcggccaattttag

SEQ ID NO: 128110 - DNA, 651 bp, synthetic construct
  misc_feature 1..651: note = Description of Artificial Sequence: Synthetic coding sequence
  source 1..651: mol_type = other DNA
atgctgcgcctgtcagaacgaaacatgaaggtgctactggctgccgcacttatagctggcagcgtgttctttctcctgctaccggggccaagcgctgccgacgagaagaagaagggcccaaaagtcacagtgaaggtctacttcgatctccgcatcggggatgaggacgttgggcgggtgatcttcggcctgtttgggaagactgtccctaaaactgtcgacaattttgtcgccctcgctactggcgaaaagggtttcggctataagaacagcaagtttcacagagttatcaaggattttatgatacaaggcggagattttacccggggcgatgggaccgggggtaagagcatctatggcgagaggttccccgacgagaacttcaaactcaagcattacggaccggggtgggtaagtatggctaacgccggtaaagacacaaatggatcacagttctttatcacgactgtgaaaactgcatggttggatggcaaacatgtcgtcttcggaaaggtcttggaaggcatggaagtggtgaggaaggtggaatccaccaagacggattctagagacaagccgctgaaggatgtgatcattgctgactgcggcaagatcgaggttgaaaagcctttcgctattgccaaagagtag

SEQ ID NO: 128111 - DNA, 639 bp, synthetic construct
  misc_feature 1..639: note = Description of Artificial Sequence: Synthetic coding sequence
  source 1..639: mol_type = other DNA
atgggtccaggacctcggctgctcttgcctttagtcttgtgcgtgggcctgggcgccttagtgttcagttctggcgctgaggggttccggaagagagggccttccgtcaccgctaaggtatttttcgatgttcgaataggggacaaagatgtcggcagaatagtgataggcttgttcggcaaagtggtgcccaagaccgtggaaaattttgtggctttggcgactggcgagaaaggctatggctataaggggtcgaagttccatagagtgataaaggactttatgatccaaggcggagacattacaactggtgatgggacgggtggggtgtcgatctatggagaaaccttccccgacgaaaatttcaagctaaaacactacggcattggttgggtctcgatggccaatgccgggccagatactaatggcagccagttcttcatcacacttaccaaacccacttggcttgatggtaaacatgtggtctttggcaaagtgatagatggtatgacagtggtgcactccatcgaacttcaggcaacagatggccacgacagacccctgaccaattgtagcataatcaattctggcaaaatagatgtcaagacaccgttcgtcgtcgaaatcgctgactggtag

SEQ ID NO: 128112 - DNA, 1113 bp, synthetic construct
  misc_feature 1..1113: note = Description of Artificial Sequence: Synthetic coding sequence
  source 1..1113: mol_type = other DNA
atgagccatcccagtccgcaggcaaaaccatccaacccgagcaacccacgcgtgtttttcgacgttgacattggcggcgagcgggtggggagaattgtattagagttgttcgccgatattgtcccgaagaccgcagaaaattttagagccctgtgtaccggtgagaagggcatcggacatacaactggcaagcccctgcattttaagggctgtccgtttcacagaatcatcaagaagtttatgatccaggggggggatttcagcaaccagaacgggaccggcggtgaatccatctacggagaaaaattcgaagatgaaaacttccactacaaacatgacagggaaggactcctgtccatggcaaatgccggacgcaatactaacgggtctcagttctttattactacagtccctactccacacctcgacggaaaacacgtagtgttcggtcaggttataaagggtatcggcgtagcaaggattttggagaatgtggaggtcaagggagagaagcccgctaaattgtgtgttattgccgagtgtggcgagctgaaggaaggggatgacggcggaatttttccaaaggacggatcaggggatagccaccccgattttcctgaagatgcagacatcgacctgaaggatgtggataagatccttcttatcacagaggacctaaaaaacatcggcaacactttcttcaaaagtcagaactgggagatggcgatcaagaaatacgctgaggttctgcgatatgtggatagcagcaaggcagtgatcgaaaccgcagatagggccaaacttcagcctatcgccctctcatgcgtgctcaacattggggcttgcaaacttaagatgtcaaattggcaaggagcgatcgactcttgtctggaggcgctggagctggatccctcgaataccaaagccctgtatcgcagggcccagggatggcagggcctgaaagaatacgatcaggcattagccgacctgaaaaaagcccaagggattgccccagaagacaaggccatccaggcggaactgctgaaggttaagcaaaaaattaaggcgcagaaagataaagagaaagccgtctacgcaaaaatgttcgcctag

SEQ ID NO: 128113 - DNA, 597 bp, synthetic construct
  misc_feature 1..597: note = Description of Artificial Sequence: Synthetic coding sequence
  source 1..597: mol_type = other DNA
atggacgccatcctgaactaccgctcagaggacactgaggactactacactctgctggggtgcgacgagctgagcagcgtggaacagattctcgctgagtttaaggtgcgtgctctggagtgccacccggataagcatcccgagaaccccaaggccgtcgagacattccagaaactacagaaagccaaggaaattctaaccaacgaagagtcacgcgcaaggtacgaccattggcgccggtctcagatgtctatgccgttccagcagtgggaggctctcaatgatagcgtgaaaacatcaatgcattgggtagttcgggggaagaaggaccttatgctcgaagagtctgataagacccacacgaccaaaatggagaacgaggaatgcaacgaacaacgcgagaggaaaaaggaagaattggcaagtaccgctgagaagacggaacagaaggaacccaaacctcttgagaagagtgtcagtcctcagaactctgattccagcgggttcgctgatgtaaatgggtggcacctccggtttaggtggtccaaagatgctccttctgagctgctgagaaaattcagaaattacgaaatttag

SEQ ID NO: 128114 - DNA, 468 bp, synthetic construct
  misc_feature 1..468: note = Description of Artificial Sequence: Synthetic coding sequence
  source 1..468: mol_type = other DNA
atgctagcccttagatgcggcagcaggtggctcggccttctgtccgtccccaggtcggtgcccctaagattgcccgcagcccgggcgtgttcgaaggggtcgggagacccttcttcatcctcttcttccggtaaccccctcgtctacctggatgttgacgctaacggtaagcccctcgggcgcgtagtgctggagctgaaagccgacgtggtacctaaaacggctgaaaattttcgcgccttgtgtacaggcgagaagggctttggctacaaaggcagtacctttcaccgggtgattccatcttttatgtgccaagcaggcgatttcacaaaccacaatggcacagggggcaaatcaatatacggttctagattccccgacgaaaatttcacactcaaacacgtcgggccaggatggatggcctccatgctctgcagtgttacctctaagcgggcgtggacaagttag

SEQ ID NO: 128115 - DNA, 498 bp, synthetic construct
  misc_feature 1..498: note = Description of Artificial Sequence: Synthetic coding sequence
  source 1..498: mol_type = other DNA
tagtcatcctcaagttcgtcaggcaaccctctcgtgtaccttgatgtggacgccaacggtaaacctttaggacgagttgtgctggaattgaaggccgatgtggtgccaaagaccgccgagaactttagagcgctttgcactggggaaaaaggatttggctacaaaggtagtaccttccacagggtgattccaagtttcatgtgccaggcaggagatttcaccaaccataacggaacaggcgggaagtcaatttacggcagtagattccccgacgagaatttcacgttaaagcatgttggtcctggagttcttagcatggctaacgctgggccaaatacaaacgggtcccagttcttcatatgtaccataaagactgattggagtatggcgttggacgacatagccctccactgctgcagtcctggcagccctgtgctgacggggtggatggcttcaatgctatgctcagtcacctctaagagggcttggacaagttag

SEQ ID NO: 128116 - DNA, 2265 bp, synthetic construct
  misc_feature 1..2265: note = Description of Artificial Sequence: Synthetic coding sequence
  source 1..2265: mol_type = other DNA
atggggattaaggtccagagacccagatgctttttcgacatcgcgatcaacaatcagcctgcgggtagggttgtgtttgaactgttcagcgacgtttgtccaaaaacgtgcgaaaactttaggtgcctctgtactggcgaaaaaggaacaggcaagtccacacagaaacctctgcactacaaatcttgtctgttccaccgagtggtgaaggatttcatggtccaaggcggcgacttttccgaaggcaacggaaggggaggcgagtctatctatggcggattcttcgaggacgagagtttcgccgtcaagcataacaaagaatttctccttagtatggctaatcggggtaaggacacaaacggaagtcagttctttattaccaccaaaccaacgcctcatctggacggtcatcatgttgtcttcggccaggtgatatcgggtcaggaagtggtgagagaaatcgaaaatcaaaagactgacgctgcatctaagcctttcgctgaagtcagaattctgtcctgtggagaactgattccaaaatccaaagtaaaaaaggaggagaaaaaacgccacaaatcaagttcgagctcttcctcaagctcatccgattctgacagcagctctgactcccagtctagctccgatagtagcgattccgaaagcgccacagaagagaagagtaagaagcggaagaagaagcacaggaagaattccagaaagcacaagaaggagaagaaaaagcgcaagaagtccaaaaaatctgcatccagcgagtcagaagctgaaaatctggaggcccaaccacagtctacagttagacccgaggaaattcctcctatccctgaaaaccgcttcttaatgaggaagtcccctcccaaggcagatgagaaggagaggaagaatagagaaagggaaagagaaagggagtgtaatccgcccaactcccagcccgcatcataccagcgaagattactggtgacacggagcggccgcaagataaagggtagaggacctaggagatacagaactccgtctagaagtcggagtagagatcgcttcaggcggtctgagacccctcctcactggcgacaggaaatgcagcgagctcagagaatgcgcgtctcatcgggtgagaggtggattaagggagacaagtcagagcttaacgagataaaggagaatcaaaggtctcctgtccgcgttaaggaacgcaaaattaccgaccacagaaatgttagtgaaagccctaaccgcaagaacgagaaggagaagaaagtgaaagaccataaatcgaacagcaaggaaagagatatccggaggaactctgagaaggatgataaatacaagaataaagtcaagaaacgcgccaagtctaagagtaggtctaagagtaaggagaaaagcaagtccaaggagagagattcaaaacacaaccggaatgaagaaaagcggatgcgcagccgcagcaaaggacgcgatcatgagaacgtgaaagagaaagaaaaacagtctgacagtaaaggcaaggaccaggagagaagccgcagcaaggagaaatctaaacaactggagtcgaaatcgaacgagcatgaccactcgaagtcgaaagagaaagacagaagagctcagagtaggtcaagagagtgcgacataacgaaaggtaaacacagttacaactcccgcaccagagagcgcagtaggagtcgagataggagccgacgagttaggagtagaacccacgatagggatagaagtaggtccaaggaatatcaccgataccgagaacaagaatacagacgaaggggaaggtctaggagccgcgagcggagaacccccccaggccgtagtaggagtaaagatcgacggaggcgccggagggattccagaagctcagagcgggaggagtcccagtcccggaacaaagacaagtatagaaaccaggaatccaagtcttctcaccgcaaagaaaattcagagtcagagaagcggatgtactccaagagccgggaccacaactcttctaacaacagcagggagaagaaggccgatcgggaccagtcccccttctctaagattaaacagagctcacaagataacgaacttaagtcctccatgttgaagaacaaagaggatgagaaaattaggagttccgtggagaaagagaaccagaaaagcaaaggtcaggaaaatgaccatgtgcacgaaaaaaacaaaaagttcgaccatgaaagctcacctggcactgatgaggacaaaagcggatag

SEQ ID NO: 128117 - DNA, 741 bp, synthetic construct
  misc_feature 1..741: note = Description of Artificial Sequence: Synthetic coding sequence
  source 1..741: mol_type = other DNA
atggggattaaagttcagaggccgagatgtttcttcgatattgctattaataaccagccagcaggacgcgtggtgtttgagctgttcagcgacgtatgccccaagacgtgcgaaaacttccggtgcctctgcacaggggagaaggggacaggtaaaagcacacaaaaaccactgcactataagtcttgcttgtttcatcgggtggtaaaggacttcatggtgcaaggcggagacttttctgaaggcaacggccggggaggggagagtatctacggggggtttttcgaagacgaatcttttgccgttaaacacaataaagagttcctcctgagtatggccaatagagggaaagatacaaacggctctcagtttttcatcaccacaaaacccaccccccatctggacggtcaccacgtggtctttgggcaagtgatttccggccaggaggtcgtcagggagattgagaatcaaaagacagacgccgcatccaagccatttgctgaagtacggatcctgagttgcggagaactgattcctaaaagcaaagtaaagaaggaggagaagaaacgccataaatcatccagctcctcgagcagcagtagctccgactccgacagctcatcagacagccagtcttcctccgattcatccgattccgaatccgctactgaggagaagagtaagaaacggaaaaagaaacaccggaaaaacagcaggaagcacaaaaaagagaagaaatag

SEQ ID NO: 128118 - DNA, 180 bp, synthetic construct
  misc_feature 1..180: note = Description of Artificial Sequence: Synthetic coding sequence
  source 1..180: mol_type = other DNA
atggggattaaggtgcaaagaccccgctgctttttcgacattgctatcaataaccagcccgccggccgggtcgtgttcgaactgttttccgacgtctgtcccaagacctgcgagaattttcgctgcctctgcacaggagaaaaaggtaccggtaagtccactcagaagcctctccattag

SEQ ID NO: 128119 - DNA, 2265 bp, synthetic construct
  misc_feature 1..2265: note = Description of Artificial Sequence: Synthetic coding sequence
  source 1..2265: mol_type = other DNA
atggggatcaaagttcagagaccacgctgtttcttcgatatcgcaatcaacaatcaacccgccggcagggtggtgtttgaactgtttagtgacgtctgcccaaagacctgtgaaaattttcgctgcctctgtaccggggaaaagggtaccggaaagtcaactcaaaaacctctgcattacaagtcctgccttttccacagggtggtcaaagattttatggtgcagggaggcgatttcagcgaaggtaacggccgcggcggtgaatcgatttacgggggtttctttgaggacgagagtttcgcagtgaaacacaataaagaattcctgctttctatggccaaccgcgggaaagacactaatggttctcagttctttattaccactaaacctacgccccatttggacggacaccacgttgtgttcggacaggtgatttctggtcaagaggtggttcgtgagatcgaaaatcagaagaccgacgccgcttcgaagccttttgcagaggtgaggatactaagctgtggggaattgatcccaaaatctaaggtaaaaaaggaggagaagaagcgtcacaagagttcaagctccagcagtagttcatcaagtgattccgactcctctagtgactcacagagctcctcagacagtagtgattcagagagtgctacagaggagaaaagtaagaaacgaaaaaagaagcacagaaaaaattccagaaaacacaagaaggaaaagaagaagagaaagaagtccaaaaagtcggccagctccgagtctgaggccgagaacctcgaagcccagccccagagcactgtcaggcccgaagaaatcccacctattcctgagaatcggtttctcatgcgcaaatctccacctaaggccgacgagaaagaaagaaaaaatagggagagagaaagggaacgcgagtgcaaccctccaaactcacagcccgcctcgtatcagaggcggttgcttgtgacccgctcaggacgaaaaatcaaggggcgggggcctcggcgctaccggactccttctagatcaaggtcacgagatcggtttagacggagcgaaacccctccacattggcggcaagaaatgcagcgggctcagaggatgcgtgtaagcagcggagagagatggataaagggagataaaagtgagcttaacgagataaaggaaaaccagcgttcccctgtgagggtcaaggagagaaagattacggatcataggaacgttagtgagtcccccaaccggaagaatgaaaaggagaagaaggtgaaagaccataagtccaattcgaaagaacgcgatattcggagaaacagcgagaaggatgacaagtacaagaataaggtaaaaaagcgcgctaagagcaaatcccggtccaaatccaaagagaagtctaaatcaaaagagagggattccaagcataaccgaaatgaagagaaacggatgcgttcccgaagcaaaggcagggaccacgagaacgtgaaagagaaggagaaacagagtgatagcaagggcaaggatcaggaaaggtcaagaagcaaggagaagtcgaaacagcttgagagcaaaagcaacgagcacgaccattctaaaagcaaagagaaggataggagggcacagtcacggtccagagagtgtgacattaccaaaggaaaacattcatataactcacgcactagggaaagaagccgtagccgtgaccggagcaggcgtgtgaggtccagaacccatgaccgcgatagatctcgttcaaaagagtatcaccggtacagggagcaggagtatcggcggagggggagatctaggtcacgggaaagaaggactcctcctggtaggtcccgctcaaaagataggaggcgcagaaggagggattctaggtcttccgagagagaagaatctcaatctcggaacaaagacaagtatcgaaatcaggagtctaaaagctctcatcgcaaggagaactccgagtcagagaagcgcatgtattcaaagtcccgcgaccataactctagtaacaactcaagggaaaaaaaagccgatagagatcagtcccctttcagcaagattaaacagtccagccaggataacgagctgaagtcttctatgcttaagaacaaggaggacgagaagattcggtcatcggtcgaaaaggaaaaccagaaatctaagggccaggaaaacgaccacgtgcacgagaagaacaaaaagttcgatcatgaaagctctcctggcacagatgaagacaagtctggctag

SEQ ID NO: 128120 - DNA, 1347 bp, synthetic construct
  misc_feature 1..1347: note = Description of Artificial Sequence: Synthetic coding sequence
  source 1..1347: mol_type = other DNA
atgggtattaaagtgcagaggccccgctgttttttcgatattgctattaataaccagccagctggacgcgttgtatttgagctgttttcagatgtctgccccaagacatgcgagaattttaggtgtctgtgtaccggcgagaaagggacagggaaatcaactcagaaacccctccactacaaatcatgtctcttccatcgagtagtgaaagattttatggtacagggtggtgacttcagcgaggggaacgggagagggggggagtccatatatggcggattttttgaggacgagtcattcgccgtcaaacataacaaggaattcctgctctctatggccaaccgggggaaggacaccaacggcagccaattttttataaccacaaagccaacgcctcatctcgatgggcaccacgtggtcttcgggcaggtcataagcggccaggaggtggtacgggagatcgaaaatcagaagacggatgctgcctccaagccttttgctgaggtgagaatcctgtcatgcggagagctcatcccaaagagcaaagtgaagaaggaggagaagaagaggcataaaagctccagctctagttcctccagctcaagcgacagtgacagctcctccgactcccagagctcttccgatagttccgatagcgaatcggcaaccgaggagaaatctaaaaaacggaagaagaagcataggaagaactcaaggaaacacaagaaagaaaagaagaaaagaaagaagtcaaaaaaatccgccagcagtgaaagcgaggccgaaaacttggaggctcagccacagtccaccgtaagaccagaggaaatcccccccattccagagaacagattcctgatgcgaaagtcccctcccaaggcggatgagaaggagaggaagaaccgggaacgcgaaagggagcgcgagtgtaacccaccaaattcgcagcccgcttcatatcagaggcgcctactggttactaggagcggaaggaagattaagggccgtggccctagacgatatcgcacacctagccgcagccgctcccgtgatcgcttccgacggtcggaaacaccaccacactggcgccaggagatgcagcgggctcaaagaatgagagtctcctcaggagaaagatggatcaagggtgataagtccgagctgaacgagatcaaagagaaccaacgcagccccgtgcgggtaaaagaacggaaaattacagatcaccggaacgtctctgaaagccccaaccgaaaaaatgagaaggaaaaaaaggtgaaggatcacaagtccaatagcaaagagcgcgacatcaggaggaaaaaaaaaaagaagaaaaagaagtag

SEQ ID NO: 128121 - DNA, 534 bp, synthetic construct
  misc_feature 1..534: note = Description of Artificial Sequence: Synthetic coding sequence
  source 1..534: mol_type = other DNA
atggccgtcgcgaactccagccctgtgaacccagtagttttcttcgatgtaagcattgggggccaggaagtcggaaggatgaagatcgagttgttcgctgacgtcgtacccaagactgccgagaacttccggcagttctgtaccggggagtttcgcaaggacggggttcccataggatacaaaggcagcacttttcatcgggtgattaaggatttcatgatccaaggcggcgattttgttaacggtgatggcacaggggtcgctagtatctaccgcggtccttttgccgacgaaaactttaagctgcgccactccgccccaggactgcttagtatggcaaacagcggcccttctacaaacggctgtcagtttttcatcacctgcagtaaatgtgattggctggatggaaagcatgtggtcttcggaaagatcatcgatgggctgctggtaatgcgaaaaatagagaacgtgcccaccggacctaacaataagccaaagttgccagtggttatctctcaatgtggggagatgtag

SEQ ID NO: 128122 - DNA, 174 bp, synthetic construct
  misc_feature 1..174: note = Description of Artificial Sequence: Synthetic coding sequence
  source 1..174: mol_type = other DNA
atgaaaattgaactgtttgcggatgtggtccccaaaacagcagaaaacttccgccaattctgtaccggggaattccgatcagtgtcagacgtattcgacttcttcgcctgctcgcgtggggtgttttggggatgcagtgaaggtataggagaaccacccgcgggcctggagtag

SEQ ID NO: 128123 - DNA, 405 bp, synthetic construct
  misc_feature 1..405: note = Description of Artificial Sequence: Synthetic coding sequence
  source 1..405: mol_type = other DNA
atgatcgctggcgactctgacagaaggaaggatggtgtaccgatcggctataaaggaagcacatttcaccgtgtgattaaggacttcatgatacagggcggcgactttgtgaacggcgacggtacgggtgttgcatccatctaccgcggcccttttgccgacgaaaatttcaagttgcgtcattcggctcccggcctgttgtcgatggccaacagtggcccaagcaccaacggttgccagttctttattacctgtagtaaatgcgactggctggatgggaagcacgttgtatttgggaagattatcgatggactccttgtcatgcggaaaatagaaaacgtgccaaccggaccaaataataagcccaagctgcctgttgttatttctcaatgcggagagatgtag

SEQ ID NO: 128124 - DNA, 207 bp, synthetic construct
  misc_feature 1..207: note = Description of Artificial Sequence: Synthetic coding sequence
  source 1..207: mol_type = other DNA
atggttaattggaagggtttggtgctccctgcagtcactccctccctctttctttttggctaccgcaaagacggggtccctataggatacaaaggcagcacattccaccgggtgattaaggattttatgatccagggtggggacttcgtgaatgtctctactatcccattcctgtcgaaaaccagatctttctccttctgctgttag

SEQ ID NO: 128125 - DNA, 435 bp, synthetic construct
  misc_feature 1..435: note = Description of Artificial Sequence: Synthetic coding sequence
  source 1..435: mol_type = other DNA
atgaagatcgagttatttgccgatgtggtgccgaaaacagctgaaaatttccggcagttttgtaccggcgagtttcggaaggatggcgttcctataggttacaagggaagcacatttcatagggtgatcaaggactttatgatccagggcggagactttgtgaacggagacggcaccggcgtggcgtctatctatagagggccatttgctgatgagaacttcaagctacggcactccgccccagggctgctgagtatggccaactctggtccctctaccaacgggtgccagttttttattacttgctcaaagtgtgattggctcgatggtaagcatgttgtgttcggaaagatcattgacggcctccttgtaatgcgaaagattgagaacgttcctacggggccaaacaataagccaaaactaccggtagtgtag

SEQ ID NO: 128126 - DNA, 405 bp, synthetic construct
  misc_feature 1..405: note = Description of Artificial Sequence: Synthetic coding sequence
  source 1..405: mol_type = other DNA
atgatcgccggcgacagtgaccggagaaaggatggggtgcccatcggctacaaagggtccactttccacagagtgattaaggactttatgattcagggcggagattttgtaaacggcgatggcactggggtagcttcgatctacagggggccctttgcagacgagaattttaagttaaggcactcggcaccaggactcctctctatggccaacagcggcccttccacgaatgggtgccagttcttcattacatgttcaaaatgcgactggctggacggaaagcatgtggtttttggcaagatcatcgacggcttgctcgttatgcgtaaaattgaaaacgtccccactggcccaaacaataaacctaaactgccggtggtaattagccagtgcggcgagatgtag

SEQ ID NO: 128127 - DNA, 540 bp, synthetic construct
  misc_feature 1..540: note = Description of Artificial Sequence: Synthetic coding sequence
  source 1..540: mol_type = other DNA
atgccctctaagtcgctagtcatggaatatctcgcccatccatcgacattgggtctcgccgttggtgttgcatgcggcatgtgccttgggtggagcctgcgagtctgcttcggaatgctgccaaaaagtaaaacttctaaaactcacacggatactgaatctgaggccagcattttgggagacagtggcgagtacaaaatgattctcgtggtgcggaacgatctgaagatgggcaaaggcaaggtcgccgcccagtgctctcatgccgctgtctccgcttacaagcagatccagaggcggaaccccgagatgctgaagcagtgggagtactgtggtcagccaaaggtagtcgtaaaagccccggatgaggagactctgatcgccctgctggcccacgcaaagatgcttgggcttaccgtgagcctcatccaggacgcagggagaacccagattgccccagggagtcagacagtgctaggcatcggtcctgggccggccgatctcattgataaggtaactggccatctgaaactgtactag

SEQ ID NO: 128128 - DNA, 543 bp, synthetic construct
  misc_feature 1..543: note = Description of Artificial Sequence: Synthetic coding sequence
  source 1..543: mol_type = other DNA
atgatgccgagcaagagcctggtgatggaatatctcgctcacccatccacactgggcttggccgtgggtgtggcatgtggcatgtgcctcggctggagcctgcgggtttgttttgggatgcttcctaaatcaaagacctcaaagacccatacagatacagaatcagaggccagtatcctcggagacagtggggagtataagatgatactggtggtgagaaacgacctcaagatgggcaagggtaaggtggctgcacaatgttctcatgctgccgtgtccgcttataagcagattcagcggcgcaatcctgagatgcttaagcaatgggaatattgcggtcagcccaaagtggttgtgaaagcaccagatgaagagactctgatagccctgcttgctcatgctaaaatgttaggcctgacggtgagcctcatacaagacgctggccgtactcagatcgcccctgggtcacaaaccgtcctcgggatcggacctggccctgcagacctaatcgacaaggtcaccggccacctgaagctgtattag

SEQ ID NO: 128129 - DNA, 540 bp, synthetic construct
  misc_feature 1..540: note = Description of Artificial Sequence: Synthetic coding sequence
  source 1..540: mol_type = other DNA
atgccatccaagtctcttgtgatggaatacctggcacacccttcaactttggggcttgctgtgggagtggcatgcggaatgtgtctgggatggtccctccgggtttgtttcggaatgctcccaaaaagcaagaccagcaagacccacacggataccgaatccgaggcttcaatccttggtgacagtggggaatataaaatgatcttagtcgtgagaaacgatttgaaaatgggaaagggtaaagtcgccgcacagtgtagccacgctgccgtgtcggcatacaaacagattcagaggcgaaacccggaaatgctgaaacaatgggagtattgcggacagcccaaggtcgtcgtaaaggcccccgacgaggaaactcttatagcccttctggctcatgccaaaatgttaggccttacagttagtctgattcaggatgccggcaggactcaaattgctccggggagtcagacggtcctgggaatcggccccggcccagccgatctgatcgataaggtaaccggtcatcttaaactgtactag

SEQ ID NO: 128130 - DNA, 1668 bp, synthetic construct
  misc_feature 1..1668: note = Description of Artificial Sequence: Synthetic coding sequence
  source 1..1668: mol_type = other DNA
atggccgctagattgttactgttgggcattcttctcctcctgttgcccctacccgttccagctccctgccacacggccgccagatcagagtgtaagagatcccacaaatttgtgccaggtgcctggttggctggggagggcgtggatgtaactagcttgcgcagatccggttctttccctgttgacacacagcgctttttgcggcctgatggtacgtgtacgctttgtgagaatgcacttcaggaggggacattacagcgtctgccactggccctcactaattggagggcacaggggagcggctgtcagagacacgtgaccagggccaaagtctcatcaaccgaggcagtcgccagagacgccgcacggagcattcgcaatgattggaaggtgggccttgacgtgacacccaagccaacatcgaacgtccatgtgtccgtggccggtagtcactctcaggcagctaatttcgccgcacaaaagacgcaccaagaccagtactcttttagcacagacacagtagaatgccggttttactctttccacgtggtacatacacccccactgcaccccgatttcaagcgagcactcggcgacctgcctcatcacttcaacgctagcacgcagccggcttatctgagattgatctcgaactatgggacacactttatccgcgccgtcgagctgggcggtcgaatcagtgctctgaccgctctgagaacgtgcgagctggccctggagggcctgaccgacaacgaggtagaggattgcctcacagtggaggcccaggtgaatatcgggatacacggctctatatctgccgaggccaaagcatgcgaagagaaaaaaaagaaacacaagatgactgcaagctttcatcagacataccgggagcggcacagcgaggtggtgggcggtcatcacacctccatcaacgatctgttattcggtatccaggctggcccagagcagtactcggcctgggtgaattccctgcccggctctccggggctcgtggattatactctcgagccgctgcacgttcttcttgactcacaggatcccaggcgagaggccctaaggcgggcactttcacaatatctaacagatcgcgccaggtggagggactgttccagaccgtgtcctccgggcagacagaagagcccccgagacccttgccagtgcgtgtgccacgggagcgcagtcacaactcaggattgttgtccgaggcagcgggggcttgcacaactggaggttacgttcattcaggcatggggactctggggcgactggttcaccgcaactgatgcttacgtcaagttattttttggaggccaggaactgcggaccagtaccgtatgggacaataacaatcccatatggagtgtgcggctcgattttggagacgtgctgctggcgaccgggggcccactgcgacttcaggtgtgggatcaagacagcggcagggacgatgacctgctcggcacctgtgaccaggcccctaaatcggggtctcatgaagtccggtgtaacttaaatcacgggcacctgaaatttcgttatcatgcacggtgtctcccccacctgggcggcgggacgtgtctggattatgtaccccagatgcttctcggagaaccccctggaaaccgtagcggtgcagtgtggtag

SEQ ID NO: 128131 - DNA, 1668 bp, synthetic construct
  misc_feature 1..1668: note = Description of Artificial Sequence: Synthetic coding sequence
  source 1..1668: mol_type = other DNA
atggccgcaaggttattactactggggatactgcttctactactcccattgcccgtgccggctccatgccatactgccgcccgttccgagtgtaaacgttctcacaaatttgtgcctggtgcctggctggctggcgagggagtagatgttacttccctacggcgtagcggctcttttcctgtcgacacacaaagatttctgcgaccagacggcacttgcactctgtgcgagaatgcattgcaggagggtactctccagcgtttgcccctggccttaacaaactggcgtgctcagggctcagggtgccagcgtcacgtgacgcgagctaaagtgagctctactgaagccgtggcacgggatgctgcccgcagcattaggaacgactggaaagttggcctggatgtgactcccaagcccaccagtaacgttcatgtatctgtcgccggcagtcattcacaggccgcaaacttcgcggcccagaagacccaccaagaccagtactcgttttccactgacacagtcgaatgcaggttctacagcttccacgtagtgcacactcctcccctccaccctgacttcaaaagagcactgggagatctgccccaccatttcaacgcctccacacagcccgcctacttgagactcataagtaactacggtacccattttattcgagcagttgagctcggagggcgaattagcgccttgaccgcactgcggacctgcgaacttgcgctagagggactgacggacaacgaggtagaggattgcctgactgtcgaagcgcaggtaaacattggaattcacggcagcatctccgccgaagcaaaggcatgtgaggaaaagaagaagaagcataaaatgaccgcctcctttcaccagacctatcgcgaaagacattctgaggtcgtgggaggccatcatacatctattaatgatctgttgtttggaattcaggcgggacccgagcagtatagtgcttgggtgaactctctgcctggatctccaggcttggtcgactacacactcgagcctctacacgtgctgttagatagtcaggacccgaggagggaagcacttcgccgagcactgtcccagtatttgactgaccgggcacgttggagagattgttcccgtccttgtccccctgggcgccagaaatcacctagagacccatgccagtgtgtttgtcatggctctgctgtgactacacaggactgctgcccgaggcaaaggggcctagcccagcttgaggtgacctttattcaggcctgggggttgtggggcgactggttcaccgccacagatgcttatgttaagttattttttggcggtcaggagctgcggacaagcacggtgtgggacaacaacaatcccatatggtccgtcagactggatttcggggacgtactcctcgccacaggtgggccactgaggttgcaagtttgggaccaggattctggccgtgacgatgacttgctgggaacctgcgatcaagcccccaagtccggtagccatgaggttcgctgcaacctgaatcacggtcacctgaagtttagataccatgctcgctgcctgccccatctaggcgggggaacgtgcctcgactacgtgccgcagatgttgctgggcgaacctcctggtaaccgaagtggcgccgtgtggtag

SEQ ID NO: 128132 - DNA, 1668 bp, synthetic construct
  misc_feature 1..1668: note = Description of Artificial Sequence: Synthetic coding sequence
  source 1..1668: mol_type = other DNA
atggctgcccgtctactgctcctgggcatcctcctccttcttctgcccttaccagtcccagctccctgtcacactgcagccaggagcgagtgtaaacggagtcacaagtttgtgcccggagcctggttggcaggcgaaggggtggacgtaacatctctcagacgctcgggctctttcccagtggatacgcagaggttcttacgaccagatggcacttgcactctatgtgaaaacgcactgcaggaagggactctgcaaaggctaccccttgctctgaccaactggcgtgcccagggctcaggttgccagcgtcacgtcacaagggcaaaagtgagctctaccgaagctgttgcacgagacgctgcacgctctatcaggaacgattggaaggtagggctcgacgtaacccccaaaccgaccagcaacgttcatgtttccgttgcaggaagtcacagccaggccgccaattttgctgctcaaaagacccatcaggatcagtacagtttctccaccgacacggtagaatgtaggttctatagttttcacgtagttcacacgccccctttacatcccgattttaaacgagcgctgggggatctgcctcatcatttcaatgcgtcaacacagccagcctatctccggctgatctccaattacgggactcacttcattagggctgtcgaactgggtgggaggatcagtgcgctcactgcgctcagaacttgtgaactggctctggaaggcctgactgataacgaagtcgaagattgcctcacagtagaggcgcaggtaaatatcggaattcatgggagtatatccgcagaagctaaagcatgcgaggaaaaaaagaagaagcataagatgacagccagtttccaccagacttaccgcgaacggcactctgaagtcgtcggcggccaccatacctccatcaacgacctcctatttggcatccaggcaggcccggagcaatacagcgcttgggtgaattcactcccaggcagcccgggcttggtagactacacactggaaccgctgcatgttctgctagacagtcaagacccccgaagggaggccttaagaagggcgctatcccaatatctcaccgatcgtgctcgctggagagactgttcaagaccttgcccgccaggacgacagaaatcccctcgggacccgtgccaatgtgtatgccatggatcggccgtgacgacacaggactgttgtccgcgtcagcgcggcctagcccagcttgaggtcacatttatacaggcttgggggctgtggggtgactggtttaccgcaacggacgcatatgtgaaactcttctttggcggacaagaactccgcacaagcaccgtctgggacaataacaaccccatttggagcgtgcgccttgacttcggcgatgtactgctggccacgggcgggccactccgcctgcaggtgtgggaccaggactcgggtcgtgatgatgacctcctgggaacatgcgatcaggcaccaaagtctgggtcccacgaggtgcgctgtaacctaaaccacggccacttgaagttccggtatcacgcaagatgccttccacacctgggcggtggaacatgtctggactacgtgccgcagatgctgctgggcgaacctcccgggaacagaagcggagccgtgtggtag

SEQ ID NO: 128133 - DNA, 444 bp, synthetic construct
  misc_feature 1..444: note = Description of Artificial Sequence: Synthetic coding sequence
  source 1..444: mol_type = other DNA
atggaggctaggtctcggagtgctgaggagctgcggcgggccgagctcgtggaaatcattgtcgaaactgaggctcagaccggagtgtcaggcataaacgtggcggggggtggcaaggaaggcatcttcgtgagagagctgagagaagactctccggctgccagaagcttgtcgctgcaggaaggcgaccagctcttgtcagccagagtctttttcgagaacttcaaatatgaagacgcactaaggctacttcagtgcgccgaaccatacaaggtttcattttgtctgaaacgtaccgtacctacgggggacctcgctctcaggccaggaactgtgtctgggtacgagattaagggaccccgcgcgaaggtggccaagctggtgagggtgttgagccctgcgcccgccttggattgcccaagcgatcctgtgagcgctccctag

SEQ ID NO: 128134 - DNA, 4386 bp, synthetic construct
  misc_feature 1..4386: note = Description of Artificial Sequence: Synthetic coding sequence
  source 1..4386: mol_type = other DNA
atggaggcgaggtctagaagcgccgaggaacttcgccgcgcggagctggtggaaatcatcgtagagactgaggcccaaacaggcgtctccggaataaatgtggccggaggagggaaagaaggaatcttcgttcgtgaactccgcgaggattcacccgcagcgcggtccctgtctctccaagaaggggatcagctcttaagcgcccgcgtcttctttgaaaacttcaaatacgaagatgcactgcggctgctccaatgcgctgaaccttacaaggtgtccttctgtctgaagaggactgtgccgaccggggacctggctttgcgccctggtactgtttccggatacgagatcaaaggcccccgggccaaggtggcaaaactgaatatacagagtctctctccagttaaaaaaaagaaaatggtgccaggcgctctcggagtgccagccgacttagcacccgtggatgtcgagtttagcttccccaagttcagccgccttcgtcggggactgaaagctgaggccgtgaagggtcccgtccccgccgcccctgcgagacggaggttacagctgccacgcttacgagtgcgggaagtggcagaagaggctcaggctgctcggctggccgctgcggcccccccaccccggaaagctaaggtcgaagctgaagttgccgccggcgctaggttcacggcaccacaggtcgaacttgtcgggcctagactgcccggcgcggaagtgggggtgccacaggtgtcggcccctaaggcagccccgtccgccgaagccgccggggggttcgccctacacctgcccactctgggtctcggagcccccgcgccccccgcggtcgaagcacctgctgttgggatacaagtacctcaggttgagctgcctgcactgccgagtttgcccactctccccaccctcccgtgccttgagaccagggaaggcgcggtctctgtcgtcgttcctacgctggacgtagcagcaccaaccgtgggagttgacttggcgctacctggagcggaggtggaagcacggggtgaagctcccgaggtggccctgaagatgccaagattaagtttccctaggttcggggccagagcaaaagaagtcgcggaggcaaaagtggcaaaggtgagccccgaggcccgggtgaagggccctaggttgcgcatgcccacgttcggattatctctgctagagcccaggcctgctgcccccgaggtcgtcgaatcaaaactaaagttaccaacaatcaagatgccctccctgggcatcggggtgagtggccccgaagtgaaagttccgaaaggacccgaagtgaagttgcccaaagcaccagaggtgaaactgcccaaggtccccgaggccgcactgcctgaggtgcgactgcctgaggtagaactgccaaaggttagtgaaatgaagttgccaaaagtgccggaaatggcagtccctgaggttagactgcccgaggttgagttgcctaaagttagtgagatgaagttaccaaaagtccccgaaatggccgtgcccgaggtcaggctaccggaggttcaattgctgaaggtctccgagatgaagcttcctaaagtgccagaaatggccgtacctgaagtgcgcctacctgaggttcaactgccaaaagtctcagaaatgaaacttccggaggtctcggaggtggccgtgcccgaggtgaggctccctgaagtgcagctgcccaaggtgcctgaaatgaaggtaccagagatgaagttgcctaaggtccccgaaatgaaactgcccgagatgaagcttcctgaagtccaacttcccaaggtcccagagatggctgtgcccgatgtccacctgccagaagtgcagttgcccaaggtgcccgaaatgaaactcccggaaatgaagttacccgaagtgaaactgccaaaagtgccagaaatggcagtccccgatgtgcatctgcctgaggtgcaactgcccaaggtcccagaaatgaagcttcccaaaatgccagagatggccgtccctgaggttcgcctaccagaggtacagctgccaaaggtgagcgagatgaagctccctaaagtcccggagatggcagttcccgacgttcacctcccagaagtgcagttgccaaaagtgtgcgagatgaaggtaccagacatgaaacttcctgaaatcaaactgcctaaagttcccgagatggccgttccagacgtccatcttcccgaggttcaattacccaaagtgagcgagatccgattacctgagatgcaggtgccaaaagtgcctgatgtgcacctgccgaaagcccctgaggtcaaactacctagggcacctgaagtgcagctcaaggctacgaaggctgaacaagccgaaggtatggagttcggctttaagatgccaaaaatgacaatgccaaaactgggccgcgcagagtccccctctagaggcaaacccggggaagccggagccgaggtgagcggcaaactggtcaccctgccctgccttcagcctgaagtggatggagaggcacatgtcggcgtcccctctctgacgttgccatctgtggaactggatttacctggggccctgggtttgcagggacaggtgcctgccgccaagatgggcaaaggggagcgggtggagggcccagaggtcgctgccggtgtacgggaggtaggtttccgcgtgccaagcgtagagatcgtgacaccccagcttcctgccgtggagatcgaggaaggaagactcgagatgatcgagacaaaggtcaagccctcaagcaaattttccctccctaaatttgggctcagcggtccgaaagtcgctaaggcagaagcggagggcgccggaagagcaacaaagctgaaggtgtcaaagtttgctataagcctgccgaaagcccgcgtgggggcggaggcagaggcaaaaggcgccggtgaggctggtctgttacccgccctggaccttagtatcccacagcttagcttggatgcacacttgccgtcaggcaaagttgaagtcgctggcgcagacctgaagttcaaaggcccccgcttcgcgctgcctaagttcggggttagggggcgggataccgaagccgcagagctggtaccaggagtagccgagctggagggcaaggggtggggctgggacgggcgcgttaagatgcctaaattaaagatgcctagctttggactcgcccgcggcaaagaagccgaggttcaaggtgatagagcaagcccgggtgaaaaagctgagtcgacagctgtgcagctgaagattcccgaagtcgaactggttacgctcggcgcgcaggaggaaggccgtgcagagggcgccgttgccgtgagcggcatgcagctatctggactgaaagtgtcaaccgcaggacaggtggtgaccgagggacatgatgccggactccgcatgcccccgctaggcatctccctcccacaggtggaactcactggattcggtgaggcaggtaccccaggccagcaagcgcagtcaactgtgccttcggcagaaggcactgcagggtatcgcgttcaggtaccgcaggtaactctgtctctgcccggagcgcaagtggccggaggcgagctcctggtcggagaaggcgtctttaagatgccaaccgtgacagtgccacagctcgagctggatgtgggtttatctcgagaagcccaggctggagaagctgcaactggtgagggcggcctacggctaaaactgccaacgctcggagccagagccagagttgggggtgaaggcgccgaagagcagccaccaggcgctgagaggacattttgtttgagcctccctgatgtggagctgtctccgtcggggggcaatcacgcggagtaccaggtggccgagggtgagggcgaagcaggtcacaagctaaaggtgcggttgcccagattcggcctcgtccgcgccaaagaaggagctgaagaaggagagaaggcgaaatcaccaaaattgcgacttccacgggtgggattctcccagtccgaaatggtcaccggggaaggaagtccaagtcccgaggaggaagaagaggaggaggaggagggttccggggagggggccagcgggcggcgaggaagagtcagagtgcggctaccacgggtaggcttggccgcaccctccaaggcaagcaggggacaggagggggatgcagcaccaaaatcccccgtgagagaaaagtctccgaagttcagatttccacgggtcagcctcagtccaaaggcccgctccgggagtggggaccaggaagagggcgggctgcgtgtgagactcccatctgtgggattctccgaaaccggggcccctggtccggcaaggatggaaggcgcccaagctgccgctgtttag

SEQ ID NO: 128135 - DNA, 4191 bp, synthetic construct
  misc_feature 1..4191: note = Description of Artificial Sequence: Synthetic coding sequence
  source 1..4191: mol_type = other DNA
atggaagcccgcagcagaagcgctgaggagttaaggagagcggagttagtggaaatcatcgtagagactgaggcccaaaccggagtgagcggcatcaacgtcgctggaggcggaaaagaaggcatctttgtgcgtgaactcagagaggactccccagcagcgcgaagcctctctttgcaggagggtgaccagctgctgtctgcacgggttttttttgaaaatttcaagtacgaggatgccctgaggcttctgcagtgtgccgaaccgtataaagtatcgttctgcttgaaaagaaccgtacctacgggggatctggccttgagaccaggaacagtatctggctacgaaattaaaggcccgagagctaaagttgccaagttgaacatacaatcactaagtccggtcaagaagaagaagatggtgcctggggcattaggggtgcctgcagacctcgcaccagtggatgtggaattcagcttccctaaattttctagacttaggcgcggacttaaagcggaggccgtcaagggccccgtccccgcggccccagccagaaggcggctgcagcttcctaggcttcgcgtacgcgaggtggccgaagaggcgcaggcagcgcgactggccgccgctgctcccccccccagaaaagccaaggtggaggctgaggtggcagcaggggcaaggttcaccgcccctcaggttgagctagttggaccccggttacccggcgctgaggttggagtgccccaagtgtcagcccctaaggcagccccatcggcagaagctgcgggcggattcgccctgcacctgcccacgctcgggctcggcgcaccagcaccccctgctgtggaggcacccgctgtagggattcaagttccccaggtcgaattgcctgcgttgccgtccctgccaaccctacctaccctgccatgtcttgaaacccgagagggagcagtgtcagtcgtcgtgcccacgttggacgtggctgcgccgacagttggtgtcgacctggcactccccggcgccgaagtcgaagcccgcggggaggcccctgaggtcgcccttaagatgccacgcctctcgtttcctcggttcggggcacgggcaaaggaagtggccgaagcaaaggtagccaaggtctctccagaggccagggtgaaggggcctagattaaggatgccaactttcgggctgtctcttctcgagccccggcccgctgcccccgaggtcgtggaaagtaaattgaaactccccactattaaaatgccaagcctcggtattggcgtgagcggccccgaggtcaaagtgcccaagggacccgaggtgaagctccctaaggcccccgaagtcaaacttcccaaggttcctgaggcagcattgcccgaggtccggcttcctgaggttgaattacctaaggtgtctgagatgaagctgcccaaggtaccagaaatggccgttcccgaagtacgacttcccgaggttgaattaccaaaggtgagtgaaatgaaactgcccaaagtccccgagatggctgtcccggaagtgagactccctgaggttcagctgttgaaagtcagtgagatgaagctaccaaaagtgccagagatggccgtgcccgaggtacggctgccggaagtgcagctcccgaaggtcagcgagatgaaactgcctgaagttagcgaagtggccgtgcctgaggtcagacttccagaagttcaacttccaaaggtgccggaaatgaaagtgcctgagatgaaactgccgaaggtgccagaaatgaagctgccagagatgaaattgcccgaggtccagctacccaaagtcccggaaatggctgtcccagacgtgcatctcccagaagtccagctgccaaaagtcccggagatgaaactgcctgaaatgaagctaccggaggtgaagctcccaaaggtgcctgaaatggctgtccccgacgtgcatcttccggaagtgcagctgcctaaagtgcctgagatgaagctacccaaaatgcctgagatggccgtgcccgaagttcggttgcccgaagtccagctccccaaagtctctgagatgaagctgcctaaggtccctgaaatggctgtcccagacgttcatctgcctgaggtgcagctgccaaaggtgtgtgagatgaaggttcccgacatgaagctccctgagattaaactccccaaagttcctgaaatggctgtgcccgatgtccaccttcctgaagtgcagttgcctaaggtcagcgagatcaggttgcccgaaatgcaagtgcctaaggtgccagatgtgcacctgcccaaagctccggaagtgaaactgccaagagcacctgaggtgcagctgaaagctacgaaagcagaacaagctgaaggaatggaatttggtttcaagatgcccaagatgaccatgccgaaactggggagagccgagtctccatcccgcggaaaaccaggggaagccggggccgaagtatccggcaagctggtcactctgccctgtcttcagccagaagtggacggagaggctcacgttggggtaccatccctcaccctccccagtgtggaactggatctaccaggtgccctgggtctgcagggacaagtgcctgctgctaagatggggaaaggagagagggttgaaggacccgaggttgccgccggcgttcgagaggtgggattcagagtaccttcagtggaaatagtgaccccacagctccccgccgtcgagatcgaggaaggtagactcgaaatgattgagactaaagttaagcctagtagcaaattttctctgccgaagttcggactctctggcccgaaggtggcaaaagccgaggccgaaggcgccgggagggcgacaaaactgaaggtgagcaaattcgccatatctctgccaaaagccagagtaggcgctgaggcggaagctaagggtgccggagaggcaggattgcttcccgccctcgatttgtctattccccagctgagcctggatgcgcatttgccatcaggtaaagtggaagtcgccggcgccgacctaaagtttaaagggccaagatttgcgctgccaaaattcggagtacgcggccgggataccgaagccgcagagcttgtgccaggcgtggccgagctcgaagggaagggatggggttgggacggacgcgtcaagatgccgaagctaaaggtttctactgctgggcaggtggtcaccgagggtcacgacgctggcctgagaatgcccccattgggaatttccttgccacaagtagagttaacaggcttcggggaggccggaacaccgggtcagcaggcccaatccacagttcccagcgcggagggtaccgctgggtatcgggtccaagtcccccaagtgactttgagcttaccgggggcccaggttgcaggcggcgaactattagtgggcgaaggcgttttcaagatgcccacggtcacagtgccacagctggagctggacgtggggctgtcacgggaggcacaggccggggaagctgccacaggggagggcggcttgaggctcaagctgcccactttaggcgctagggccagggtggggggggaaggcgccgaagagcagccccctggtgcagagcgcaccttctgcctgagcttgcccgatgtcgagctctcaccctctggcggcaatcacgctgaataccaggtggccgagggagaaggcgaggcagggcataaactgaaagtgcgcctaccacggttcggactcgtccgcgccaaggaaggcgctgaagaaggtgaaaaggctaagtcccctaagcttaggctgccccgggtaggcttcagccagagtgagatggttacaggtgagggaagcccgtcccctgaggaggaggaagaggaagaggaagaagggagtggggaaggcgcttcggggcggaggggcagggtcagagtgcgcctaccacgggtggggctggcagctccctctaaggccagccggggccaggaaggagatgccgctcccaaaagccccgtgcgggaaaagtccccgaaattccgttttcccagggtaagcctgtcaccaaaggctagatcggggtccggagaccaggaggagggggggctgcgggtgagactgcccagcgtgggtttctctgagacgggagccccgggaccagcccgaatggaaggcgctcaagctgccgccgtgtag

SEQ ID NO: 128136 - DNA, 2214 bp, synthetic construct
  misc_feature 1..2214: note = Description of Artificial Sequence: Synthetic coding sequence
  source 1..2214: mol_type = other DNA
atggaggtggagcaggaacaacgccggagaaaagttgaggctggacggacaaaactggcccactttcggcagcgaaagacaaaaggggattctagccattcagagaaaaagacggccaaaagaaaggggtctgcggttgatgctagcgtgcaggaggaatctcctgtcacaaaggaggactccgccctctgcggggggggagatatctgtaagtcgaccagttgcgacgacaccccagacggcgctggcggagccttcgctgcgcagccggaggactgcgacggggagaagagagaggatcttgagcagcttcagcagaagcaggtgaacgaccaccctccagagcaatgtgggatgttcaccgtttcggatcaccctcccgagcaacacggcatgttcacggtgggcgaccaccctcccgaacaacgggggatgtttacagtatccgatcatcctcctgaacagagggggatgtttacaataagtgatcatcagcccgagcagcgtgggatgttcacggtgtctgaccacacacctgaacagagagggatattcacaatcagtgaccatcccgccgagcaacgaggcatgtttactaaggaatgcgagcaggaatgtgaactggccataacagatctggagtccggacgtgaggatgaagcagggcttcatcagtcacaagccgtccatggactcgagctggaagcccttcggttaagcctgtctaatatgcatactgcccagctagaactgacacaggccaatcttcagaaagaaaaagagacagccctgaccgagttacgggagatgttgaatagccggcgtgcccaggaacttgcccttctacaaagccggcagcaacacgaactagagctgctgagggagcagcacgcccgggaaaaagaggaagtggtccttcgatgcggccaggaagccgctgagctaaaagagaagctgcaatccgaaatggaaaagaatgcccagatcgtgaagactctcaaggaagactgggaatctgaaaaggatctttgtctcgaaaatctgaggaaggaactgagtgctaaacaccagtccgagatggaagatctgcaaaaccagttccaaaaggaactagccgagcagagagcggagttggagaaaatcttccaggataagaaccaagccgaacgggccctgcggaaccttgagtctcaccaccaggccgccatcgagaagcttcgcgaggacctgcagtccgaacacgggcgatgcctcgaggacttggaattcaagtttaaggaatccgagaaagagaagcagctggaactagaaaatctgcaggcttcatacgaggatttgaaggcgcagtcccaggaggagatccgtaggctgtggtctcaactggattcagcccgaacctccaggcaggagctctccgagctccatgagcaactgcttgcaagaacttcgcgtgtggaagatctcgaacagctgaaacagcgcgaaaaaacccagcacgagagtgagctggaacaattaaggatttactttgaaaagaaattgagggacgctgaaaaaacttaccaggaagatttgaccctgctccaacaacgacttcagggcgcccgggaggacgcgctgttagactctgtggaagtgggactaagttgtgttggactggaagaaaagcctgagaaaggccgaaaagaccatgtggacgagttagagcccgagagacataaggaatccctgccccgttttcaggcggagctggaggagtcccaccggcaccagctggaggccctggaatctcccctctgcattcagcatgaagggcacgtgtctgaccgatgttgtgttgagacaagcgccctgggtcacgaatggcgtttagagccctcagagggacactctcaggaacttccatgggttcatctacagggggtgcaagatggggacctggaagcggataccgagagggcagctcgggtgctggggcttgaaaccgaacacaaagttcagctgtcactgttgcagaccgaattgaaagaagagattgagttactaaaaatagagaacagaaatttatatgggaaacttcaacacgaaaccagactgaaagatgacctcgagaaggtgaaacataatctgatcgaggatcaccagaaagagcttaataatgctaagcagaagactgaattgatgaaacaggaattccagcggaaagaaacatag

SEQ ID NO: 128137 - DNA, 10011 bp, synthetic construct
  misc_feature 1..10011: note = Description of Artificial Sequence: Synthetic coding sequence
  source 1..10011: mol_type = other DNA
atggaggtcgaacaggagcagaggcggaggaaggttgaagcggggcggacgaaactggcccactttcggcagcgcaagactaaaggagattcatctcactccgaaaagaagacagccaagcggaaaggcagcgcagtagacgccagcgttcaggaagagtcgccagtcaccaaggaggacagcgccctgtgcggcggaggggatatttgcaaaagcacttcctgtgacgacacccctgatggggcgggcggggcgtttgccgcccagccagaagactgtgatggggagaagcgcgaggatcttgaacagctgcagcagaagcaggttaacgaccatccccctgagcagtgtggcatgtttaccgtcagcgatcaccccccagaacagcatggtatgtttactgtgggcgaccacccccccgagcagcgcggtatgtttaccgttagcgaccaccctcccgagcagcatggaatgttcactgtaagtgatcatcccccagagcagcgcggaatgtttacaatttccgatcaccagcctgagcagagagggatgttcaccgtaagcgatcataccccagagcagagagggatttttaccatctctgaccatccggccgaacaaagagggatgtttacgaaggagtgtgaacaagaatgcgaactggccattactgatcttgaatccggacgcgaagacgaggcaggactgcatcaaagccaggctgttcatgggctcgaactcgaagcactccgcctgtccttgagcaacatgcacaccgcccagctggagctgactcaggcaaacctacagaaggagaaagagaccgcacttacggaacttagggaaatgctcaatagccgcagggctcaagaactggccttgcttcagtctcggcaacagcacgaactggaactacttcgcgagcagcacgcccgtgagaaagaggaggttgtactgaggtgcggccaggaggccgcagaactgaaagaaaaactgcagtccgagatggagaagaacgcccagatcgtcaaaactttgaaggaggattgggaaagcgagaaggatttatgtcttgagaaccttcggaaagagttaagcgccaagcaccagtccgaaatggaagatctccagaaccagttccagaaggagttggctgaacaacgcgccgaattagaaaaaattttccaagacaagaaccaggctgaacgcgcactgcggaatctggaatcacatcaccaggcagccattgagaagctaagggaggacctgcagagtgagcacggacggtgcttggaggatttggagttcaagtttaaagagtctgagaaggaaaaacagctggagctagaaaacctccaggcctcttacgaagacctcaaggctcaatctcaggaggagataagacgcctgtggtcgcagcttgatagcgcccggacgtctcgccaggaactttccgaattgcacgagcaattactggcaagaaccagtcgagtggaagatctcgaacagttgaagcaaagagaaaaaacccaacacgagagcgaactcgagcaattacgaatctattttgagaagaagctacgggatgctgagaaaacctaccaagaggacctcactctcctccagcagcgcttgcagggtgctagggaagatgctttactggattcagttgaggttggactgagctgcgttggcttagaagaaaagcccgagaagggacggaaggaccacgtagatgagctcgagccagaacggcacaaggagagtttgcccagatttcaggccgagctcgaagaaagccacaggcatcagcttgaggctctagagagtccactgtgcatccagcacgaggggcatgtttccgatcgatgttgtgttgaaacatccgctcttgggcacgaatggagactcgagccttcagagggacattcccaggagctaccctgggtgcatctccagggagtgcaggatggcgacctggaagccgacactgaaagagctgcccgggtgcttggtcttgagaccgagcacaaggttcaactcagcttgctgcagacagaactgaaagaggagattgagttattgaagatcgagaatcggaacctatatggaaaactacaacatgagacccgcttgaaggacgacctcgagaaggtcaaacacaatcttatcgaggaccatcagaaggagctgaataatgcgaagcagaaaactgagctgatgaaacaggaatttcagcggaaagagactgattggaaggtcatgaaggaagagctccaacgggaggcagaagaaaagcttactctgatgctgctggagctacgagagaaagctgagagtgagaaacagactatcattaacaaatttgagcttagagaggccgaaatgcgccagctgcaagaccaacaggccgcacaaatactggatctggaaaggtctttgaccgaacagcaaggacgcttgcagcagcttgagcaggatcttacgagcgacgatgctctccattgctcacaatgtgggcgtgagccgcctacagctcaagatggtgagctggccgcactgcacgtcaaggaggattgtgccctccagcttatgctggcccgcagtcgatttctcgaggagcgcaaggaaataacggagaagttttctgcggaacaggacgcattcctccaggaagcacaggagcagcacgcccgcgaactacagctcctgcaggagcggcatcagcagcagctgctgtccgtgaccgctgagctcgaggccaggcaccaggctgctctgggtgagctgaccgcttcactggagagcaagcagggcgcactcctcgcagccagggtggcggaactacagactaaacatgcagctgatctcggggccctggaaaccaggcacctgagcagcttagattccttggagagttgttacctgtccgaatttcaaacaatccgcgaggagcacaggcaggcgctagagcttttgcgggctgactttgaagaacagctgtggaagaaggattctctgcaccagacaatcctcacgcaggaactggaaaagttaaagcgcaagcacgagggagagttgcagagcgttcgcgatcatttgagaaccgaagtctccaccgaactcgctggcacagtggctcatgaactacaaggagtgcatcagggagagtttggttctgagaagaagaccgctctccacgaaaaggaggagaccttgcggctgcagtccgctcaagctcaaccatttcaccaggaggagaaggaaagcctctcgttacagttacagaagaaaaaccaccaggttcagcagttaaaggatcaggtgctgtctttaagccatgagatcgaagagtgcagatctgagctagaagtcttacaacagcgccgggagcgggagaatagggagggtgcaaatctgttaagcatgctgaaagcagacgtgaacctgagccacagcgaacggggtgcactgcaggatgcattgcgaaggcttctcggtctctttggcgagacactgagggctgcagtgacacttcgatcccgtatcggcgaaagggtcggtttgtgtctggacgacgcaggggccggacttgcccttagtacagcacccgctctggaagaaacttggagcgatgtggcactgcccgaacttgatagaacgctctccgaatgcgccgaaatgtcatcagtggcagagatttcatcacatatgcgggagtccttcttgatgagccccgagtccgttagagaatgcgaacagcccatacgccgcgttttccagagtctaagtctggccgtcgatggtctgatggagatggccttagatagctcacgacagcttgaggaggccagacagatccatagtcgattcgagaaggagttctcattcaagaacgaggaaacagcccaagtggtgcgcaagcaccaggagttgttagaatgtctgaaggaagaaagcgcagctaaggcagaactggcactcgagctgcataaaacccaaggaacgctggagggcttcaaggttgagactgccgacctcaaggaagtgctagcaggcaaagaggactccgagcaccgcctagtcctcgagctagagagtctccggcggcagctgcagcaggcagctcaggagcaggccgctctcagggaggaatgcacgagactgtggagtagaggggaggcaaccgccaccgatgccgaggcaagggaagcagcacttaggaaggaagtggaggatcttaccaaggagcagagtgagacaaggaaacaggcagagaaagataggtctgccctgctgagtcagatgaaaattttggaatccgaactagaggagcaactatcccaacaccgcgggtgtgctaagcaggcagaagccgtgaccgcacttgagcagcaagtcgcctctctagacaaacatcttaggaaccagagacagtttatggatgagcaagcagcggaaagggagcacgagagagaggaatttcagcaggagattcaaaggttagaaggacagctcaggcaagctgctaaaccccagccctggggaccccgtgattcacagcaagcacccctcgatggagaggttgaattgctccaacagaagctcagggaaaagcttgacgaatttaacgaactggccatccagaaggagtctgcagatcgccaggtgttaatgcaggaagaggagatcaagagactggaagaaatgaatataaacataagaaaaaaagtagcccagttacaggaggaagttgagaaacagaagaatatagttaagggactggagcaggataaggaagtgctcaagaagcagcagatgtcaagtctgctcctagcctctaccctgcagagcaccctggacgcaggaaggtgcccagaacccccgagcggctctccccctgagggaccggagatacagctggaggtgacccagcgcgcactgttgaggagggagtcggaggtcctcgatttaaaggagcagctggaaaaaatgaaaggagatctggaatctaaaaatgaggagattctgcaccttaacttaaagctggacatgcagaactcacaaaccgcggtctcactacgggagctcgaggaggaaaatactagcctgaaggtgatatatacccgaagctctgaaatcgaggagctaaaggccacgatcgagaacctccaggaaaatcaaaagcgtttgcagaaagagaaagcagaagaaatagaacaactgcacgaggtgatagagaaactgcaacatgagttgtcactcatggggccagtcgtccacgaagtctcagattcgcaagcaggttctcttcagagtgaactcctgtgttcccaggctggagggcctagagggcaggcactgcagggcgagctcgaggcagctctcgaagcgaaggaagcattgagtagactgctggccgatcaagagcggagacattcccaggccctggaagccctccagcagcgtctgcagggggctgaggaggcagcagagcttcaattggccgaattggagcggaacgtggccctacgtgaagccgaagtcgaagacatggcatcccggatccaggagttcgaagccgctctcaaggccaaggaagctactatcgccgagagaaaccttgaaattgatgccctcaatcagcggaaagcggctcactccgccgaactagaggccgtcctgctagctcttgccagaatccgccgggcgttggagcagcagcctctggccgccggagctgcacccccagaactccaatggctcagggcacaatgcgccagactctcgaggcagcttcaagtcctccaccagcgcttccttaggtgccaggtggaattagataggaggcaggcaaggagagccacagcacacacccgtgtgccaggtgcccacccccaaccccggatggatggcggggccaaggctcaggtaactggggacgtggaagcaagtcatgacgcagccctggagccggtggtcccagatccacagggcgacctccagcctgtcctcgtcaccttgaaagatgccccactgtgtaaacaggaaggagttatgtcagttttgactgtgtgtcaacgccagctacaaagtgagctgctgctcgtgaaaaacgaaatgagactttcgctagaggatgggggcaagggaaaagagaaggtcctggaagattgccaacttccgaaagttgatctggtggctcaggtgaaacaactccaggaaaaactaaacaggcttctatactcaatgactttccagaatgtggacgctgcagacaccaagagtctgtggcctatggccagcgcccatctgctggagagctcatggagcgatgattcctgcgacggggaggagccggatatctcgccccatattgatacttgtgacgcaaacacagcaacaggtggagtgacggacgtgatcaaaaaccaggctattgatgcatgtgatgccaacacaacacccggaggtgttactgatgtgatcaaaaactgggacagcttaatacctgacgaaatgcccgattccccgattcaggaaaagtctgaatgccaggacatgtccttaagttcacccacatcggtgctcgggggatctagacaccagagccatacagcagaggccggaccccgaaagagtccagtgggaatgcttgacctgtctagttggagctccccagaagtgttgaggaaagattggacactcgagccttggccaagcctacctgtgactccacattccggcgcattgtctctgtgctccgctgatacctccctgggggatcgcgctgacacttcgttgcctcagactcaaggcccaggcctgctctgtagcccaggtgtgtccgctgctgccctcgcgttacagtgggccgaaagcccccctgcagatgaccatcatgtgcagcgaacagctgtggagaaagatgtggaagacttcatcacgacaagctttgactcccaagagaccctctcaagtcctccacccggcttggagggtaaggcagacaggagcgagaagtcagatggcagcggcttcggcgccagattgagccccggcagtggcggtcctgaggcacagacagccggccctgtgacccccgcttcaatatccggcagattccagccattgccagaagctatgaaagagaaagaagttagaccaaagcacgtgaaggctttattgcaaatggtgcgggatgagtcacatcagatcctggccctgtccgaagggttggctcccccatcaggcgaaccacacccacctaggaaggaagatgaaattcaagacatcagtctccacggaggcaagacacaggaagtgcccaccgcttgtccggactggaggggcgatctgttgcaggtcgtgcaggaggcattcgaaaaggagcaggaaatgcagggtgtggagcttcaacctcggctctccggttccgacctggggggccattcctcattattagaacgcctggagaagattatccgggaacagggtgacctccaggaaaagtctttagaacaccttaggttacccgaccggagcagtcttctgtcggagattcaggctctgagagctcagcttagaatgacgcacctccaaaatcaggaaaagctgcaacacttgcgcacggccttgacaagcgccgaggcacggggatcccagcaagaacatcagttgcgccgacaggtggaactgctggcatacaaggtagagcaagagaagtgtatagccggtgacctgcagaaaaccctgtctgaggagcaagagaaggctaactcagttcagaagctgctggctgccgagcaaacagtagtgcgggatcttaaaagcgatctgtgcgagtctagacagaaaagtgagcagctgtcgagatccctgtgcgaggtgcagcaggaggtgctccagttgcgctcgatgctgtcctccaaggagaatgaactaaaagccgcccttcaggagcttgagtcagagcaggggaaaggccgggccctgcagagtcagttagaggaggagcagctacgccacctgcagcgggagtcccagtccgcgaaagcccttgaggaactgcgcgcctccttggaaacccagcgcgcacagagcagtaggctgtgcgtggctctgaaacatgagcagaccgccaaggacaatctacagaaggagctccgcatcgaacattctaggtgtgaagccttactggcccaggagagaagccagcttagtgaactccagaaagacctagcagccgagaaatcccgcactctggagttgtcagaggctctgaggcatgaaaggctcctgacagagcagctgtcccaacggacacaggaagcatgtgtgcatcaggacacccaggctcatcacgctctactgcagaaattaaaagaagaaaagtcccgggttgtcgatctgcaggccatgctagaaaaggtacagcagcaggcccttcactcacaacagcagctcgaggctgaggcgcagaagcattgtgaagccctccgccgggaaaaagaggtttctgccactctgaaatctacagtggaggccctgcacacacagaagagggagctgcgttgcagcctcgaaagggagcgcgagaaaccagcatggctccaggcagaactcgaacaaagccatcctcggttgaaagaacaggaagggaggaaggccgccagacgatctgccgaagctcggcaatcccccgcagccgcagagcagtggaggaagtggcagcgggacaaggagaagctgagagaactagagctgcaacggcagcgagacctgcacaaaatcaaacagctgcagcagacggtgcgggacctggaatccaaggacgaggtgcccggtagcagattgcatctcgggtcggctcgacgggcagcaggtagcgacgccgaccacctgagggagcagcaaagagagttggaagcaatgcgccaacggctcctctctgccgcgaggctcctgacatcatttaccagtcaggccgttgatagaacggtgaacgattggacctcttccaacgaaaaggccgtaatgtcactgctgcacacattggaagaactgaagagcgacctttctcgcccaaccagctctcagaagaagatggcagccgagctgcaattccaattcgtggacgtactcctcaaggacaacgtatccctgacgaaagccctgagtactgtaacccaggaaaagttggagctctcccgagctgtgtcaaaactcgagaaattgctcaagcatcatctccagaaaggatgttcgcccagccgaagtgaacgcagcgcctggaagccagacgagaccgccccccagtcatctctgaggcggccagaccctggacggctcccacctgctgcttcggaagaggcccatacgtccaacgtgaagatggagaagctttatctgcactacttgcgtgccgaatcgttccggaaagccttaatatatcagaagaaatatcttctgctccttattggtgggttccaggacagcgagcaggaaactttaagcatgatagcacacttgggagtcttcccttcgaaggccgagcgcaaaatcacaagcaggcctttcacccgttttcggacagctgttcgcgttgtcattgcgattctgcgattgaggtttctcgtgaaaaaatggcaagaggtagatcgcaagggtgccttggcccagggtaaagcccctaggcctggacctagagctcgacaaccacagtctccgcctaggactcgggaatcacctcctaccagagatgtgccgtccggtcacaccagggaccccgcccgaggaaggaggttggctgccgcggcgtctcctcacagcggcggcagagctactcccagtcctaatagtcgcctggagaggagcctgacggccagtcaggacccagagcactcactcactgaatatatacatcacttggaggtaatccagcagagacttggcggtgtgcttccagatagcacctcaaagaagtcctgtcaccccatgatcaaacagtag

SEQ ID NO: 128138 - DNA, 6075 bp, synthetic construct
  misc_feature 1..6075: note = Description of Artificial Sequence: Synthetic coding sequence
  source 1..6075: mol_type = other DNA
atggctaccggcggcggtccctttgaggacgggatgaacgaccaggatcttcccaattggtctaatgaaaacgtggatgaccgacttaataatatggactggggcgcacagcagaagaaggccaacagaagttctgagaagaacaaaaagaagtttggggtcgaaagcgacaagcgcgtgacaaacgacatttcacccgaaagcagccctggcgtgggaagacgtcgaaccaagaccccccacacattcccgcacagtcgttatatgtcacaaatgtccgtccccgagcaggccgaattggagaagttgaagcaacggatcaatttttccgacctggaccaacgatccattggtagcgacagtcaggggcgtgccaccgcagcaaacaataaacggcagctatccgagaacagaaagcccttcaattttctccctatgcagattaacaccaataaaagcaaggacgcaagcaccaatccccctaaccgcgagactatcgggtctgctcaatgtaaggaactgttcgcctcagccctgagcaatgacctcctgcaaaactgtcaagtcagtgaagaagatgggagaggcgagcctgccatggagtcttctcaaattgtctcacggttggtccagatccgcgactacattactaaggcctcatctatgcgtgaggacctggtcgagaagaatgaaaggagcgccaacgtcgagagattgacgcatttgatcgaccaccttaaagaacaggagaaaagctacatgaaattcctgaaaaagatactcgcccgggatccacaacaggagcccatggaagagatagagaatctgaagaagcaacacgatctgctgaaaagaatgctacagcaacaggagcagctgagggccctgcaggggcggcaggccgctctgctggcgctgcagcacaaggccgagcaggctatcgctgttatggatgactccgtcgtcgctgaaacagcaggcagtctatctggggtgagcattacgtctgaactgaatgaagagttaaacgatctaatccagcgtttccataaccaattacgggattctcagccgccagcggttccggataatcgtcggcaagcagagtctctcagtttgactcgcgaggtgtcgcagagtcggaagccaagtgccagcgagcggctgccagatgaaaaggtggaactcttctctaaaatgagagtgcttcaggagaagaaacagaagatggataagctcctgggtgagctgcacactctacgcgaccagcatcttaataactctagcagcagccctcagaggtcggtggatcagcgttctacgtctgccccatcggcctcagtgggactggctccagtcgtcaatggcgagagtaacagcctgacgagcagcgtcccatatcctacagcttccctggtcagccagaacgagtcagagaatgaggggcaccttaatccatctgaaaagttgcagaagctaaatgaagtgcggaaacggttaaacgaactccgcgagctcgtgcactactatgagcagacaagcgacatgatgacagacgcggtcaacgagaaccgcaaggacgaggagacggaggagtctgagtacgactccgaacacgaaaattctgagccggtaacaaatattcgcaacccccaggtggcctccacctggaatgaagtgaatagccattctaacgcacagtgcgttagtaacaatcgcgacggacggaccgtgaattccaactgcgaaatcaacaatagaagtgcagctaatattcgagcacttaacatgccaccatccctggactgtaggtataatagggagggcgaacaggagatccacgttgcacagggcgaagacgatgaggaggaagaagaggaggctgaagaagagggcgtgagcggcgcttcgctctccagtcataggagctcactggtggatgagcatcctgaagatgccgagttcgaacagaagataaaccgcctgatggctgcaaagcagaaactccgccagctccaggatcttgtggctatggtacaggatgacgacgcagcccagggtgttatttctgcatctgccagcaatctggatgatttttaccctgcagaagaggataccaaacaaaacagcaataacacgcggggaaacgccaataaaacccaaaaggacaccggtgtgaacgaaaaggccagagaaaagttttacgaggcaaaattgcagcagcagcaacgggagttaaaacagctacaagaggaaagaaagaagctgatagacatacaggaaaagatccaggctcttcagactgcttgccctgatctgcagttgtctgccgcgtccgtgggaaattgcccaactaagaaatatatgccagcggtgacctccacccctactgtgaaccagcacgagactagtacgtccaagtccgtctttgaacccgaagatagctctattgtggacaatgagctttggtccgaaatgagaagacacgagatgttgagagaagaactgcgacaacgcaggaaacagctggaggcccttatggctgagcatcagcgaaggcagggactggctgaaaccgccagcccggttgccgtgtcattgagaagcgacgggagcgagaacctttgcactccccagcagagtcgaacagagaaaaccatggccacatggggggggtctacccagtgcgccttagacgaggagggtgatgaggacggttatctaagtgagggaatagtccgcaccgacgaggaagaggaagaggagcaggatgcttcaagcaacgacaatttttcagtctgccctagcaactctgtaaatcacaatagctataacggaaaggagaccaaaaatagatggaaaaataattgcccattttcagctgacgagaattaccggcccctggctaaaacacggcaacagaacatttccatgcaaagacaggagaacctccgctgggttagcgaattgagctatgtcgaggaaaaagagcagtggcaggaacagataaaccagctgaaaaaacagcttgatttctcagtgtccatctgccagactttaatgcaggaccagcagacgctgtcatgccttctccagaccttgctgaccggtccatactctgtcatgccctcaaacgtcgcgagtccacaggtacacttcatcatgcatcagcttaatcaatgttacacacagctcacctggcaacagaacaatgtgcaaagactcaagcaaatgcttaatgaactcatgcgccaacagaaccagcaccccgaaaagcctggaggcaaggagaggggaagtagtgcttcccacccgccttccccatccctgttttgcccattctcattccccactcagcccgtcaacctgttcaacattccaggattcacaaatttcagctcttttgctcccggcatgaacttctcaccactctttccttcgaacttcggggacttcagccagaacatctccactcccagtgagcaacagcagcccctggcccagaacagctccggaaagacagagtacatggcttttccaaaaccatttgagagttccagctcgataggggcggaaaagcctcgcaataagaaactccctgaagaggaggtcgagagctccaggacaccatggctttatgagcaggaaggcgaagtagagaaacctttcataaaaacaggctttagcgtgtctgtcgagaaaagcacaagttcaaaccgcaagaaccagctcgacaccaacggccgcagacggcagttcgacgaggaatctctcgaatcattcagctctatgccagaccccgttgacccgacgaccgtaacaaagacgtttaagactaggaaggcttcagcccaggctagtctagcaagcaaggacaagactccaaaatctaaaagtaagaaacgcaatagcacccagctcaagtcgcgggtgaagaatatccgatatgagtcggcaagcatgtcgtcaacttgcgagccctgcaaaagccggaatagacattccgcacagacggaggaacctgtgcaagcaaaggttttcagccggaaaaaccacgagcagctagaaaagattatcaaatgtaaccggtcgaccgaaatctcaagtgagacaggcagcgacttctctatgtttgaggcgcttagagacacaatttatagcgaagtggccaccctgatctctcaaaatgaaagtcggcctcacttcttaatagaactctttcacgagctgcaactgctcaataccgactaccttcgtcagagggccctgtacgccctgcaggacatcgtgtccagacatatatcagagagccatgaaaagggggagaacgtgaagtccgtcaatagtggcacctggatcgctagcaattcggaactgactccttcagaatcactggccactaccgacgatgagacgttcgagaagaacttcgaaagggaaacacataagatatcggagcaaaatgatgccgacaacgcaagcgtgttaagtgtgagctctaactttgaaccctttgctacggacgatttaggtaataccgtgattcatctagaccaagccctggctcggatgcgcgagtacgagaggatgaaaaccgaggcagagtctaactctaatatgcgatgcacatgccgtattatcgaggatggcgacggcgcaggggccggaaccacagtaaacaatctcgaggaaacaccagtgatagagaaccgatcatctcaacaacccgttagtgaggtcagtactattccttgcccccgtattgatacacaacagctggatcggcagatcaaggccattatgaaggaggtgattccctttctcaaggagcacatggacgaagtgtgtagttcccagctgttgacatcagttagacgaatggtgctgacattgacccagcagaacgatgagagtaaggagttcgtgaagttctttcataaacagctcgggtccattctccaagactcactggccaagttcgcaggtcgcaagttgaaggactgcggggaagacttattggtggagatctctgaggtactctttaatgagctggccttcttcaagcttatgcaggaccttgacaacaactcaataacagtgaagcaaaggtgtaaacgtaaaattgaggcaacgggtgtgatccagtcctgcgccaaggaggccaaacggattttggaggatcatggctcacccgctggggagatcgatgacgaggacaaggataaagatgaaacggagactgtgaaacagactcaaacctcagaagtttacgacggtcccaagaatgtgagatccgacatctcggatcaggaggaagatgaggagagtgagggctgccccgtgtctatcaatctctccaaggccgaaactcaggctttgaccaattacggatctggcgaagatgagaacgaggatgaagaaatggaggaattcgaagagggacccgtggacgtccagacatctcttcaggccaacactgaagcaactgaggaaaacgagcacgatgaacaagtgttgcagagagactttaaaaaaacagctgagagcaaaaatgtccccctcgaacgcgaggcaaccagcaagaacgatcagaataactgccccgtcaagccttgttacctaaacatactcgaggacgagcaaccgctgaattctgcagcccataaagagtccccgcccacggttgattccactcagcagccaaaccctctccccctacgactgcctgaaatggagccacttgtgcctcgcgtgaaagaggtaaagtctgcccaggagactccagaatccagccttgccggttcccccgatacagagtccccagtgctcgtgaacgattatgaggcagagtcaggtaatattagtcagaagtccgatgaggaggactttgtgaaggtggaagatttgccgctgaaactcaccatctatagcgaagctgatcttcgcaagaaaatggtggaggaggagcagaaaaatcacctctcaggcgagatttgtgagatgcagacagaggagctggctgggaatagcgagactctcaaagagcctgagacggtgggggcacagtctatctag

SEQ ID NO: 128139 - DNA, 1590 bp, synthetic construct
  misc_feature 1..1590: note = Description of Artificial Sequence: Synthetic coding sequence
  source 1..1590: mol_type = other DNA
atggctactggaggcggacctttcgaagacggcatgaatgaccaggatcttcctaactggagcaacgagaacgtagacgatagactgaataatatggactggggcgcccagcagaaaaaagccaatcgctcttccgaaaagaacaaaaaaaaatttggcgttgaatcagacaagcgagtaacaaacgatatctccccggagtccagccccggggtggggcgtcggaggacaaaaacccctcatacctttccccatagtaggtacatgtcccaaatgtcggtgccggagcaggctgaactggaaaagcttaagcaaagaatcaactttagcgatctggaccagaggtctataggcagtgactcgcaggggcgcgccaccgctgccaacaataagcgacagctttcagaaaatcgcaagccctttaacttcctgcccatgcagataaacaccaacaaatcaaaggacgctagtaccaatcctccaaatcgagaaaccatcggaagcgcccagtgtaaagaactcttcgctagcgccctgtctaacgacctgctgcagaattgtcaggtgtcagaggaggacggtaggggcgagccggccatggagtcaagccagattgtgagccgtctcgttcaaataagagattatattactaaagcttcttctatgcgggaggatttggtagaaaaaaacgaaaggtctgctaacgtcgaacgcctaacccatctcatcgatcacttaaaggagcaggagaagtcatacatgaaattccttaaaaaaatccttgctcgggaaaatgaggaggaggatgtgcgcactattgactcagccgtcggttccggatcagtggccgaaagtacctccctcaatatagatgtgcagtccgaggcttccgatactaccgcccgtgatccccagcaagaaccaatggaggaaattgagaaccttaaaaaacagcacgacttgctaaaacgaatgctgcagcagcaggagcaattgagggctcttcaagggaggcaggctgctctgttagccttacagcacaaggccgagcaagcaatcgctgttatggatgattcggtggttgcggagactgctggcagcctctccggcgtcagcattacgtccgagttgaacgaggagctaaatgatttgatacagaggttccataatcagctcagggatagtcagccacctgcagtgccagacaacaggcgccaagccgagagtttgtcgctcacgagggaggtgagtcagtcaaggaaaccaagtgcctccgagcgccttcctgacgagaaggttgaactgtttagcaaaatgcgagttctgcaggaaaagaaacaaaagatggataaattgcttggagaactacatacattgcgggaccagcatctgaacaacagctcttctagtccccagcggtccgtcgaccagagatctactagtgccccaagcgcctccgtgggactagcgcccgttgttaacggggagtcaaactctctaacatcctctgtcccctatccgaccgccagcctggtctcgcagaatgagagtgagaacgagggccacctcaaccccagtgaaaaactgtag

SEQ ID NO: 128140 - DNA, 2172 bp, synthetic construct
  misc_feature 1..2172: note = Description of Artificial Sequence: Synthetic coding sequence
  source 1..2172: mol_type = other DNA
atgagcagcacatgtgaaccctgcaaatcacgcaacaggcactcagctcagacagaggaaccagttcaggccaaagttttttctagaaagaatcacgaacagcttgagaaaattatcaaatgcaaccggagtacagaaatcagcagtgcacacgctcgcagaattcttcaacagtctaatagaaatgcgtgcaatgaggctcctgagacaggctctgatttctcaatgtttgaggcactccgtgacactatctattccgaagtagctactttgatttcccagaacgagagcaggccccacttcctgattgagctattccacgaattgcagcttttgaatactgattacctacggcagcgagctctgtatgcactgcaggatattgtgagcaggcacatctccgaaagtcacgagaagggagaaaatgtgaagagcgtaaatagcggaacatggattgccagcaactctgaactgacgccaagtgagtcactggccaccactgacgacgagacattcgagaagaactttgagagagaaacccataaaattagtgaacagaacgacgccgacaatgcatctgtgctcagtgtctcatcaaatttcgaaccgtttgcaaccgacgatctaggaaacacagtgatacacttggaccaggcacttgcacgaatgcgggaatacgaacgcatgaaaacagaggcagaatctaactccaatatgcgttgcacttgtaggatcatcgaggatggcgatggtgccggagctggaactaccgttaacaatctcgaggaaactccggtcattgagaatcgtagcagtcagcagcccgtttctgaggtcagcaccatcccctgtccgcggattgatacccagcaactggacagacagatcaaagccatcatgaaggaggttattccattcttgaaggagcatatggatgaagtgtgtagcagccaactccttacttctgtgagacggatggttctgaccctgactcagcagaatgatgaaagcaaggagtttgtgaagttctttcacaaacagctgggaagcatcttacaggatagcctggcaaaatttgctggccggaagctgaaggattgtggtgaggacctgctggtcgaaatcagcgaggtgctcttcaacgaactagcattcttcaagctgatgcaagacctggataataactctattacagtaaagcagcgttgcaaaagaaagattgaggcaacaggcgtgatccagtcttgcgcaaaggaggctaagcgaattttggaggatcatggctcccccgccggcgaaatcgacgatgaagacaaagacaaagatgagactgagaccgtgaagcagactcaaacctctgaggtgtacgacggaccgaaaaacgtgagaagcgacatatccgatcaagaggaagacgaagagagcgagggctgcccagtgtccatcaatttatccaaggccgagactcaggcacttaccaattacgggagcggcgaggacgagaatgaggatgaggaaatggaagaattcgaggaaggccctgtcgacgttcaaactagtcttcaggctaataccgaggctacagaggagaatgagcacgacgaacaggtgctgcaacgggattttaaaaagactgccgagagtaaaaacgtccctcttgagcgcgaggcgacctccaagaacgaccaaaacaattgtcctgtcaaaccctgctatctgaacatactggaggacgaacagcccctgaactccgcagcccataaggaaagtcctcctactgttgatagtactcagcagcctaaccccctgccccttcggctgccagagatggagcccctcgtgcctcgcgtgaaggaggtgaaaagcgcccaggagacgcccgagtcgtcactcgcaggatccccggacactgaatcaccagttctggtcaacgactacgaggccgagagtggtaacatcagccaaaagtccgacgaggaagacttcgtgaaagttgaggacctgcccctcaaactcacaatttatagtgaggccgatcttcgaaaaaaaatggtggaggaagaacagaagaaccacttgtcgggcgaaatttgcgagatgcagaccgaggagctggccggtaacagtgagacactgaaagagccagaaacagtaggagcgcaatccatttag

SEQ ID NO: 128141 - DNA, 2295 bp, synthetic construct
  misc_feature 1..2295: note = Description of Artificial Sequence: Synthetic coding sequence
  source 1..2295: mol_type = other DNA
tagaaagcttccgcccaggcctctctcgcatccaaggataaaactcccaagtccaaatcaaaaaaaagaaattctacacagctcaagtccagagttaagaatatcaggtatgagtccgcctctatgagctccacttgtgaaccatgcaaaagcagaaatcggcacagcgcgcagaccgaagagccagttcaggcgaaagtgttttcccggaagaaccacgaacaactggagaaaattattaagtgcaatagaagcaccgagatttcatcagcccatgcccgacgcatcctacagcagtcaaatcgaaacgcatgcaacgaagcacccgagaccgggagcgactttagtatgttcgaggctttgagagataccatctactctgaagttgctactctgatttcacagaatgagagtcggccacactttctaatagagttgtttcacgagcttcagcttctgaataccgattatctgagacagagagcattatatgcccttcaggatattgtatccaggcacattagcgaaagtcacgaaaagggcgaaaatgtgaaatctgtgaattccggcacatggatcgcttccaactcagagttaactcccagtgaatccctggccacgacagatgacgaaactttcgagaaaaattttgagagggaaacccacaaaatcagtgagcaaaatgatgcagacaatgcatccgtgctgtccgtgtcgtctaactttgaaccctttgctacggatgacctcggaaacaccgtcatccacctcgaccaggcacttgcacgcatgagggagtatgagcggatgaagacagaagcagagagcaactcgaacatgagatgcacctgccgcatcattgaggatggagacggcgctggcgccggtactactgtgaataaccttgaagaaacccccgtcattgaaaaccgaagcagccagcagcccgttagcgaggtttcaaccattccctgtccaagaattgatacccaacagctagacaggcagatcaaggcaattatgaaggaagtaatacctttccttaaggagcacatggatgaggtgtgctcttctcaactgttgaccagcgtgcggcggatggtactgacactgacccagcaaaatgacgagtcaaaggaattcgtgaaattctttcacaagcagctcggaagcatcctccaggacagtctggcaaaatttgctgggcggaaactgaaggactgtggggaagatttgcttgtggagatctcagaagttctgttcaatgaattagcattctttaaacttatgcaggatctcgataataatagcattacagtgaagcaaagatgcaagcggaagattgaggccaccggagttattcagtcctgcgccaaagaggcaaaaagaattttggaggatcatggatcacccgctggtgagattgatgatgaggacaaggataaggacgaaacagagactgtgaaacaaacacagacctctgaagtgtacgatggccccaagaatgtacgtagcgacatttccgaccaggaagaggatgaggaatcagagggatgtcccgtttcaatcaatctctcaaaagctgagacacaggccttgacgaattacggctctggagaagacgagaatgaggacgaggagatggaagaattcgaggaggggcctgtagatgtgcaaacaagcctacaagctaacaccgaggctaccgaggagaacgagcatgatgaacaggttttacaaagagactttaaaaagaccgctgagtcgaaaaatgttccgctggaacgagaggcaaccagcaagaacgaccagaacaattgccctgtgaaaccatgctacctgaatatcttggaggacgaacaaccgctcaattctgccgctcacaaggaatcaccccccacagtggacagtacgcagcagcccaaccccctgcccttgcgcctccctgaaatggaacccctggtgcctcgcgtgaaggaggtgaaatccgcccaagagactcctgagagtagcctggcaggatcacccgacacggaatctcctgtgctcgttaatgactacgaggcggaaagcggaaacatcagtcagaagtcagatgaagaggattttgtcaaggtggaggacctgcccctcaagctaacaatctactcagaagcggatctgcggaagaaaatggtggaagaggaacagaaaaatcatctgtccggtgaaatctgcgagatgcagaccgaggagctggctggaaattctgaaactctcaaagagcccgagacggtgggggctcagtccatttag

SEQ ID NO: 128142 - DNA, 1227 bp, synthetic construct
  misc_feature 1..1227: note = Description of Artificial Sequence: Synthetic coding sequence
  source 1..1227: mol_type = other DNA
atggcaaccggcggaggcccattcgaagacgggatgaacgatcaagatctccccaattggtccaacgagaacgtggacgatcggctcaataacatggattggggggcccagcagaaaaaagccaatagaagcagcgaaaagaataagaagaaattcggagttgagtccgacaaaagagtgaccaacgacatttcaccggagagctcacccggagtggggagaagaagaacaaaaaccccacacacctttcctcattcaagatacatgtcccagatgagcgtgcccgaacaggccgaactggagaagctgaaacagcgcatcaacttctccgacttagatcagcggtctatcggctcagatagccaggggagagctactgcagctaacaacaaaagacagctatccgagaatagaaaaccattcaactttcttcccatgcagatcaacactaataaaagtaaagacgcttctaccaaccccccaaacagagaaacaattggcagcgctcaatgtaaggagctcttcgcaagtgctctgtctaatgatctgttgcagaattgccaggtctctgaggaagacggacgcggcgagcctgccatggaatcgtcacagatagtgtcacggctggtgcaaattcgcgactatatcacaaaagcttctagcatgagggaggatcttgtggaaaaaaatgagcgaagcgcaaatgtggaacgcttaacccacctgatcgatcatttaaaggagcaggagaagagttacatgaaatttctcaagaagattctggcgagggatccgcaacaggagcctatggaagaaatcgagaatctcaaaaagcagcatgatcttctgaaaaggatgctgcagcaacaagagcagctaagggccctgcagggaaggcaagcagccctcttggccctgcaacacaaggcagagcaggccattgctgttatggatgattcagtcgtcgccgagaccgccggttccctcagcggcgtgtctattacctccgagttaaatgaagaactgaatgacttgattcagagattccataaccagctccgggatagtcaaccacctgccgtgcccgataatcggcgccaggctgagtccttgtctctcacaagggaggtatctcagagtcggaaaccttctgcctccgagcgactgccggatgagaaggtggagctcttctcaaagatgcgggtgcttcaagaaaagaaacagtag

SEQ ID NO: 128143 - DNA, 1569 bp, synthetic construct
  misc_feature 1..1569: note = Description of Artificial Sequence: Synthetic coding sequence
  source 1..1569: mol_type = other DNA
atggccgtaaacaagggactgaccctgctcgacggagacctgcctgaacaggaaaatgtgctgcaaagagtgctacagctgccagtggtttcaggaacctgtgagtgcttccagaagacatacacctcaactaaagaggctcatccactggtggctagcgtctgtaacgcttatgagaagggcgttcaaagcgcctccagcctggccgcctggtcgatggagcctgttgttcggaggctgagcacccagttcacggctgcgaatgaactggcctgcagagggctcgaccaccttgaggaaaaaataccagctctccagtatccacccgaaaagattgccagtgagcttaaagatacaatctctacgagactgcgctccgcgagaaacagtattagcgtgcccattgcttctacaagcgacaaggtgctgggggccgcactggccggctgcgaacttgcctggggagtggccagagacacggcagaattcgctgcaaatacacgggcaggccgtcttgcctccggcggtgccgatctggcactcggatctattgagaaggttgtggagtacctcctgcctccggataaggaggaaagcgctcctgcccccgggcaccaacaggcgcaaaagagtcctaaagccaagcctagtctgctttcacgagttggagccctgacaaacaccctatcgcgatacaccgttcagaccatggccagggctctggagcagggtcacacagtcgcgatgtggatccccggtgttgtacccctgagtagcctggcacaatggggagcctccgtagcaatgcaggcagtgtcccgtaggagatccgaagttagggtgccgtggctgcacagcctcgcggcagcccaagaggaagatcacgaagaccagactgatacagagggggaggacaccgaggaggaggaggagcttgagactgaagaaaataagttctctgaagtcgctgctcttcctggcccgcggggtctccttggcggagtcgcccacacactccagaagaccttacagaccaccatttctgccgttacctgggccccagccgcagtgctgggcatggctggcagggtgctgcatcttacacccgcgcctgctgtctcttctaccaaagggcgggccatgtctctgtccgacgccctgaagggcgtgactgataacgtcgttgacaccgtcgtgcattacgtccccctcccgcgcctgtccctaatggagccagaaagcgagtttcgcgatattgacaatccgcccgcagaggtcgaaaggcgggaggcagaaagaagggcctccggcgcaccctccgctggacccgagccagcaccgaggctggcccagcccaggcggtccttgcgaagtgctcaaagcccaggagctccccctggacccggccttgaggacgaagtggcaactccagcagcgccccgaccagggttccccgccgtgccacgtgagaaacccaaacggagggtgagtgattcgttcttcaggccatcggtgatggaaccaatcctggggcgcacccattacagtcagctgaggaaaaaatcttag

SEQ ID NO: 128144 - DNA, 1569 bp, synthetic construct
  misc_feature 1..1569: note = Description of Artificial Sequence: Synthetic coding sequence
  source 1..1569: mol_type = other DNA
atggctgtgaataaaggattgacgctactggacggcgaccttccagaacaggagaatgtgctgcaacgggttctgcagctgcctgtggtgagtggaacctgcgagtgtttccagaagacctacacttctactaaagaggcgcaccccctagtggctagcgtctgtaacgcttatgaaaagggagtgcagtcagcctcctcactggccgcttggagcatggagcccgtggtcaggaggctgtccacccagttcaccgccgcgaatgaactcgcatgccggggactcgatcatctggaagagaagattcccgccttgcagtatcctcctgaaaagatcgcctcagagctgaaggatacgatttctaccaggctgcggtcagcacgaaattcaatatccgttcccatagcgtctacatctgataaggtcttaggtgccgcccttgccgggtgcgagctggcctggggagtggcccgagacactgccgaattcgcagctaacacccgcgccggacggctagcgagcggaggagcagacctggcgcttggcagtatcgagaaagtggttgaatacctgctcccaccggacaaggaggaatcagccccggcccctggccaccagcaggcacagaagtcaccaaaagctaagccgagcctcctttcaagagtgggagctcttaccaacactctgtccaggtacaccgtgcagaccatggcacgcgctcttgagcaaggacatactgttgctatgtggattcccggtgtcgtccccttgagctcattggcacagtggggcgcttcagttgctatgcaggccgtgtctagacgcagatccgaggttcgggttccctggctgcatagtttggccgcagcccaggaggaggaccacgaggaccagacagacaccgagggcgaagatacagaggaagaggaggaattggagactgaggagaacaaatttagtgaagtcgccgccctgccaggcccacgcggcctgcttggtggggtcgcacacactctgcagaagacccttcagacgacaatcagcgctgttacctgggccccagctgccgtgctgggcatggctggccgggtgttgcatctaacacccgctccagctgtgagttccaccaaaggcagggccatgagtctttctgacgcccttaagggcgtgacagataatgtggtagacacagtggtgcactatgtgccgttaccccggttgtccttaatggaacccgagtccgagttccgggacatcgacaatccacccgcggaggtcgagcgaagagaggcggagcggagagccagtggggccccgagtgctggccctgaacctgcacccaggctggctcaacccagacgcagcttacggtccgcccaaagccctggggcgcctcccggtccagggctggaagatgaggtggccaccccggctgccccacggcctggattcccggccgtcccccgagagaaaccaaaaagaagggtgtccgactctttctttcggccctccgtaatggagcctatactgggcaggactcactattctcagctgcgcaagaaatcctag

SEQ ID NO: 128145 - DNA, 1314 bp, synthetic construct
  misc_feature 1..1314: note = Description of Artificial Sequence: Synthetic coding sequence
  source 1..1314: mol_type = other DNA
atggcgagtgttgctgttgatccccagccatccgtagttactagggtggtcaatttgcctctggtctctagtacatatgacctgatgtcttctgcatacctcagcactaaggaccagtacccttatctcaaatctgtttgcgaaatggcagagaatggtgttaaaactatcacgagcgtagccatgacctccgctttgccaatcatacagaaactcgagccccaaatcgccgttgccaacacttacgcatgtaagggacttgatcgaattgaggaacgcttaccaattctcaatcagccctccacccagatagtggcgaatgccaagggcgcggtgacgggcgcaaaggacgcagtcaccactaccgtcacaggggcgaaagacagcgtggcgtccacaattacgggggtcatggataagactaagggggcagtgaccggcagtgtggaaaagacaaagtccgttgtttctgggtccatcaacactgtgcttggcagtaggatgatgcaactggtgtcctctggtgtggaaaacgcccttacaaagtcagaactgctcgttgagcagtacctgcccctcactgaggaagagctggagaaggaggccaagaaggtcgaggggttcgacctcgtccagaagcccagttactacgtgaggttggggagtctgtcaacaaagcttcacagccgtgcttatcaacaggctctatcccgagtaaaagaggctaagcagaagagccagcagaccatttcccaactgcattccacagtacaccttattgagttcgccaggaagaacgtgtactccgctaatcagaagattcaggatgcccaagacaagctgtacctgagttgggtcgaatggaaacgctccattgggtacgatgataccgacgaatcccactgcgctgagcatatcgaaagcagaacactggctatcgcccgtaatctgacacaacaacttcagacaacctgtcatacgttgctgtccaatatacagggggtcccacaaaatatccaggaccaggcaaaacatatgggggtgatggcgggtgatatttactcggtttttagaaatgcagcgtcatttaaggaagtcagcgatagtctcctgacctcttccaagggccagctccagaagatgaaagaaagcctggacgacgtaatggactacttggtcaataacactccgctgaactggctggtgggaccattttacccacagctgaccgagtctcaaaacgcccaggaccagggcgccgagatggataaatcaagtcaagagactcagcggagcgaacataagactcactag

SEQ ID NO: 128146 - DNA, 333 bp, synthetic construct
  misc_feature 1..333: note = Description of Artificial Sequence: Synthetic coding sequence
  source 1..333: mol_type = other DNA
atggcatcggttgcagtcgacccacagcctagtgtcgttacccgcgtcgtaaacctaccattagtgagcagtacatacgatcttatgtccagcgcctatttgtccactaaggatcagtatccttatctgaagtctgtgtgcgagatggccgagaatggcgtaaaaacaataacatcagttgccatgacatccgccctgcccattatccagaagctggaacctcagattgccgtggcgaatacctacgcatgtaagggcttggaccgtattgaagagaggctgccaatcctgaatcagcccagcacacaggtgtctcttgggcaaaaatgctag

SEQ ID NO: 128147 - DNA, 381 bp, synthetic construct
  misc_feature 1..381: note = Description of Artificial Sequence: Synthetic coding sequence
  source 1..381: mol_type = other DNA
atggccagcgtcgcagtggatccgcagccctcagtggtcacaagggttgtaaatctgcctttggtgagctccacttatgacctgatgtcctctgcctatctgtcaactaaagaccagtacccatacctcaaatccgtctgtgaaatggcagaaaatggtgttaaaactatcacatctgtggccatgacaagtgctctccctataatacaaaaactagaaccacagatcgccgtggcgaatacctatgcctgtaaggggctggatcgaattgaggaacgcctgccgattttaaaccagccgtcaacgcaggcgaatacgtgcttccccaatttggatctggacgtgtgcctgaaaaacaatggccactttctgaccagctag

SEQ ID NO: 128148 - DNA, 1071 bp, synthetic construct
  misc_feature 1..1071: note = Description of Artificial Sequence: Synthetic coding sequence
  source 1..1071: mol_type = other DNA
atggcaagcgtggccgtggacccccagccctcggttgtgacaagggtagttaatctgccactggtgagttccacctatgacctcatgagctcagcctatctctcgacgaaagatcagtacccctatttgaaatccgtgtgcgagatggcagagaacggagtgaagacaatcacctcagtggctatgaccagcgccttaccaatcatccagaaactcgagccacagatcgcagtcgcaaatacgtacgcatgtaaggggttggatcgaatagaggagaggttgccaatactcaaccaacctagtactcagatcgtggctaacgctaaaggagctgtcaccggagccaaggatgcagtgacaaccacggtgaccggggccaaggactcggtcgctagcacaatcactggggtcatggacaaaaccaagggagccgtgacaggatcagtcgaaaaaacaaaaagtgtgaagaagaaacagaaaaagcttaaggatcttatctggtttcgctcccagcttcactccaccgttcacctaattgaatttgcgcgcaaaaatgtgtattcagccaaccaaaagatccaggacgcccaggataaactctacctgtcttgggtcgagtggaaaagatccattggctacgatgacacggacgaatcccactgtgccgaacatatcgagagtcgtacccttgcgattgcgcggaatcttacgcagcagttgcagacgacatgtcatacacttctgagtaatattcagggtgtgccccagaacatccaggatcaagctaagcatatgggagtaatggccggagacatctattccgtctttagaaacgctgccagtttcaaagaggtctcagattccctgctgacttccagtaaaggccaactgcaaaagatgaaggaaagcctcgacgatgttatggattaccttgttaataatacaccgttgaactggttggtagggccgttttacccacaactgaccgagagccagaacgcacaggaccagggcgccgagatggataaatcttcccaggaaactcaaaggtcggaacacaaaacacattag

SEQ ID NO: 128149 - DNA, 378 bp, synthetic construct
  misc_feature 1..378: note = Description of Artificial Sequence: Synthetic coding sequence
  source 1..378: mol_type = other DNA
atggccagcgtggccgtggaccctcagcccagtgtggtgactcgcgtggttaatctacccctggtcagttcaacctatgacctgatgagcagtgcttaccttagcactaaagaccagtacccttacctgaaatctgtttgtgagatggcagagaatggcgttaagaccatcaccagtgtggctatgacctcagcccttcctatcattcagaaacttgaaccccaaatcgcggtggcaaacacgtacgcctgtaaaggccttgatcggattgaagagcggctaccaatccttaaccaaccatctacgcaaatcgtggctaatgctaagggcgcggtgaccggggcaaaggacgccgtcacaactacagttactggttag

SEQ ID NO: 128150 - DNA, 735 bp, synthetic construct
  misc_feature 1..735: note = Description of Artificial Sequence: Synthetic coding sequence
  source 1..735: mol_type = other DNA
atgggaccaccttcagccgcaccacgcggaggacacaggccttggcaagggctgctgattacagccagcctgctgacattctggcatccaccaacaacagtccagtttaccatcgaagcgctcccgtcttccgcggccgagggtaaagatgtgctcctcctggcctgcaatatctctgagaccattcaggcctactactggcacaagggcaaaacggccgaaggctcccctttgattgccggctacatcactgacatccaagccaatatcccgggtgctgcctatagcgggagggaaacagtctaccctaatgggtctctgctctttcagaacattacgttggaggacgctgggagctatacgcttagaacaatcaatgccagctacgactctgatcaggccaccggccagctgcacgtgcatcagaataacgttcccggcttaccggtgggggccgtggccggaattgtgacaggagtcctggtcggtgttgccttggtggccgcactggtctgctttttgctgcttagtaggactggtagggcttcgatccagagagacctgcgcgagcagcctcctcctgcatccacacccggtcatggcccttcacaccggtctacttttagcgccccattgccaagcccccgtacagcaactccaatctacgaagaactgttgtattccgacgctaatatctactgtcagatcgatcataaagctgatgtggtgagctag

SEQ ID NO: 128151 - DNA, 1269 bp, synthetic construct
  misc_feature 1..1269: note = Description of Artificial Sequence: Synthetic coding sequence
  source 1..1269: mol_type = other DNA
atgtctgcagacggcgccgaggcggatggatcaacccaggttactgtggaggagccggtccagcagccgagtgttgtggacagagtggccagtatgcctctgatttctagcacttgcgacatggtgtcagcggcgtatgcttctaccaaagaaagctaccctcatatcaaaacagtctgtgacgcagccgaaaagggagtgagaacactgactgcagctgcagtctcgggtgctcagccaatcctgtcaaaactggagccgcagatcgccagtgcttcagagtacgcacacaggggccttgacaaactggaagagaacctccctattctgcagcagccgacggaaaaggtcagtggcgcccaagagatggtttcttcagctaaagataccgtggcaacacaactctcagaagcagtcgatgccaccaggggggctgttcagagcggggttgacaaaacgaagtcagtggtaactgggggagtccaaagcgtgatgggcagcaggctcggccaaatggtgctttcaggtgtcgacacagttctgggcaagagtgaggaatgggccgacaaccacctgccgctaacggacgccgagctggcgcgcatcgctacttcactggacggttttgatgtcgcatcagtgcaacagcagaggcaggagcagtcttactttgtcaggttgggttcactttcggaaaggctgcgtcagcacgcttatgagcactcgctcgggaagctgcgtgccacgaagcagcgtgctcaggaagctctcctgcagctatcccaggtgctttcactgatggagaccgtcaagcagggagtggatcagaaactcgtcgaggggcaggaaaaactccatcagatgtggctgtcctggaaccaaaagcagttgcagggcccggagaaagagcctccgaagcctgagcaggtggaatcacgggcattgaccatgtttcgcgacatcgcacaacagttgcaggccacatgcacatccctgggcagcagtatacaaggactgcctacaaatgttaaggatcaggtgcaacaggctagacgccaggtggaggatctgcaagccactttcagctctattcactcttttcaggatctcagcagttcgattctggcacagtctcgcgagagggtggcatcagcgcgagaagctctcgatcatatggtggaatatgtagctcaaaacaccccggttacctggctggtgggcccgttcgcgcctggaataaccgagaaagcgcctgaggagaagaagtag

SEQ ID NO: 128152 - DNA, 1392 bp, synthetic construct
  misc_feature 1..1392: note = Description of Artificial Sequence: Synthetic coding sequence
  source 1..1392: mol_type = other DNA
atgtcagaggaagaagcagcccagattccacgaagctctgtttgggagcaagaccagcagaacgtggttcaacgtgttgttgccctgccactcgtacgagccacttgcacggccgtgtgcgacgtctattccgccgccaaggatcgccatccactgctcggatctgcctgccgattagccgagaattgcgtctgtggattgacgacaagggccctggatcacgcccagcctcttctggagcatctgcaaccccagctcgctactatgaattctctagcctgcagagggctcgacaagctcgaagaaaagctcccctttctgcagcagcccagcgaaaccgttgtgacctcggcaaaggatgtggtcgcaagtagtgtgaccggtgtggtcgacctcgccaggcgcggtcggcggtggagcgtggagctcaaacggagcgtgtcccacgcagtagacgtggttctggagaaatccgaggagttagttgatcattttttgcccatgacagaagaagaactggccgcattggccgccgaggccgagggtcccgaggtggggagtgtggaagaccagaggcgccagcaaggatatttcgtgcgtttgggatccttgtccgccaggattagacacctcgcatatgagcattccgtgggaaaacttaggcagtccaagcacagggcccaggacacattggcccagctccaagaaactctggagttgatcgatcatatgcaatgcggcgtgacccccaccgctcccgcatgtccgggcaaggtgcatgagctatggggcgaatgggggcagaggcccccagaaagcagacgacgttcacaggctgagctcgaaaccctggtcctgtcccgaagcctgactcaagagttacaggggaccgtggaagccctggagagttctgtgcgggggctgcctgccggagcacaggagaaggttgccgaagtacgcagaagcgttgacgcactacagaccgcctttgctgacgcaaggtgctttcgggacgtgcccgccgccgccctggcggaaggcaggggaagggtggctcacgcacatgcctgcgtagacgagttgcttgaactggttgttcaggctgttccgctgccatggctggtcggtcctttcgcccccatacttgttgagagacccgaaccactcccagatctagcagacttagtagatgaggtgattggtggccccgatccgcggtgggcacacctggactggccagcccagcagcgcgcctgggaagcagagcacagggatgggagcggaaacggtgatggcgataggatgggtgtggccggcgacatctgcgaacaggaacccgagaccccctcctgccccgtgaaacataccttgatgccagaattagacttctag

SEQ ID NO: 128153 - DNA, 3768 bp, synthetic construct
  misc_feature 1..3768: note = Description of Artificial Sequence: Synthetic coding sequence
  source 1..3768: mol_type = other DNA
atgaacggttatgccgagtttccaccaagcccatccaatccaaccaaggaaccggtggaaccgcagcccagtcaggtgccactgcaggaagatgtggacatgtcctccggaagcagtggccacgaaaccaatgagaactgctcaaccggacgggatagtcagggatcagactgtgacgattctggtaaggagctgggtatgctggtggagcccccggacgcaaggcagagccccgataccttttcactgatgatggcgaaatctgagcataacccgagtacgagcgggtgcagctcagatcagtctagtaaggttgacacccataaggagctgattaagacattgaaggaattgaaggtgcacttaccagccgataagaaggcaaagggaaaggcctcaacccttgccaccctgaagtacgccctgcgctcagtgaagcaagtgaaagccaacgaggaatattatcagttgttaatgagctcggaggggcatccctgtggggccgatgtcccctcctataccgtagaagagatggagtccgtcaccagcgagcatatcgtgaagaacgcagacatgtttgccgtggctgtgagccttgtaagcgggaagatcttatatatctcggatcaagtggcctccatatttcactgcaagcgggatgccttctcggacgctaagtttgttgaatttttggcaccacacgatgttggagtcttccactcctttacttccccctataaactacctctttggagtatgtgttccggtgcagattcctttacacaggaatgcatggaagagaagtcttttttttgtagggtgagcgtgaggaaaagccacgagaacgagatccggtatcaccccttcaggatgacgccctacctggttaaagtgagagaccagcagggagccgaatcacaactctgctgtctgctattggctgaaagggtccactccggctacgaagctccaaggatcccccctgaaaaacgaatcttcacgaccacacacacaccaaactgccttttccaagatgttgatgagagagctgtgccactcctgggctaccttccacaagacctgatcgaaactcccgtcctcgttcaactgcatccttctgatcggcccttgatgttggccatccataagaaaattctccagagcggcggtcagcccttcgattacagtccaattagattccgtgctcgaaacggagagtacattacattggatacttcatggtctagcttcatcaatccctggagccgaaagattagcttcatcataggacggcacaaggtgagagtaggccccctgaatgaagatgtgttcgcagcccacccttgtacggaagagaaggctttgcacccctccattcaggaactgacggaacagattcatcggctgctgttacagcccgtgccccactctgggtctagcgggtacgggtccctggggtccaatggctctcacgagcacctgatgtctcagacctctagttccgactctaatggccacgaagatagtcgtcgccggagagccgaaatttgcaagaatggtaataagacaaagaacagatcccattacagccacgagtccggagagcagaaaaagaagtctgtcactgaaatgcagactaatccgcccgctgaaaagaaagctgtgcccgccatggagaaggatagtctgggcgtgagcttccccgaggaacttgcgtgcaaaaatcaaccgacttgctcttatcagcaaatcagctgcctggacagtgtcatccgctatctggagtcttgcaatgaggccgccacactgaaacgcaagtgtgagttccccgctaacgttcctgccctgaggtcttctgacaaacggaaggctaccgtatctcctggcccccacgctggagaggccgagccaccatcccgggtcaattctagaaccggcgtcggaacccacctcacttccctggccctccccggcaaggctgagtctgtagcatctctgacatcacaatgctcctactcatccacaatagtacatgtgggagacaagaaacctcagccggaactggaaatggtcgaagatgccgcttccgggccagagagcctcgactgtctcgccgggccggcacttgcctgcgggctctcccaggaaaaggagccgtttaagaaactgggactgacgaaggaagtgctcgcagcccacacccaaaaagaagagcagagcttcctgcagaaatttaaagagataaggaagctgtctatttttcagagtcactgccactattacctgcaagaaagatctaaggggcagccaagcgagcggactgcacctgggttgcgtaacacatctggaatagattccccttggaaaaaaacaggaaagaacagaaagctcaagtccaagagagttaagcctcgcgatagctctgaatctacaggcagcggcggcccagtctctgccagacctcctctggtgggccttaacgcaaccgcctggagtccctctgataccagtcagtcttcttgcccagctgtgccatttccagcaccggtgccagcggcatacagccttcccgtgtttcccgccccaggcacggtggctgcaccccccgcacctcctcatgcatcctttaccgtaccagccgtaccagtggacttgcagcatcagttcgccgtgcagccacctccgtttcctgcgccactagcgcctgtgatggcttttatgctgcctagttactcatttcctagcggaacacccaacttaccgcaggcatttttccctagccagcctcagttcccatcccacccaaccttgaccagtgaaatggctagtgcaagtcagcctgaatttcctagccggacttcaattcccaggcaaccgtgcgcatgccccgctacacgagccacacccccatcggctatgggaagggccagcccccccctgtttcagagccgatcctcatcacccctgcagctgaatctgcttcagctcgaggaggcccccgaaggcggaaccggagcaatgggaaccacaggcgctactgagaccgcagcagtgggagctgattgtaaacctgggacatccagggatcagcagcctaaagccccactcaccagagacgaaccgtccgatacccagaatagcgatgcactaagtactagctccggactcttaaacctgctgctgaatgaggatctgtgctccgccagcggttccgccgcctccgagagcctgggaagcggctctcttggttgcgatgcgagcccctctggcgccggctcgtcagacacatctcacacttcaaaatattttggctccatcgacagtagcgaaaataatcacaaggcaaaaatgaatacggggatggaagaatccgagcactttattaaatgcgtattgcaggacccaatctggttgttgatggcagacgccgacagctctgtgatgatgacataccagctcccatctaggaatctcgaagctgtgcttaaagaagatagggagaagctgaaactcctacaaaaactacagccacggttcaccgaaagccagaaacaggagctccgggaggtacatcagtggatgcagactgggggactccctgcagctatcgacgttgccgaatgcgtctattgtgagaataaggagaagggcaatatctgcattccctacgaggaagacatcccttcactgggactcagcgaagtgagtgacacaaaggaggacgagaacgggtcccctctcaatcacagaatcgaggaacagacttag

SEQ ID NO: 128154 - DNA, 1215 bp, synthetic construct
  misc_feature 1..1215: note = Description of Artificial Sequence: Synthetic coding sequence
  source 1..1215: mol_type = other DNA
atgaacgggtatgctgaattcccgccctcgccttccaacccgacaaaagaaccagttgagccacagccttctcaggtgcccctgcaggaggacgtggacatgtcttcaggtagctccgggcatgaaacaaacgaaaactgcagcacgggaagggatagccagggaagtgattgtgacgattccggaaaagagctgggtatgcttgttgaaccacccgacgccagacaatcaccagacaccttttccctgatgatggctaaaagcgagcacaacccaagcacctctggttgctcaagcgaccaatcatctaaggtggacacacacaaggagcttattaaaacattgaaggaactgaaggtccacctacccgccgacaagaaggcaaagggcaaggccagtacactagccacactgaagtacgccttgaggagtgtgaaacaagtcaaggccaacgaggagtactatcagctgcttatgtctagcgaggggcatccttgtggagctgatgtgccttcctacaccgtggaggaaatggaatcggtgacctcagaacacatagttaagaatgcggatatgtttgccgtcgccgtttcactggtttctggaaaaatcctgtatatcagcgaccaggtcgcttcaatcttccattgcaaacgcgacgcattttctgacgccaagtttgtcgaattcctggccccccacgatgtcggcgtcttccactcgtttactagcccgtacaaacttccattgtggtcaatgtgcagtggtgccgatagcttcacgcaagaatgcatggaggagaagtccttcttttgcagagttagcgtgagaaaatcgcatgagaatgaaatcagatatcaccccttccgcatgacaccctacctggtgaaggtccgtgaccagcagggcgcagagagccagctttgctgcctgctcctggccgaaagagttcactccggatacgaggcacctagaattccccccgaaaagcgcatctttaccacgacccataccccaaattgcctctttcaggacgtagatgagagtcctgccgtgagacgtgcagcttttcgcctgttctcccatagcgtgtcacgtccggaacggagggtgcatcacgtgggccaccagctcgtgcagctgcaccagcctatggaacaggaaaatctgctgcaccactgggaagcccagtcacaggggggaccctttgaatag

SEQ ID NO: 128155 - DNA, 1215 bp, synthetic construct
  misc_feature 1..1215: note = Description of Artificial Sequence: Synthetic coding sequence
  source 1..1215: mol_type = other DNA
atgaacggttacgccgaatttcccccttcccctagcaatcctacgaaagagccagtcgagccacaaccttcccaggttcccttgcaggaagacgttgacatgtccagtggatcaagcggtcacgaaacgaacgaaaattgtagcactggccgcgactcgcaaggttcagactgtgatgattctggcaaggagctgggcatgcttgtagaaccgccagacgccagacagagtccggatacattttccttaatgatggcaaagtctgaacacaacccgtctacctcaggttgttctagtgatcagtcgagtaaagtcgatacacacaaagagttaatcaagaccctgaaggagttgaaagtccatctgcccgccgataaaaaggcaaaggggaaggcctcgacactggccactctcaagtacgcactgcgctcagtcaagcaggttaaagccaatgaggagtattaccagctcctcatgagttctgagggccacccttgtggagcagatgtgcctagctacaccgtggaagaaatggaatccgtgacgtcagaacacattgtcaagaacgccgatatgttcgccgtcgccgttagccttgtgagtggaaagattctgtacatatcggaccaagtagcttcaatctttcattgtaagcgagacgctttcagtgacgcaaagttcgtggagtttctggcgccccacgatgtgggagtgttccactcctttaccagtccctacaaactgccactctggtccatgtgttctggggccgactcattcacacaggaatgcatggaggagaagagcttcttttgccgcgtatcagtcaggaagtcacatgaaaacgagatccgctaccacccttttaggatgacgccatatctggtgaaggtgcgcgaccagcagggcgccgagtctcagttgtgttgtcttctactcgccgaacgagtacactctgggtacgaggccccgagaatccctccggagaagaggatatttactaccacccatacccctaactgcctgtttcaggacgtggatgagagccccgctgtccgtcgcgccgcctttagactttttagtcacagcgtgtccagacccgaaagacgggttcaccacgtgggccatcagctggtccaactgcaccagccaatggagcaggagaacctacttcatcattgggaggcacagagccaggggggaccctttgagtag

SEQ ID NO: 128156 - DNA, 330 bp, synthetic construct
  misc_feature 1..330: note = Description of Artificial Sequence: Synthetic coding sequence
  source 1..330: mol_type = other DNA
atgaacgggtatgccgagtttccccctagcccaagtaaccccactaaggagccagtggagccccagcctagccaggtacccctacaagaggatgtagacatgagctcaggatcttccgggcatgaaaccaacgaaaactgtagtactggacgggacagtcagggatctgattgcgacgattcgggtaaggagctaggaatgctcgtcgaacctccagatgctagacagagtccagatacattttctctcatgatggcaaagagcgagcataaccctagcaccagtgggtgctcttctgatcaaagctctaaagtggacacacataaatag

SEQ ID NO: 128157 - DNA, 1452 bp, synthetic construct
  misc_feature 1..1452: note = Description of Artificial Sequence: Synthetic coding sequence
  source 1..1452: mol_type = other DNA
atgaacggatacgctgagtttcctccatcaccatccaatcccaccaaggagcccgtcgaaccacagccttcgcaggtgccactgcaggaggacgttgacatgtctagcgggtcctccggccacgaaaccaacgagaactgctccactggccgcgacagccaggggtccgattgtgatgactcaggaaaggaactcggtatgttggtcgagccgccagacgcacgtcagtctcctgacacgttttctctgatgatggcgaagtcagagcacaaccctagtacaagcggctgcagctccgaccaatccagcaaggtagacacacataaagagcttatcaaaacgctgaaggaactgaaggttcacctgcccgcagataagaaagccaaggggaaagcgtccacgctggccactctgaaatacgccttacgaagcgtaaaacaggtcaaagctaacgaagaatactatcagttgctcatgagttccgaaggtcacccatgtggagctgatgtgcctagttatactgtggaggagatggaatctgtgactagtgaacacattgtgaagaacgccgacatgtttgcagttgccgtgtctttggtgagcggcaaaatcctctatataagtgatcaagtcgcttctattttccactgcaaacgcgacgccttctcagatgcaaaatttgttgagtttctggccccacacgatgttggagtgttccattcctttacgtccccttacaaactgccattgtggagtatgtgtagtggggccgatagcttcacccaggaatgtatggaggagaaaagttttttttgtcgcgttagcgttcggaagagccatgagaacgagattcgctatcatcccttcagaatgacgccctacctggttaaagtacgagaccaacagggagccgaaagccagctgtgttgcctgctactcgccgagagagtccacagcgggtatgaggctccgaggatcccgcccgaaaagaggatcttcaccactactcacacacccaactgcctctttcaggatgtggatgagcgcgcagtgccccttttgggctatctgccccaagaccttatcgagacccctgttctggttcaactgcacccttcagacagacctctcatgttagccatacacaagaagatactgcagagcggaggccagccatttgattattctcccataagatttagggccagaaatggcgaatacattacgctggatacttcatggtcctcttttattaacccgtggagccgaaagatttcttttatcatcggacgccacaaagtgagagttggcccactgaatgaagacgtctttgccgctcacccatgtacagaggaaaaggctcttcatccttcaatccaggagctgactgaacagatccacagactgctcctccaagtaggcgtggttccagcctgccctcccccccgttag

SEQ ID NO: 128158 - DNA, 2340 bp, synthetic construct
  misc_feature 1..2340: note = Description of Artificial Sequence: Synthetic coding sequence
  source 1..2340: mol_type = other DNA
atgatccccttcttacccatgtttagccttctgctgctgttgattgtcaatcccattaacgccaacaaccactacgataagattctggcgcactccagaattcgtggcagggaccaggggccgaatgtgtgtgcattacaacagatcctaggcacgaagaagaaatactttagtacgtgtaaaaactggtacaagaagagcatctgcggccagaagacgactgtcctctacgagtgttgccccgggtacatgaggatggaaggaatgaagggatgtcctgccgtactgccaatcgatcacgtttacggaaccttgggaatagttggagcgactacaacccagcggtatagtgatgcaagtaagttacgcgaggagatcgaaggcaagggttcgttcacctatttcgcacccagtaacgaggcctgggataacttggacagcgatattaggaggggcctggaatcaaacgtgaacgtggaactgttgaacgctttgcactctcatatgataaacaaaaggatgctgacaaaagatctcaaaaatggcatgatcattccttctatgtacaacaaccttggcctgtttataaaccactacccaaacggagtggttacagtcaactgcgctaggattatccatggaaatcaaatagccacaaacggggtcgttcacgtcatcgaccgggtactcactcaaatcggaacatccatacaagactttattgaggccgaggatgatttatctagtttccgagctgccgccatcacctctgatatcctggaagctttagggcgcgacgggcattttactctgttcgcccctaccaacgaggccttcgagaagcttccccggggagttcttgaacggatcatgggagacaaggtggcttctgaggcgctaatgaaataccacatccttaacaccttgcagtgcagcgagtccattatgggtggtgccgtgttcgaaacattggagggtaataccatcgaaattgggtgtgatggggactcaatcactgttaacgggatcaaaatggtcaataagaaagatatcgtgacaaacaacggagtaatccacctgattgaccaggtgctgattcccgattccgcaaaacaggtgatcgagctggccgggaagcagcaaactacgttcacggacctcgtcgcacagctgggcctcgctagtgctctgcgtcctgacggggagtacactttgctagccccagtaaacaatgccttttccgacgacacactctcaatggaccagcgcttactaaaactgatactacagaaccatatactgaaggttaaagtaggcttaaacgaactgtacaacggacaaatactcgagaccattggcggcaagcagcttagggtttttgtctatcgcaccgccgtttgcatcgagaactcctgcatggagaaaggcagtaagcagggacgtaatggagctatccacatcttccgggaaatcattaagcctgcagaaaagtccctgcatgaaaaactgaaacaggacaagagatttagtacattcctgtcccttctcgaggctgctgacctcaaggaattactaacccagcctggagactggaccttattcgttcccaccaatgacgcatttaagggcatgactagcgaagagaaagaaattcttatcagagacaaaaatgcattgcagaatattatcctttaccatctgactccgggagtttttatagggaaaggattcgaaccaggagttacaaacattctgaaaactacgcaaggatcaaaaatctttctgaaggaggtcaatgatactctgttggtgaacgagctgaaaagcaaggagtctgatattatgacaacgaatggagtgattcacgtggtggataaactcctctatccagcagacacccctgtcggcaacgaccagcttctggaaatactaaacaagctcattaaatacattcagatcaagttcgttcgcggatctactttcaaggaaatacctgttacggtttacaagccaataatcaagaaatacaccaagataattgacggggtgcctgtggagattactgagaaagaaacaagagaagaacggattattacaggaccagaaatcaagtatactagaatcagcaccggggggggggagactgaagaaaccctgaagaagctactgcaggaagaagtgaccaaggtgaccaagttcattgagggaggagacggacacctgttcgaggatgaggagatcaagaggctgttacagggcgatacccctgttcgtaagctgcaggccaataagaaagttcaggggtctcgacggagactgagggaaggacgtagtcagtag

SEQ ID NO: 128159 - DNA, 2430 bp, synthetic construct
  misc_feature 1..2430: note = Description of Artificial Sequence: Synthetic coding sequence
  source 1..2430: mol_type = other DNA
atgattccatttctgcctatgtttagtctgctactgcttctcatcgttaatcctattaatgccaataatcactacgataagatccttgctcattctaggatacggggcagggatcaggggcccaacgtatgcgcactgcaacaaatactcggcacgaaaaagaaatatttctcaacatgtaaaaattggtacaaaaagtcaatatgtgggcagaagaccacagtcctgtacgaatgctgtcctggctatatgcgcatggagggcatgaaagggtgtccagccgtcctccctattgaccatgtctacggcacgttaggaatcgtcggcgctacaactactcagcggtattctgacgcctccaagctgcgggaagagattgaggggaagggctcttttacatacttcgccccgtcaaacgaggcctgggacaacctggactccgatatccgccggggtttagaaagcaacgtcaatgtggagctactaaacgcattacactcacatatgattaataaacggatgctgacaaaagatttgaagaacgggatgatcattccgagcatgtacaataaccttggcttgttcatcaatcactatcccaatggcgtcgtcacagtcaactgcgcacgtattatccacggaaaccaaattgccactaatggcgtggtgcacgtcatcgacagggtcctgacacagatcggcaccagcattcaagactttattgaggcggaggatgatttaagttcgttccgggccgctgctatcacaagtgacattctggaagcattgggaagagacggacactttacactgttcgcacccacgaatgaggcgttcgaaaagctgcccagaggcgttttggagcgcattatgggggataaggtggcctccgaagctcttatgaaataccatatcctaaacactttacagtgcagcgagagcattatggggggggctgtctttgagacgttggagggcaacactattgagattgggtgtgacggggactccattacagtcaatggcattaaaatggtcaataagaaagatatagtgactaataacggcgttatccacctcatcgatcaggtgctgatcccagattcagctaagcaggtcattgaattagcggggaagcagcagacaactttcactgacctggtggctcagctggggctcgccagcgcactgagaccagacggggagtacactctgctcgcccccgtgaacaacgctttctctgatgataccctgtctatggatcagcggctcctcaaactgatacttcagaaccacattttaaaggtcaaggtcggccttaatgagctgtataacggccaaatcctcgagaccatcggtggtaagcagctccgcgtcttcgtctatagaacagctgtctgtattgagaactcctgtatggagaagggaagtaagcaaggacgtaacggcgctatccatattttccgtgaaatcatcaagcctgctgaaaaatcactgcacgaaaagctgaaacaggacaaacggttctcaacattcctgagtctcctcgaagccgccgacctcaaagagctcttaacccagcccggagattggacacttttcgtcccaaccaacgacgcgtttaaggggatgacttctgaagagaaagagatcctgatccgggataagaatgctcttcagaacattatcctgtaccacctgacaccaggagtgttcattggcaaagggttcgaacctggggtgacaaacattttgaagacgacgcaggggagcaagattttcttaaaggaagtgaacgacacactgctggtcaacgaacttaaaagcaaggagtcggacataatgacgacaaacggcgtaatacacgtcgtggacaagctgctctatcccgccgacacacccgtagggaatgaccaattactagaaattctgaacaaacttataaaatatatccagatcaagtttgtgcgagggagcaccttcaaggaaatcccggtaaccgtgtaccgtccaacactgacaaaggttaagatcgagggagagcctgagtttagactgatcaaggaaggagagacaataactgaagtcattcacggagaaccaattatcaagaaatacactaagataattgacggagtgccggtggagatcaccgagaaggagacgagagaggaaaggatcatcacaggccctgagatcaaatacactaggatctccactgggggaggtgaaaccgaggagacgctgaaaaagttgctacaggaggaggtgacaaaagtcactaagttcattgaaggcggcgatgggcatctttttgaggatgaggagatcaagcgtctgctgcaaggggatactcctgtgaggaagctccaagccaacaaaaaggtgcaaggttcacgccgacgcttgcgcgaagggcgttcccagtag

SEQ ID NO: 128160 - DNA, 2511 bp, synthetic construct
  misc_feature 1..2511: note = Description of Artificial Sequence: Synthetic coding sequence
  source 1..2511: mol_type = other DNA
atgattccctttctgcctatgttctcattgctccttctactgatagttaaccctattaatgctaacaatcattatgataagattctcgctcactctcgtattcgagggcgcgaccagggccccaatgtctgtgccctgcagcaaattttgggaaccaagaagaagtactttagcacctgtaagaattggtacaaaaagagtatttgcggacaaaaaaccactgtcttatacgaatgttgcccgggatatatgcgcatggagggtatgaagggctgtcccgccgtccttcccatagatcacgtatacgggacactggggattgtcggagcgacaaccacccagcgctactctgatgcctccaaactgcgagaagagatcgaaggaaagggttcattcacatactttgctcctagcaacgaggcgtgggacaacttggatagtgatatccggcgtgggctggagtcaaatgtgaatgttgaactcttgaacgccttacatagccacatgatcaataaaaggatgctgaccaaagatctcaagaatggtatgatcataccctccatgtataacaatctggggctgtttattaatcattatcctaatggcgtcgtgaccgtgaactgcgccaggattatccatggcaatcaaatcgccactaacggagttgtgcacgtgattgatcgcgtgctcacccagatcgggaccagcattcaggactttattgaagcggaggatgacctctcctccttccgcgcagccgccattacctctgacatccttgaagctctgggacgggacggccattttaccctcttcgcacctacaaacgaagcgttcgagaaactgcccaggggggtgctggagcgcattatgggtgacaaagtggctagtgaagcgttgatgaagtaccatatcctcaacaccctccagtgctcagaatcaataatgggcggcgcagtctttgagaccctggagggcaatactatcgagatagggtgcgatggggacagcattaccgtcaatggcataaagatggtcaacaagaaggatatcgtgactaacaatggggtgatccatcttatcgaccaggtgcttatccccgattcagccaagcaggtgattgagctggctggaaagcaacaaactacatttactgatctggttgcacagctcggcctggcttctgcgttgcggcctgatggcgagtatactctgctggcacccgtgaacaacgctttcagcgacgacacactcagtatggatcagcgtctgctaaaactgatcctacagaatcacatcttgaaggtgaaggtcggtttgaatgagctgtacaatggtcaaattctagagacaatcggaggaaagcagctccgtgtgtttgtctatcgcactgctgtttgtattgagaacagttgtatggagaagggttctaagcagggaagaaatggcgcaatacatatcttccgggagattataaagcctgccgagaaatctctccacgagaagctgaaacaggataagcgcttcagtactttcctctcattactggaagctgcagaccttaaggagctccttacccaaccaggagactggactctcttcgtacctaccaatgacgcgttcaagggaatgaccagcgaagaaaaggagattctcattagggacaagaatgccctgcaaaacattatcctgtaccacctgacacccggtgtgtttattggcaaaggatttgaacctggcgtcaccaacatcctcaaaaccacccagggctctaagatttttttaaaggaggttaacgatacgctgctagtcaatgaattaaagagcaaggaatcagacattatgacaaccaatggcgtgattcacgtcgtcgacaagctcctctatcccgccgacactccagtgggtaacgaccagctgctggagatactcaacaagttgatcaaatacatccagatcaagtttgtgcgtggctcaaccttcaaggaaataccagttaccgtttatacaacaaaaattattaccaaagtggtagaacccaagatcaaggtgattgagggctcactccaacctataattaaaaccgaaggacccacactgacgaaggtgaagatcgaaggtgagcctgagttccgcctgatcaaagagggggagacaatcactgaggttattcacggagaacctatcataaaaaagtataccaagatcatagacggggtcccagtggaaattaccgaaaaagaaacgcgcgaggagaggattataacaggcccagagataaagtacaccagaatttctaccggcggaggggagaccgaggaaacactgaagaagctgcttcaggaggaagtcacaaaggtgactaagtttatcgaagggggagatgggcacctctttgaggacgaagagattaaaagactcttacagggagatacaccagttcgtaagttacaagcgaacaaaaaggtacagggctccagacggcgcctccgcgaaggaagatcccagtag

SEQ ID NO: 128161 - DNA, 2427 bp, synthetic construct
  misc_feature 1..2427: note = Description of Artificial Sequence: Synthetic coding sequence
  source 1..2427: mol_type = other DNA
atgattccctttctccccatgttttcccttctgttgctcttaatcgttaatcctatcaatgccaacaaccactacgacaaaattttagcacactccaggatccgcgggcgtgaccagggccccaatgtgtgcgctctccagcagatcttgggcacgaaaaaaaaatacttctccacctgcaaaaattggtataaaaagtcgatatgcgggcagaaaacgacagtcctctatgagtgttgccctggctacatgcggatggagggaatgaagggatgtcctgcagtcttgcccatcgaccatgtgtatggcactctcggtattgttggtgccactacaactcagcgctactcagacgccagcaagctccgggaggagatcgagggcaaaggctctttcacatattttgccccttctaacgaggcgtgggataacctggattctgatattagacggggtctggaaagcaacgtgaatgtcgaactgctgaacgcgctgcatagtcatatgattaacaaaagaatgctgaccaaagacttaaagaatggcatgatcataccttcaatgtacaataatcttgggctgttcatcaatcattaccctaatggagtggttaccgttaactgtgccagaatcattcacggtaaccaaatagccactaatggagtcgttcatgtcatagatcgggtgttgacacaaatcgggacctctatccaagattttattgaggcagaggatgacttgtcgtctttcagagcggccgcgatcaccagcgacatcctggaggccctgggaagggacggacacttcaccctctttgccccaacaaatgaagcctttgaaaagctcccgcgaggcgtgctcgagaggattatgggggacaaggtggcctcggaggctctgatgaagtatcatatactgaatacactgcagtgcagcgagtctataatgggaggtgccgtgtttgagactctcgagggcaataccatagaaatcggctgtgatggcgactccattaccgttaacggaataaaaatggttaacaagaaagacatcgtaaccaacaatggtgtgattcatctcatagaccaggtgctcatacccgactcggcaaaacaagtgattgaactcgcaggaaaacagcagacgaccttcacagacctggtcgctcaattgggcttggcttctgcactgcgccccgatggagagtacacactgttagcacccgtgaacaacgctttctctgacgacacactctccatggaccagagattgctgaaactcatcttacagaaccacattcttaaggtgaaggtgggactgaatgaactgtacaatggccagatacttgagaccatcggcggtaagcagctgcgggtgtttgtttatcgtactgccgtgtgtatcgagaatagctgtatggagaagggttctaaacagggccgaaatggagcgatccacatcttccgggaaattatcaagcccgccgaaaagtctctacatgaaaaactaaagcaggataagagatttagcactttcttaagcctactggaagccgctgatctgaaagaactcctgacacaaccaggggattggacattgttcgtcccaacaaacgacgccttcaaagggatgacctcagaggagaaggagattcttatcagagataagaacgctcttcaaaacatcatcttataccacctcactcccggagttttcattggtaagggatttgagcccggcgtgactaacatactgaaaactacacagggcagcaagattttcctgaaagaagtcaacgacactctactcgtgaatgagctgaagtcaaaagagtccgacatcatgaccacaaatggagttattcacgtggtcgataagttgctctaccctgccgacacacccgtcggtaatgatcaactcttggaaatcttgaacaagctgataaagtacatccagatcaaattcgttcgggggtccacttttaaggagatacctgtgaccgtttataccacgaagatcataacaaaggtcgtggagcccaagattaaagtgatcgaggggagtctccagcccatcatcaaaacagaaggccctaccctgaccaaggttaaaatcgaaggcgaacctgagttcagactcatcaaggagggggaaacaatcactgaagttatccacggcgagccgattatcaaaaaatatactaagatcatagacggcgtgcctgtagagattaccgagaaggagaccagagaggagcggattataaccggacccgagattaagtacactcggatcagcaccggcggcggcgagacagaggagaccttaaaaaaactcctccaagaggacacgcctgtgcggaaactgcaggccaacaaaaaagtgcagggatcacgaagacgtctgcgggagggcaggagccagtag

SEQ ID NO: 128162 - DNA, 834 bp, synthetic construct
  misc_feature 1..834: note = Description of Artificial Sequence: Synthetic coding sequence
  source 1..834: mol_type = other DNA
atgcggatggaggggatgaaaggatgcccagccgtcttgccgatagaccacgtatacggaaccttggggatcgtgggtgcaaccaccacccagagatacagcgatgcgtccaaactcagggaggagatcgaagggaaaggcagtttcacctactttgcgccgtctaatgaagcgtgggataacctagactcggatatccgaagggggctggaaagtaacgtcaacgtagagttactgaatgccctccattcccatatgatcaataaaagaatgctgaccaaggatctcaagaatggcatgatcattccgtccatgtataacaacctcggcctttttatcaaccattaccctaatggcgttgttactgtaaactgcgcaaggatcatccacggcaatcaaatcgctacgaacggtgtcgtgcacgtgatagatcgtgtattaacccagattggtacctcaattcaagattttattgaggctgaggatgacctaagcagctttcgggccgccgcaatcacatctgatatcctcgaagcattaggtcgggatggacattttaccttattcgcgcctacgaacgaagcctttgagaagctgcccagaggcgtgttggaacggattatgggagataaagtggctagcgaggctttgatgaagtaccacatcctgaacacactccagtgctcggagtctatcatgggcggcgctgtcttcgaaacactggaaggaaacaccattgaaattggctgcgacggcgacagcatcactgtcaacggaatcaaaatggttaacaaaaaggacattgtgactaattggtgtgatccttttgactag

SEQ ID NO: 128163 - DNA, 2346 bp, synthetic construct
  misc_feature 1..2346: note = Description of Artificial Sequence: Synthetic coding sequence
  source 1..2346: mol_type = other DNA
atgatacccttcttgccaatgtttagcctcttgctactccttattgtaaatccgatcaatgctaataaccactacgacaagatcctggctcatagccggattaggggaagggaccagggtcccaacgtgtgtgctctacagcagatcttggggaccaaaaagaagtattttagcacatgcaagaactggtataagaaatccatttgtggacagaagactacagtactctatgagtgttgtccagggtacatgcggatggaggggatgaagggatgtcctgcagtactgcccatcgaccacgtgtacgggaccctaggtattgtcggcgctactactacacaacgctacagcgacgctagcaagctgagggaggaaattgagggaaagggttcttttacctactttgctccttcaaacgaggcctgggataacttggactccgatatcagaagggggctggaatcaaatgttaatgtggagctactaaatgccttacactcacacatgataaataagaggatgttgacgaaagacttgaagaacggaatgatcatccctagcatgtataataatttaggattgtttatcaatcattacccaaacggggtggtgacagtcaattgcgcacgtataattcacggtaaccaaattgcgaccaatggtgtggttcatgtgatcgaccgcgtcctcactcagattgggacctccattcaggatttcatagaggctgaagacgatttatcatcgtttagagctgccgctattaccagtgatattctggaagctctgggcagagatgggcattttaccttattcgccccaaccaacgaggctttcgagaaattgccaaggggggtgctcgaaagaatcatgggagataaggtggcttccgaggctctgatgaaataccacattctgaatactctacaatgctccgagagtatcatggggggcgctgtattcgagacactggaaggtaacactatagagattggatgtgatggcgactctattaccgtaaacggcataaaaatggtgaacaagaaggacatcgttaccaacaatggcgtaattcatttaattgaccaagtgttgatccccgattccgccaagcaggttattgagctagcaggcaagcaacagaccacattcacagatcttgtggcccagctcggcctggccagtgcgctgaggcctgatggagagtatactctcctggccccagtaaacaatgctttcagcgatgacacactgagcatggaccagagattactgaaactaattctgcaaaaccacattctgaaggtgaaggtgggcctcaatgagctgtataatggacaaatcctggaaaccattggggggaaacaacttagagtattcgtgtaccgaactgctgtgtgcattgaaaactcatgtatggaaaagggctcgaaacagggccgtaatggagccattcatatattcagggaaataatcaagcccgctgagaagagtttgcatgagaaacttaagcaggacaaaagatttagtacgtttcttagcctcctagaggcagctgacctgaaggagctactgacccagcctggggattggaccttatttgtccctaccaatgacgcattcaaggggatgacctccgaggaaaaagaaatactaataagagataaaaacgctctgcagaacattattctgtaccacttgactcctggcgtgttcattggtaaaggattcgaacctggagtgacaaacatccttaagactactcagggatccaaaattttcctcaaagaggtaaatgacacgctgctagtgaacgagttgaagagcaaggaaagcgatataatgaccacaaatggcgtgattcatgtcgtcgataagctcctgtacccggctgacactcctgtaggtaacgaccaattgttggagattctcaacaaactgatcaagtatatccagattaagtttgtgcgcggttcgaccttcaaggagattcctgttaccgtctatcggccaacccttaccaaagtgaagatcgagggagagccggagtttaggctcatcaaagaaggcgaaaccataaccgaagtgatccacggcgagccaataatcaaaaagtatacaaagataatcgatggggtgcccgtggaaattactgaaaaagagacacgcgaagagaggatcattacaggcccagaaatcaaatacacccgaatctccacaggcggcggagaaaccgaggagacattgaagaagctactccaggaagatactcctgtgcgtaagctgcaagccaataagaaggtgcaagggagcaggcgaagactacgtgaaggacgaagtcagtag

SEQ ID NO: 128164 - DNA, 2250 bp, synthetic construct
  misc_feature 1..2250: note = Description of Artificial Sequence: Synthetic coding sequence
  source 1..2250: mol_type = other DNA
atgataccatttttgcccatgttctccctgctgcttcttctcatcgtcaatccaatcaatgcaaataaccattatgataaaatcctggctcattcacgcataagaggcagagaccagggccctaatgtctgcgcactccagcagatactgggcacaaagaagaagtacttctccacctgcaaaaactggtacaagaagtctatatgcgggcaaaagacaaccgttttgtacgagtgctgtcccggatacatgcgcatggaggggatgaagggctgtcctgcagtgctacccattgaccatgtttacgggaccttggggattgtcggcgctacaacaacacagcgctactctgatgcttctaagcttagggaggaaatagaaggcaaaggaagttttacttacttcgccccatctaatgaagcctgggacaatttagactcagacatccgtagaggtctcgaatccaacgttaatgtggagttactaaacgcactgcattcccacatgatcaacaagcgaatgctcactaaagacctgaaaaatggaatgattatccccagcatgtataacaaccttgggctgtttattaaccattatcccaatggcgttgtgacagtcaactgtgctaggattatccatggcaaccagattgcaacaaacggtgtggtccacgtgatagacagggtcttgacacagatcggaacatctattcaggactttattgaggcggaggacgacttgtcgtcgtttagggcggccgcaataacttctgatattctagaggcgttgggccgggatggacacttcacactgttcgctcctactaatgaagcatttgaaaaacttccccggggcgttctggagaggatcatgggtgacaaagtagcctctgaggcactgatgaaataccacattctaaatacattgcagtgttctgagagcatcatgggcggggcagtctttgagacactcgagggaaacaccatagaaattggctgtgacggcgactccatcaccgtgaacggaatcaagatggtgaacaagaaagatatcgttactaacaacggtgtgatacacttaatcgatcaggtcctgattccagattcagcaaagcaagttatcgagcttgctgggaagcagcaaaccaccttcacggacctggttgcccagcttggactggctagcgctctgcggccagacggcgaatacaccctgctcgcacccgtaaataatgctttctcagatgatacattatctatggaccagaggcttctgaaacttattctgcagaaccacatcctcaaggtgaaggttggcctgaatgagttatataacggccagattttagagacgatcggaggaaaacagctccgcgttttcgtgtacagaacggcggtgtgtatcgagaactcttgcatggagaagggaagcaagcagggaagaaatggggctatccacatctttagggaaatcattaaacccgctgagaagtcgctccacgaaaaactgaaacaggacaagcggttctctacgtttttatcattgctcgaagccgcggatttgaaagaattactgacacagcctggtgactggaccctgttcgtgccgacaaatgatgccttcaagggaatgacaagcgaggaaaaagaaatcctgatccgggacaagaatgccctccagaacatcattctctaccacctcacacctggagtcttcataggaaagggatttgaacctggagtcacaaacatcctgaagaccacccaaggttccaagatcttcctgaaagaagtcaatgatactttactggttaatgagctcaaaagtaaagaaagtgatattatgaccacaaacggtgtgattcacgtggttgataaactgctgtacccggccgacactcccgtaggtaatgatcaactcctcgaaattcttaacaaattaatcaagtatattcagatcaaattcgtgaggggctcaacttttaaagaaatccctgtcactgtgtatagcccagagatcaaatacacccgcatttctacaggtgggggggaaaccgaagagactctcaaaaaattactccaagaagaagtgacgaaggtgaccaaatttatcgaggggggtgatggccacctgttcgaggatgaagagatcaaacggctgctgcagggggataccccagttaggaaactgcaggctaacaagaaagtgcaggggtctaggaggcgcctgagggagggcaggagccagtag

SEQ ID NO: 128165 - DNA, 399 bp, synthetic construct
  misc_feature 1..399: note = Description of Artificial Sequence: Synthetic coding sequence
  source 1..399: mol_type = other DNA
atgagtaataagtttctgggaacctggaaactggttagctcagaaaactttgacgactatatgaaggctttaggcgtgggcttagcgacaagaaagctcggtaaccttgcgaagcccacagttattatatccaagaaaggtgatattattacaattcgaactgagtctactttcaagaacacagaaataagcttcaagctggggcaagaattcgaggagactaccgctgacaataggaaaaccaagagcatcgtcaccctgcagaggggcagcttgaatcaggtgcaacgatgggacgggaaggagacaactattaagaggaagctggtaaacggcaaaatggtggccgaatgtaagatgaaaggcgtggtctgcactaggatctatgagaaagtatag

SEQ ID NO: 128166 - DNA, 483 bp, synthetic construct
  misc_feature 1..483: note = Description of Artificial Sequence: Synthetic coding sequence
  source 1..483: mol_type = other DNA
atgctcctgctgctcttatcaatcatcgtgctgcatgtggccgtactggtcctgctgtttgtctcaacaatcgtctcccagtggatagtgggcaacggacacgcaaccgatttgtggcagaattgtagcacatcgagctccggcaatgtccaccattgcttctccagttctcccaacgaatggttgcagagcgtccaggctaccatgatcctgtccatcatatttagcatcctgagccttttcttgtttttctgtcagctctttactctaaccaagggcggacgattctatatcacgggtatcttccagattctcgctgggctgtgcgtcatgtccgccgcggctatctacacagtgcgtcaccccgagtggcatctcaactcggattactcgtacggatttgcttacatacttgcctgggtggcttttccactggcactgttgagtggcgttatttatgttattttgcgaaagagggagtag

SEQ ID NO: 128167 - DNA, 357 bp, synthetic construct
  misc_feature 1..357: note = Description of Artificial Sequence: Synthetic coding sequence
  source 1..357: mol_type = other DNA
atgctgctgctcctgctctctattatcgtgctgcatgtcgctgtgcttgtgctcctcttcgtctctacaatcgtctcacagtggattgtgggcaacggtcacgctaccgacctctggcagaattgttcaacctcctcctcgggcaatgtccatcattgcttttcttctagccctaatgagtggttgcaaagcgtgcaggctacgatgatcctcagcattatcttttcgattctctccctattcttgtttttttgccagcttttcaccttaaccaaaggtggccggttctatattactggcatctttcagatccttgcagaaagtaacagctcccagatgtgcggttacagagattag

SEQ ID NO: 128168 - DNA, 483 bp, synthetic construct
  misc_feature 1..483: note = Description of Artificial Sequence: Synthetic coding sequence
  source 1..483: mol_type = other DNA
atgctgctgctgctgttgtcgatcattgtcctccatgtagccgtcctggtgcttctctttgtgagtactatcgtttctcagtggattgtggggaacgggcatgccaccgacctctggcaaaactgttccaccagttcatccggtaacgtacaccactgcttctcttccagtccaaatgaatggctgcagtctgtccaggccactatgatactcagcattatcttttccatcctgtcattgttcctctttttttgtcagcttttcacactaacaaaagggggacggttttatattaccggaatatttcaaattctggcaggcctctgcgtcatgtcagccgccgctatttacacagtccggcacccagagtggcatcttaatagtgattactcctatggatttgcctacatactggcgtgggtggcattcccactcgctttattaagtggagtgatttacgtgatcctccggaagagggaatag

SEQ ID NO: 128169 - DNA, 450 bp, synthetic construct
  misc_feature 1..450: note = Description of Artificial Sequence: Synthetic coding sequence
  source 1..450: mol_type = other DNA
atgttgctgctgctgctctctataattgtgctgcacgtcgcggttctggtgctgctctttgtaagtaccattgtcagccaatggatcgttggcaacggtcatgctaccgatctgtggcagaactgttccacgtcaagctcaggaaacgtacaccactgcttctcctcaagtccaaatgagtggctgcagtctgttcaggccaccatgatattgagcatcatattctcaatcctcagtctcttcctcttcttctgtcagctgtttacactcactaagggaggcagattctatatcactggtatatttcagattttggcaggactgtgtgtgatgtctgcagcggcaatctatactgtgcgtcaccccgagtggcacctgaactctgattatagcttcccgcttgcactgctctcaggagttatctatgtgatactgcggaagagagaatag

SEQ ID NO: 128170 - DNA, 1413 bp, synthetic construct
  misc_feature 1..1413: note = Description of Artificial Sequence: Synthetic coding sequence
  source 1..1413: mol_type = other DNA
atgagccatcacccctctgggctgagggcgggcttcagttctactagctaccgaagaactttcggtcctcccccatcccttagtccaggggcattcagctattcaagctcttctcgattcagttcaagtcgcctattgggcagcgcttctccctcttcctccgtcagactgggcagttttcgctcgccacgggcaggcgcaggtgccctgctccggctgccatctgagaggctggacttcagtatggctgaggccctgaaccaggagtttctggccacccggtctaacgaaaaacaggaactccaggaactgaacgaccgcttcgcgaatttcatcgaaaaagtgagattcttagaacagcaaaatgcagcccttaggggggaattgtcccaggcacgcggtcaggagcctgccagagctgaccagttgtgccagcaggaactccgggaattgagacgcgaacttgaactacttggacgcgaaagggatagggtccaagtcgaacgcgacggtctagcggaggacctagccgccttaaagcagagactcgaagaagagaccaggaaaagggaggatgccgaacacaatctcgtgctgttccggaaggacgtggacgacgctacgctcagtcgcttggaactggagcggaagattgaatctctcatggacgaaatagagttcctgaagaagctgcatgaggaggaactccgcgatctacaggtgagtgtcgagagtcagcaagtccagcaggtggaagttgaggccacagtgaagccagagctgactgctgcgctgagagacattcgcgcccaatacgagtcaattgcggccaagaatctacaagaagcagaggagtggtacaagtcgaagtatgctgacctgtcagacgccgctaatcgaaaccacgaggcactccgccaggcaaaacaagagatgaatgagtctcgtagacagattcagagtcttacctgtgaggtagatggactgagaggcactaatgaagccctgctgaggcaactccgcgagttggaggaacagtttgctctggaagccggaggctaccaggcaggcgctgctaggctcgaggaagagctgcgccagctaaaggaagaaatggctaggcacctcagagaataccaggagcttttgaacgtgaaaatggccttagacatcgagattgcaacttaccgaaagttacttgagggtgaagagtcacgcataagcgtgcctgtccatagtttcgcgtccctcaacatcaaaaccacagtccctgaggttgaaccacctcaggatagtcatagccggaagactgtcttaatcaagaccatagagacaagaaatggagaagtggtcaccgagtcccagaaagagcaacgctctgaactcgataagagcagcgcgcattcctactag

SEQ ID NO: 128171 - DNA, 603 bp, synthetic construct
  misc_feature 1..603: note = Description of Artificial Sequence: Synthetic coding sequence
  source 1..603: mol_type = other DNA
atgggacaggagttctcctgggaggaagccgaggctgctggggaaatcgacgttgcagaactccaggagtggtataaaaagttcgttatggaatgtccttctggaacgctcttcatgcatgagttcaaacgcttcttcaaagtgacagacgatgaagaagcttcccaatatgtcgaggggatgtttcgggcatttgacaaaaatggtgacaataccatcgattttctggagtatgttgcggctctcaacctggtcttaagagggactcttgagcacaaactgaagtggactttcaagatctacgacaaggacggcaacgggtgcatcgaccgtctggagctgctaaacattgtggagggcatttatcagctgaagaaggcatgccggcgggagctgcaaacagaacaaggccagctattgacacctgaggaagtggtggaccgcatctttcttctggtggatgaaaatggagacggccagctatccctgaacgaattcgtcgaaggggccaggcgggataagtgggtgatgaagatgttacagatggacatgaacccaagcagctggcttgcccagcaaagacggaagtctgctatgttctag

SEQ ID NO: 128172 - DNA, 1104 bp, synthetic construct
  misc_feature 1..1104: note = Description of Artificial Sequence: Synthetic coding sequence
  source 1..1104: mol_type = other DNA
atgtggagtgaaggacgctacgagtacgaacgcattccccgggaaagggcccccccccggagtcatccatccgacggttacaaccgcctggtgaatatcgtgcctaagaaaccaccactgttagatcgtcctggcgaggggtcctacaacagatactactctcacgttgactatagagactacgatgagggccgctctttcagtcatgaccgtcgctccggccctccacataggggagacgagtctggctatcgatggacgagagacgaccactccgcgtctcggcagcccgagtatcgcgatatgcgcgacggctttagacggaagagcttctattcttcgcattatgcccgagaacggtccccctacaagcgtgataatactttctttcgggagtccccggtaggacggaaggattccccacactcccggtccggctcaagtgtgtccagtcggtcctactcccctgagagatctaaatcatactcgttccaccagtctcagcacaggaaatccgtgcggcctggggccagttataaacggcaaaacgaaggaaatccagaaagagataaagaacgccccgtgcagagcttgaaaacctcacgcgacacctcgcccagtagcggaagcgctgtttccagcagtaaagtgttggacaagccatcacggctgaccgaaaaagagctcgctgaagccgcctccaagtgggcagcagagaagctggaaaagagcgacgagtctaaccttcctgagattagcgaatacgaggcagggtccacagcaccattatttacagaccagcctgaagagccagaaagcaatacgactcacggtatcgagctcttcgaggattcgcaactgactacaaggagcaaggccatagcttcgaaaacgaaggagatagaacaggtgtatcgccaggattgcgagacctttgggatggtcgtgaagatgctgatcgagaaagatccgtccctggaaaagtctatacagtttgcgctgaggcagaatctccacgaaataggagagcggtgcgtggaagagcttaaacacttcattgcggaatacgatacttcaacccaggatttcggtgaacctttctag

SEQ ID NO: 128173 - DNA, 1377 bp, synthetic construct
  misc_feature 1..1377: note = Description of Artificial Sequence: Synthetic coding sequence
  source 1..1377: mol_type = other DNA
atgtggtctgagggaaggtatgagtatgaacgaattccgagggagagggccccccctcgcagccatccaagtgatggctataaccggctcgtaaacattgtgcctaagaagcccccactcctcgatcggcccggcgagggctcctacaatcgctactactcccacgtggactatcgtgattacgatgaaggaagatcctttagccacgataggcgttccggaccccctcacagaggcgatgagagtggataccgctggacacgcgatgatcatagcgcaagtagacagcctgaatatcgcgacatgagggatggatttcgcaggaagtctttttactcatcacattacgctagggaacggtctccatataagcgcgacaacacttttttcagggagtctccagtgggacgtaaagattctccccactcaaggagtggaagctcagtgtcctcacgatcgtacagcccagagaggtccaaaagttatagctttcaccaatctcagcacagaaaaagcgtcaggcctggtgcaagttataagaggcagaatgagggaaatcctgaacgagataaggaacggcccgtacaatcacttaagacttccagggatacttctccctcatccgggtctgccgtcagcagctccaaagtgctcgacaagcctagccggcttacagaaaaggaactagcagaggccgcgtccaaatgggccgccgagaaattggagaaatccgacgagtctaacttgccggaaattagtgagtatgaagctggctctacagcccctctgtttacagaccagcctgaggagcctgaaagcaatactactcatggaatcgaactgttcgaagactcccagttgaccacccgctccaaggccatcgcgagcaagacaaaggagatcgaacaagtgtacagacaggattgtgagaccttcggaatggttgtgaaaatgctgatcgagaaggacccctctcttgagaagagcattcagttcgcgcttcgccagaatctacacgaaattgagagcgcaggccagacctggcaacaagtgcccccggtcaggaataccgagatggatcatgacggtacccctgagaacgagggcgaggagacagctcagtccgctccacaacctcctcaagccccccaacctctgcagccacgcaaaaaacgggtccgccggactacccaactcaggcggaccacgggagcaccagacataacctgggggatgctgaagaagacgactcaggaggcagaaaggattctccttcggacacaaaccccctttacacccgaaaacttgttcctggcaatgctctctgttgtccattgtaatagtcggaaggatgtgaaaccggaaaacaaacaatag

SEQ ID NO: 128174 - DNA, 1125 bp, synthetic construct
  misc_feature 1..1125: note = Description of Artificial Sequence: Synthetic coding sequence
  source 1..1125: mol_type = other DNA
atggcgtacaggcgggacgagatgtggtccgaggggcgttacgagtacgaacgcatacctcgtgaaagagccccgccccggtcacacccatccgatggatataaccgcctggtgaatatcgttcctaagaaacctccactcctggaccgaccgggcgaaggaagttacaatcgatactatagtcacgtggattaccgagactacgatgaagggcggagctttagccacgatcgccggtctggccctccacacaggggagacgaatccgggtatcgctggacaagagacgatcactccgccagcaggcagccagagtatcgtgacatgcgggacggattcaggcgaaagagtttttactcctcccactacgctagggagagaagcccttataagcgggataatacattcttccgggaaagtccggtgggaagaaaagactctccccactctcgatccggaagctcagtaagttcgcgctcatatagtcccgagagaagtaagtcatattcgttccaccagagccagcataggaagtccgtaaggcctggagcatcatacaagcgacaaaatgagggcaatcccgagcgggacaaggagcgcccagtccaatcactgaagactagccgagacaccagtccatcctcagggagcgccgtgagctcatcaaaggttttggataagccgagccgtctcactgagaaggagctagcagaggcagctagtaagtgggctgcagagaaattagaaaaatctgacgagtctaatctgcctgaaatctccgaatatgaggctgggagtactgcccctctgttcacagaccagcctgaggagccagaatccaataccacccatggaatcgagctcttcgaggactctcagctgactacacgctcaaaggctattgcctcgaagactaaggagatcgagcaggtgtatcggcaggattgcgagactttcggcatggtcgtgaagatgcttatcgaaaaagatccaagccttgaaaaatctatccagtttgccttacgccagaatcttcatgagattggcgagcggtgcgtggaggagctgaaacactttatagccgaatacgacacctccacacaggattttggagaacccttttag

SEQ ID NO: 128175 - DNA, 1305 bp, synthetic construct
  misc_feature 1..1305: note = Description of Artificial Sequence: Synthetic coding sequence
  source 1..1305: mol_type = other DNA
atgtggtcagaggggagatacgagtacgaacgaatccctcgggaacgagccccccctaggtcccatccgtctgatgagagtgggtaccggtggacccgggacgatcactccgctagtcgccagccagaataccgggacatgcgggacggattcagaaggaagtctttttatagtagccattatgctcgggaacgcagtccttataagcgggacaatacattcttccgggaatcacctgtaggtaggaaggactccccccatagtaggagcggctcttccgttagcagcaggtcgtactcccccgaaaggtcaaaatcctatagcttccaccaatcacagcatagaaagtccgtgagaccaggggcctcgtacaagaggcagaatgaaggtaaccccgagcgcgataaggagcgccccgtgcaatctctcaagacctcaagagacacaagcccatcgtccggcagcgcggtcagctcttctaaggtattggacaaacccagcaggctgaccgagaaagagctggcagaggctgcctctaagtgggcagcagaaaaactagaaaaaagtgatgaatctaacttgccagagatcagcgaatacgaagctggcagtacagcccctctgttcacagatcaacccgaggaacccgaaagcaataccacccacggcatagaactcttcgaagattctcagttaacaactcgctctaaggcaatcgcatccaagacaaaagaaatcgaacaggtgtatcggcaggattgcgagacctttggcatggtagtgaaaatgcttatcgaaaaggatcctagccttgaaaaatctatccagtttgcactccgtcagaatttgcatgagattgaatctgctgggcagacctggcagcaagtgccgcctgtccgaaacacagagatggatcacgacggaactcccgagaatgaaggtgaagagaccgctcagtcggcgctttttggattccaacatgacgcttctaaccacacgatcgtggggctggggcctaatcaggtgccagaaatgaaggagactacgcttcaggccccacagccaccgcaagccccccagccactgcagcccagaaagaagcgagttcggaggaccacccagcttcgccggaccaccggggccccggatattacctgggggatgttaaaaaagacgacccaggaggctgaaagaattctcctcagaacacagactccctttaccccggaaaatttgttcctggcaatgttgtctgtggtgcactgtaattccagaaaagacgtaaagcctgagaataaacagtag

SEQ ID NO: 128176 - DNA, 1047 bp, synthetic construct
  misc_feature 1..1047: note = Description of Artificial Sequence: Synthetic coding sequence
  source 1..1047: mol_type = other DNA
atgtggtccgaaggaagatacgaatatgagagaattccacgcgaaagggcccctcccaggtcacacccctccgacggctataataggctagtcaatattgtgcccaagaagccaccactgctggacagaccaggggagggttcctataatcgctattactctcacgtagattatcgagactacgatgaagggcggtctttcagccatgatcgccggtctggccctccacatcgtggggacgaatcaggctaccgctggacaagagacgatcacagcgcctcgcgccagccagaataccgcgacatgagggacggtttcagacggaagagcttctatagttctcactacgccagagaacggtctccctataaacgcgacaacacatttttcagggagtccccagtgggaagaaaggatagcccccacagtaggtccgggagctcagtttccagcaggtcttattcccctgagaggtccaagtcgtactcctttcaccaaagccaacacagaaacaaggagagacctgtgcagtccttgaagacgtcacgagacacgagcccatcaagtggcagcgcagtctcctcctcgaaggtactcgataaaccatctcggcttactgaaaaagaactagccgaggccgcatcaaaatgggcagcagagaagctggaaaagagcgatgagtccaacctgcccgaaatctctgagtacgaggccgggagtacagcccctcttttcactgatcagccagaagagcccgaatctaatacaactcatggcattgaactgtttgaagattcacagttaaccaccaggtccaaggctatcgccagcaaaacaaaggagatcgagcaggtgtaccgccaagactgtgaaaccttcggcatggtggtaaaaatgcttatcgaaaaagatccctccctggaaaaatcaatccaatttgccttaaggcaaaatcttcatgaaattggggaacgttgtgtggaagaacttaaacacttcattgccgaatacgatacatccactcaggactttggcgaacccttctag

SEQ ID NO: 128177 - DNA, 486 bp, synthetic construct
  misc_feature 1..486: note = Description of Artificial Sequence: Synthetic coding sequence
  source 1..486: mol_type = other DNA
atggcatatcgccgagatgagatgtggtcagaggggaggtacgaatacgaacggatccccagggaaagggctccccccagaagccacccaagtgatggatataatcggttggtcaacattgtccccaagaaacccccccttctcgataggcctggggaaggttcttacaaccgatactactctcatgtcgactaccgtgattacgatgaagggcggtcgttttcacatgaccgccgcagtggacctccacatagaggtgatgagtccgggtaccggtggactcgggacgaccattccgcctcccgtcagcctgagtacagagacatgcgcgacggatttcgtcggaagtcgttttattcctcccactacgctagggagcggtctccttataaaagagacaacactttcttcagggaatccccggtcgggcgtaaagactcccctcactcccggtctggctcaagtgtatcatctagaagttattag

SEQ ID NO: 128178 - DNA, 507 bp, synthetic construct
  misc_feature 1..507: note = Description of Artificial Sequence: Synthetic coding sequence
  source 1..507: mol_type = other DNA
atgtggtccgagggacggtacgaatatgaacgcataccaagggagagggctccaccgagatcccacccctctgatggctataacaggctggtaaacatcgtgcccaagaaacctcccctgctcgaccgacccggtgagggctcctataaccgctattattcccatgtggattatcgcgattatgacgagggacgatcattctcccacgaccgacgatctggccctccacatagaggagacgaaagtggttatcggtggacccgggacgaccattctgcgtcccggcagcctgagtaccgtgatatgcgtgacggatttcgacgaaagtcattttattctagccactacgcgcgggagaggagtccatacaagagggataataccttctttagggagtctccagtaggacggaaggactccccccacagcaggagcgggagctccgttagttcacgcagctattcccccgagcggtcaaagtcatattcttttcaccagtctcagtag

SEQ ID NO: 128179 - DNA, 960 bp, synthetic construct
  misc_feature 1..960: note = Description of Artificial Sequence: Synthetic coding sequence
  source 1..960: mol_type = other DNA
atggcttatcgacgagatgagatgtggtctgagggtaggtacgagtatgagaggattccaagggaacgtgcccccccccgctcccacccaagcgacgagtctggttataggtggactcgcgacgatcactcagcatcccggcaaccagaatacagggatatgagagacggctttagaagaaagtccttctacagctcacattacgcaagggagagatccccctacaaacgcgataataccttcttccgcgaaagccctgtgggccggaaagatagcccacacagtcggagtggatcctcagtaagtagccgctcatatagcccagaaaggtccaaaagctactcatttcatcagtctcagcataggaagtctgtcagaccgggcgcttcctataaaagacagaatgagggcaatcctgaacgtgataaggagaggccagttcagagcctgaaaactagccgtgacacgagcccctcttccgggagcgcagtatcttctagcaaagtgctggacaagccaagcaggctgacggaaaaggaactcgcggaggctgcttccaagtgggcagcggaaaaattagagaaatcagatgaatccaacctgccagagattagcgaatacgaggccggatctactgccccactttttaccgatcagcctgaagaacccgagtcaaatactacccatgggattgagttattcgaggattcccagctgactactagatccaaggctatcgcaagtaaaaccaaggaaatagaacaagtctataggcaggattgtgaaaccttcggcatggtcgtgaagatgctgattgaaaaggatccctccctcgaaaagtctatccaatttgcgctgaggcagaatttacatgaaatcggcgagagatgtgtggaggaacttaaacacttcatcgccgagtatgatacatccacacaggacttcggcgaacctttttag

SEQ ID NO: 128180 - DNA, 5271 bp, synthetic construct
  misc_feature 1..5271: note = Description of Artificial Sequence: Synthetic coding sequence
  source 1..5271: mol_type = other DNA
atgaattctctgtttcggaagagaaacaagggcaaatacagcccaactgtgcagactcggtccataagcaataaagagttgagtgagctgatcgagcagctgcaaaagaatgccgatcaggtggagaaaaacattgtggatactgaagccaagatgcagagtgacttagcaaggctacaggaaggccgccagcccgaacaccgcgatgtgacactgcagaaggtcctggattccgagaaactgttgtacgtgctggaagctgacgctgccattgctaaacatatgaagcatccccaaggtgacatgatcgcggaggacatacgccagttgaaagagcgcgtaacaaaccttcgcgggaaacataagcagatttatcggttggccgtcaaggaggtggatccccaggtgaactgggctgccctggtggaggagaagctggacaagttaaacaatcagtccttcggtacggaccttcctttagttgatcaccaggtggaggagcacaacatttttcacaatgaggtgaaagctattggacctcacctggccaaagatggggacaaggaacagaactcggagctgcgcgctaaatatcagaaattactagctgcatcccaggccagacagcagcatttatcaagcctgcaagattacatgcagcggtgcaccaatgagttgtattggctggaccaacaggctaagggacgtatgcaatatgattggagcgaccggaacttggattatccaagccggcgcagacagtacgaaaacttcataaatcggaacttagaagccaaggaagagcgcataaacaagctacactccgagggtgaccagttgttagcagcggaacatcctggtaggaattcaatagaagcccatatggaggcggtccacgccgactggaaggagtacctgaacctgttgatttgtgaggagtctcacttgaagtacatggaagactaccatcagttccacgaggatgtgaaagatgctcaagagctgttgagaaaggtcgatagtgacctcaaccaaaagtacgggccggactttaaggatagataccagattgagttgctcttaagagagttggacgaccaggaaaaagtattggataagtacgaagacgtggtgcaagggttacagaaaaggggacagcaggtcgtgcccttgaagtaccggcgcgaaaccccactcaagcctatccctgtggaagctctgtgcgatttcgagggcgaacagggcctgatctccagaggctattcgtatactttgcagaagaacaatggcgagagctgggaactgatggattcagccggtaacaaactgatcgcgcctgctgtatgtttcgtgataccaccaactgatcccgaggcactggccctggctgattccttgggctcccaatatcgatcagtgaggcagaaagccgcggggagcaaaaggacactgcaacaaaggtacgaagttctgaagactgaaaacccaggtgacgcctccgacttacagggaaggcagttgctggccgggctggacaaggtagcttctgacctcgatcggcaggagaaggctatcactggaatcttgagaccaccactcgagcagggaagagccgtacaggatagcgccgagagggctaaggatctgaaaaacattaccaatgaactgttacggatcgagcccgagaaaacacggtccacagcggaaggggaggcttttatacaggccctgccaggaagcggaactacccccctcctaaggacccgcgtcgaggatacaaataggaagtacgaacacttattacagctcttggatctggcccaggagaaggtggatgtggcgaaccggctggaaaaaagcctgcaacagagctgggaactcctagctactcacgaaaatcacctgaaccaggacgacacagtcccagagtcaagtagggtcctggactccaagggccaagaacttgccgccatggcatgtgaactgcaggctcagaagagtttgctgggtgaagtggagcagaacctgcaggcagcaaaacagtgcagctcgacgctggcgtctcgattccaggagcactgccctgatctggaacggcaggaggccgaggttcacaaattggggcagcgattcaacaatctgcgccagcaggtggaaagacgagcccaatccctccagagcgcaaaggctgcttacgagcacttccaccgcggtcacgatcacgtcctgcagttccttgtttccatcccatcatatgagccccaagaaaccgactctctgagtcagatggaaactaagctcaaaaaccagaagaacctcttggacgaaattgccagccgggaacaggaggtgcaaaaaatctgcgcaaattcacaacagtatcagcaggctgtgaaagattacgagctagaagccgagaagttaagatcattactcgatctcgaaaacggccgccgatcccacgtcagtaaaagggcccggctccagagcccggctactaaggtcaaggaggaggaagccgctctggcagcaaaattcacggaagtgtacgctattaaccgacagcgccttcagaatctggagttcgccctgaacctgttacgccagcaacccgaagttgaggtaacacacgaaaccctgcaaagaaatcgtcctgactccggcgtcgaagaagcctggaagataagaaaagagcttgacgaggaaactgaaagacgccgccagctcgaaaacgaagtaaagagcactcaggaggaaatctggacactaaggaaccaggggccccaggagagtgtcgtgagaaaagaggtccttaagaaagtccctgacccagtgcttgaagaaagctttcagcagctccaacgcacgttggccgaggagcagcacaagaatcaactgctgcaggaagaattggaggccctccagctgcagttgagagcactggagcaagaaaccagggatggaggccaagaatatgtcgtaaaggaggtcttacgtatcgagcctgatagggcccaagccgatgaggttctccagctgagagaagaattggaagcgctgaggcggcagaagggggcaagggaggctgaggtactgcttctacagcagcgcgtggccgccctggccgaagaaaagtcccgcgctcaggagaaagtcaccgagaaggaagttgtgaagctgcaaaacgatccccagctggaggcagaatatcagcagctccaggaagaccaccagcgacaggaccagctaagagagaagcaagaagaggagctgagttttctgcaggacaagttaaaacgcctagaaaaggagagggcgatggctgaaggcaaaataacagtgaaagaggtattgaaggttgaaaaggatgctgcgaccgaacgcgaagtgtcagacctgacacgccagtatgaggatgaagcggcgaaagccagagcttcccaacgcgagaaaacagagctgctgaggaagatttgggccctggaggaggagaatgccaaggtcgtggttcaagaaaaggttagagaaatagtgcgccccgatccgaaggctgagtctgaagtggctaacttgcggctggaactggtagaacaggaaagaaagtatcgaggcgccgaggagcagttgaggtcataccagtctgaacttgaggccctccgccgaaggggaccacaggtcgaggtgaaggaggtgacaaaggaagtcattaagtataagacggacccagagatggagaaggaactgcaacggctgcgagaggagattgtggacaaaactcgtctgattgagcgctgcgatctggagatttatcaacttaagaaggagatccaggcccttaaggacaccaaacctcaagtgcagacgaaggaggtggtacaggaaattctgcaatttcaggaagatcctcaaactaaggaagaggttgcctctctccgagccaaactgtctgaagagcaaaaaaaacaagtcgacctggaacgggagcgggcctcccaggaagaacagatcgcaagaaaagaggaagaattatctcgtgtaaaggagcgggtggtccagcaggaagtcgtccggtatgaagaggagcccggcctgcgcgccgaggcgagtgcattcgctgaatccattgatgtggagctgcgtcagattgacaagctgagggccgagctgaggcgtctgcagaggaggcgtactgagctcgagaggcaattggaggaactggaaagggaaagacaggccaggcgcgaagctgagagggaggtgcagcggctgcagcagagactggccgctctggaacaggaggaggcagaggcccgggagaaagtgacacacacacagaaagtcgtgctgcagcaggatccacagcaggcacgggagcatgccctactcaggctacagctggaggaagaacagcaccggcgtcagttgcttgaaggcgagctggaaacactcagacgcaagttggcggcattggagaaagctgaggtgaaggaaaaggtcgtcctctctgagtcggtccaggtcgaaaagggggacaccgagcaggagatccagagactcaaaagttctctggaagaagaatcaaggtcaaaaagagaattggacgtggaagtctcccgacttgaagcacgcctctctgaactggaatttcataactctaaatccagcaaggagctagacttcttgcgagaggagaatcataagttgcaactggaaagacagaacctacagttagaaacccgcagactccagagcgagatcaatatggccgctacagagacccgcgacctgagaaatatgacggttgccgattctgggactaaccacgattctagattatggtctcttgaacgggagctggacgatctaaagagactctctaaggacaaggatctcgagatcgacgagctgcagaagagattgggctcagtggccgttaagagggagcagagagagaatcatctgcggcgctccattgttgtgatccacccagacacgggtagggagctgtccccagaagaggcacatagggctggtctcatcgactggaatatgttcgttaagttgcggagtcaggagtgcgactgggaggagataagcgtaaaggggccaaatggtgagagctccgtcatccacgaccggaaatcaggcaagaagttttcaattgaggaagccttacagagcggacgcttgacccctgctcaatatgaccggtacgtaaacaaagacatgagtatccaggaactggcggtgttagtcagcgggcagaagtag

SEQ ID NO: 128181 - DNA, 4440 bp, synthetic construct
  misc_feature 1..4440: note = Description of Artificial Sequence: Synthetic coding sequence
  source 1..4440: mol_type = other DNA
atggcgaagcgatccagagggcctggccgccgatgcctgcttgctctcgttctcttctgtgcgtggggtaccctggcagtggtcgcacagaaaccaggggcgggatgccccagtaggtgtctttgtttccgcaccacagtgagatgcatgcacctcctcctcgaggccgtgcccgcggttgcccctcaaacctcaatcttggatctacgctttaatcgaattagagaaatccagcccggcgccttcagaaggctgagaaatttgaatacactgttactgaataacaaccaaattaagcgtataccttcgggcgctttcgaggatcttgaaaatctgaagtacctgtatctgtacaagaatgaaattcagagcatcgatagacaggcttttaaggggttagcctcacttgaacagctttaccttcacttcaaccagatagagacactagatccagacagtttccaacacctgcctaagctggagcgcctgttcttacataacaaccggatcacacatctggttccaggtactttcaatcacttggagagcatgaagagactgaggctggactctaacacattacactgcgattgtgaaatcctttggctcgctgacctgttgaaaacctatgccgagtcgggtaacgcccaggccgccgccatctgtgaataccctcgcaggatccagggccgtagtgtggcaactatcacccctgaagaactaaattgcgagcgaccacgcatcacctcagagccacaggatgccgatgtcacctccggcaacaccgtctattttacttgtcgagccgaaggtaatcccaaaccagaaataatttggctcaggaacaataacgagctctcaatgaagactgactctaggctgaatctgctggacgacggtactctgatgattcagaacacgcaggagaccgatcaagggatctaccagtgcatggcaaagaatgtggcaggggaggtcaaaacgcaggaagtcactcttcggtacttcggaagtcctgctcgacccacgtttgttatccaaccccaaaataccgaggtccttgtgggtgagtcagtgacgctagaatgtagtgccaccggacacccacccccacgtatcagctggactcggggcgataggaccccactgccagtcgacccccgcgtgaacattaccccatccggagggttgtatatccagaatgtggtacagggagatagcggagagtacgcttgttctgctacaaacaatattgactcagtgcatgccaccgcctttattattgttcaggcactgcctcagttcacggtgaccccacaagatcgggtggtcattgaggggcaaactgtcgactttcagtgtgaagctaaaggaaatccaccaccagtgatcgcctggaccaagggtggttctcagttgtccgttgaccggcgccatctggtgctgtcctccgggacccttcggatcagcggcgtggccttacacgatcaaggccagtacgaatgtcaggccgtaaatattatcgggtcccaaaaagtagtcgcccaccttacagtgcagccccgcgtaacaccagtgttcgcctccatcccatccgataccacagttgaagtgggcgcgaacgtacaacttccatgttcatcccagggcgagccagaacccgccatcacgtggaacaaagatggtgtgcaggtgacagaatccgggaaatttcatatcagtcccgaaggcttccttaccattaatgacgtaggcccagctgatgcaggcagatacgaatgcgtggctagaaatacaattggaagcgcctccgtaagcatggtcctgtccgtcaacgtgcctgatgtgtccagaaacggggacccttttgtggccacctccatcgtggaggctattgccacagtggatcgggcgatcaattctacacgcacacaccttttcgacagccgcccccgcagccctaatgatttactcgccctgtttaggtaccctcgtgacccctatacagttgaacaggcacgagccggagagatcttcgagcggacacttcagctgatccaagagcacgtgcagcatggcttgatggtggacctgaacggcacttcatatcactacaacgatcttgtctccccacagtacctcaacctgattgctaatcttagcgggtgtactgcccatcggcgcgttaacaactgctcagacatgtgctttcaccagaaatatcgaacccatgatggtacctgcaataatctgcaacaccctatgtggggagcctccctgaccgctttcgagcgattgctaaaatcggtatatgagaatggctttaataccccccgcggcatcaatccacaccgcctgtataacggacatgctttgccaatgccacggctggtctcgaccactctgataggcaccgagactgtcacccccgatgagcaattcacccacatgctcatgcaatgggggcagtttttggaccatgaccttgatagcactgtggtggccttatcccaggccaggttctctgacggtcagcactgttccaatgtgtgctccaatgatcctccatgttttagtgtaatgatccccccaaatgattctcgggcccgctcaggagcaagatgtatgttctttgtgagatcaagcccagtttgcggtagcgggatgactagcctgctaatgaatagcgtctacccacgggagcagatcaaccagctgacctcttacattgacgcttccaacgtgtatggctcaaccgagcatgaagcacgctcgatacgcgacctggcctcccaccgcggcctgctgcgacagggaattgtccaacggtcaggcaagccgctattaccttttgccaccggccctcccaccgagtgcatgagggatgaaaacgagtcccccatcccctgttttctggcaggcgaccatcgggcaaacgagcagcttggacttacatctatgcacacactctggttccgggagcacaatcgcattgctaccgaacttctgaaactcaaccctcattgggatggggatactatctattacgaaactcgtaaaatagtaggggcagaaattcagcacatcacttaccagcactggctcccaaaaatccttggggaggtaggcatgcggacactgggggagtatcatggatatgaccctggaattaacgctgggatctttaatgccttcgccacagctgctttcaggtttggacacactctggtcaacccacttttatatagacttgacgaaaatttccagcctatcgcccaagatcaccttccgcttcataaggcatttttttcaccattccgcatagtaaacgaagggggaattgatcccctgcttaggggcctgtttggcgtcgctggaaaaatgcgggtgcccagtcagctgctgaacaccgagctcactgaacggttgttctcgatggcgcatacagtcgcactggatttggccgctattaatatccaacgcgggcgagaccatggaatacccccttaccacgactaccgcgtgtactgcaatctgtcagctgcacacacattcgaggatttgaagaatgaaatcaaaaacccagagatacgcgaaaaactaaagcgcctatacgggtctaccttgaacatcgacctgttcccggcactggtggttgaagatctagtgcccggtagtcgactcggtcctacgctcatgtgcctcctttcaacgcagtttaaaagactgagagacggtgataggctttggtatgaaaaccctggggtattctctcctgcgcagttaacacaaattaagcagacctcattggctaggatcctctgtgacaatgccgacaatataaccagggtgcaatcggacgtgtttcgggtggctgaattccctcatggatatgggtcatgcgacgagattccccgggtcgaccttcgagtttggcaggattgctgcgaggactgccgtacacggggacagtttaacgctttctcatatcattttcgcgggaggaggagcctggagttttcctaccaggaagataagcccacgaaaaagacgcggccaaggaagattcctagcgtagggcgacaaggcgaacacctcagcaatagtacatccgccttcagcacccgctctgacgcctcagggaccaacgattttcgcgagttcgtgctggaaatgcagaagactattaccgatctgcgaactcagataaaaaaactggagagccggctaagcacaacagaatgcgttgatgctggcggggagtctcacgcaaataacaccaagtggaaaaaggatgcctgtacaatttgcgaatgcaaagacggccaggtgacatgctttgtggaagcctgtccgcccgccacttgcgcagttccagtcaatatccccggcgcctgttgccctgtctgtcttcagaaaagagcagaagagaaaccatag

SEQ ID NO: 128182 - DNA, 2172 bp, synthetic construct
  misc_feature 1..2172: note = Description of Artificial Sequence: Synthetic coding sequence
  source 1..2172: mol_type = other DNA
taaagggggcccgggaggaggtgtctgcttgctcttgtcctgttctgcgcctggggaactctcgcggtcgtggctcaaaagccaggtgccgggtgccccagcagatgcctctgctttaggactacggtgcggtgtatgcacttgttgcttgaggccgtgccagccgtcgctcctcagaccagtatcctcgatcttagattcaatcggattagagagattcagccgggggcatttagaagactgcggaatctgaacacattgttactgaataacaatcagataaagagaattcccagtggcgcatttgaggatcttgaaaatctgaagtacctgtatctgtacaagaacgagatacagagtattgaccgccaagccttcaaaggactggcaagtctggagcagctttacctgcatttcaaccagatagagacgctcgatcccgactcctttcagcacctcccaaaactggaaagactcttcctccacaacaaccgcataacccacttggtgccagggacgtttaatcatttggagtcaatgaaacggttgcgactggactctaacaccctgcattgtgattgtgagattttatggctggcggacttgctgaagacttatgctgagagcggaaatgcacaggccgctgctatctgcgagtatccgaggcggatccagggcaggagcgtggccacaatcacacccgaagagctgaactgtgagcgcccccgcatcacatccgaaccccaagacgcagacgtcaccagcggaaatacagtgtacttcacatgcagggccgaaggcaaccccaagcctgagatcatctggctacgcaataataacgagctttctatgaagaccgatagtcggttaaatctgctagacgatggcaccttgatgatccagaatactcaggagaccgaccagggcatctaccagtgtatggccaagaacgtggctggcgaagtaaaaacgcaagaggttaccctgaggtacttcggctctccagcacgtcctactttcgtcattcagccacagaacactgaagtgctggttggagaatccgtgacattggaatgctcggctactggccacccacctccaagaatatcatggactcggggtgaccgaaccccgcttcctgtcgatcctcgcgttaacataactccatcaggaggtctctacatccagaacgtggttcagggcgactccggtgaatacgcatgctccgctaccaacaatatagatagcgtccatgccactgccttcatcattgtgcaggccctccctcagtttaccgtgacaccccaggatagagtcgtgattgaaggccagacagtcgattttcagtgtgaggcaaagggcaatccaccccctgtaatcgcctggaccaagggtggctcccagctcagcgtcgaccgtcgtcacttggtgctcagcagcggcaccttgcgcatcagtggagtggcactgcacgatcagggacagtatgaatgtcaagcagtgaatatcatcgggagccaaaaagtcgttgcccaccttaccgtccaacctcgggtcaccccagttttcgctagcattccctcggataccacagtcgaggtgggcgccaatgttcagctgccttgtagctcccagggggagcccgagccagcgattacttggaacaaagatggcgtccaggtgacagaaagcggtaagttccacatatcaccggagggcttcctgacaatcaacgatgtgggacctgcagatgcaggtagatatgaatgcgtggcccggaacactataggatccgctagtgtttcgatggtcctcagcgtgaatgtgccggacgtgtctaggaatggtgatccttttgttgcaacctccattgtggaggccatagccactgtggatcgtgctattaacagtactcgaactcacctgttcgacagcaggccacgttcacctaatgatctgttggcacttttccggtatccaagagacccttacactgttgagcaagctcgcgctggcgagatcttcgagagaacattgcagctgatccaggagcacgtccagcacgggcttatggtggatttgaacggcacaagtcagtgccagagcttgttctttctgctgcacggtctcagcaacggtgtcgagcacgcctccgtgaagtcccactcctag

SEQ ID NO: 128183 - DNA, 771 bp, synthetic construct
  misc_feature 1..771: note = Description of Artificial Sequence: Synthetic coding sequence
  source 1..771: mol_type = other DNA
atggcagccgccgtcggccgactgctcagagcctctgtagccaggcatgtaagcgcaataccatgggggatttcggcaacagccgctctgcggcccgctgcatgcgggagaacttcactgactaacctgctttgctccggctcgagtcaggcgaaactgttttctacctccagttcctgtcatgcccctgccgtgacccaacatgccccctactttaagggaaccgccgtcgtaaatggggaatttaaggacctgagcctcgacgattttaaaggcaaatatcttgtgctattcttttacccgttggattttacatttgtgtgtccgaccgagattgtggcctttagcgacaaggccaatgaatttcatgacgtaaactgtgaggttgtggccgtcagtgtggactcccacttcagccatttagcctggattaatactcctcggaagaacggtggccttgggcacatgaatatagccctgttgagtgatttgacaaagcagatcagcagggactatggcgtgcttctagagggcagtggtctggcgctcagagggctgttcatcattgaccccaatggcgtaattaagcacctgtccgtaaacgatctgccggtcggccgatctgtggaggagaccctgcggcttgtgaaggcgtttcagtacgtggaaacccacggcgaagtgtgccctgcgaattggacacctgattctcccacaatcaagccctccccagcagcttccaaggagtacttccagaaagtcaaccagtag

SEQ ID NO: 128184 - DNA, 717 bp, synthetic construct
  misc_feature 1..717: note = Description of Artificial Sequence: Synthetic coding sequence
  source 1..717: mol_type = other DNA
atggctgcggctgtggggcgcctgctgcgagcctccgtggctagacatgtgtccgctattccatggggtatctccgccacagccgccctgcgacccgccgcttgcggcaggacatcgctgactaacttgctttgttctggctccagtcaggccccgtactttaaagggacggcagttgtaaatggggaattcaaagatctcagcctcgacgattttaagggcaagtacctggtcctctttttttaccctctcgatttcaccttcgtgtgtccaaccgaaatcgtcgcattcagcgataaggccaacgagttccacgatgtgaactgcgaggtagtagccgtgagcgtggatagccatttttcccacctggcatggatcaacacccccagaaagaatggaggcctcgggcacatgaacatcgccctgctaagcgacctgaccaagcaaattagcagggattacggagtgctcttggagggtagcgggctggcactcagaggacttttcattattgatcctaatggtgtcatcaaacacctgtccgtgaatgacctgccagtggggcggagtgtggaggagacattgaggctagtaaaggcctttcaatatgtggaaacacacggggaagtatgtccagcaaactggactccggactctccaactataaaacccagtcccgccgccagcaaggaatatttccagaaagttaaccaatag

SEQ ID NO: 128185 - DNA, 645 bp, synthetic construct
  misc_feature 1..645: note = Description of Artificial Sequence: Synthetic coding sequence
  source 1..645: mol_type = other DNA
atgggacttgctggggtctgcgccctcaggcggtccgcgggttatattttggtggggggtgccggagggcagagtgcagctgcagctgcccgccgatattctgagggagagtgggcttcaggtggcgtacggtctttcagccgagctgccgctgccatggcaccaattaaagtaggagatgccatcccggcggttgaggtttttgaaggggagcccggtaacaaggtaaacctggcggagttgttcaagggcaaaaagggagtgctgttcggggtgccaggtgccttcacaccaggctgcagcaaaacacatctccctggatttgtggagcaggccgaggcacttaaggccaaaggcgttcaggttgtggcctgcttgagcgtaaacgatgccttcgttactggtgagtggggccgggcccataaagcagagggaaaagtccgtctgctcgctgatccaaccggcgcctttggcaaggaaacagacctgctgctcgatgatagcctggtcagtattttcgggaatcgcaggctgaaaagattcagtatggtggttcaggatgggatcgtgaaagctctcaatgtggagcccgacggcactggacttacttgcagccttgcaccaaatattatatcacagctgtag

SEQ ID NO: 128186 - DNA, 378 bp, synthetic construct
  misc_feature 1..378: note = Description of Artificial Sequence: Synthetic coding sequence
  source 1..378: mol_type = other DNA
atggggctggccggtgtgtgcgccctccgcaggtcggccggatacatactggtcggaggagccggtgggcagagtgctgccgcggcggctaggaggtactccgagggcgaatgggcttctgggggagtccgatcatttagcagagcagccgcagcaatggcccccattaaggtgcgcctcttggccgatccaacaggagcttttggcaaagaaactgacctcctgttagatgacagtttagtgagcatttttgggaacaggcggctgaaacggttttccatggtggtgcaagacggcattgtcaaggccctgaacgtagagccggatgggacaggtttaacctgttcactggcccctaacattatctcacaactctag

SEQ ID NO: 128187 - DNA, 513 bp, synthetic construct
  misc_feature 1..513: note = Description of Artificial Sequence: Synthetic coding sequence
  source 1..513: mol_type = other DNA
atgggcctggccggtgtatgcgctctacgcagaagcgccggctatatcctggtgggcggcgccggtggccagagcgcagccgctgcagctaggcgatattctgagggagagtgggcttccggcggcgttcgatctttttcccgggctgctgcagcgatggccccaatcaaggtgggagacgccatacccgccgtcgaggtcttcgaaggcgagccgggaaacaaagtaaacttagccgaattgttcaagggcaagaagggtgttctgttcggagttcctggcgcctttacaccaggatgtagcaaggtgagattactagccgacccaactggagcctttggtaaggagaccgacctgctactagatgattccctggtctctatctttggaaacagacgtctaaagcgcttctcaatggttgttcaggatggcattgtcaaggcgctgaacgtcgaacccgatggcaccggcctaacctgttcactggcccccaatatcatcagccaactctag

SEQ ID NO: 128188 - DNA, 675 bp, synthetic construct
  misc_feature 1..675: note = Description of Artificial Sequence: Synthetic coding sequence
  source 1..675: mol_type = other DNA
atgcctgggggcctattactaggggatgtggctcctaatttcgaagccaataccaccgtgggacgcataaggttccacgacttcttgggcgattcttgggggatcctgttctcacacccaagagattttacgcctgtttgtaccactgagcttggccgcgccgccaagctggcccccgagtttgcgaagcgaaacgtgaagcttatcgctctgtctatcgactccgtggaggatcatcttgcatggagtaaagatattaacgcctacaactgcgaggaacctactgagaagctgcccttccctatcatcgatgaccgcaaccgcgagctggcaatcctgctggggatgttggaccctgctgaaaaggacgaaaaagggatgcctgtaactgccagagtggtgttcgttttcggccctgataaaaaactcaaattatcgatattgtaccctgccaccacaggcagaaacttcgatgaaattttacgagtggtcataagtctgcagctcactgcagagaagagagtggctactcccgtcgattggaaagacggagactcggtgatggtgctgcctacaattccagaggaagaggcgaaaaaactgtttccaaaaggagtgtttaccaaggagcttcctagcggcaagaaatatctgaggtatactcctcagccctag

SEQ ID NO: 128189 - DNA, 3852 bp, synthetic construct
  misc_feature 1..3852: note = Description of Artificial Sequence: Synthetic coding sequence
  source 1..3852: mol_type = other DNA
atgtggggctctgatcggttagcaggagccggaggggggggcgctgcggtaactgtcgcattcacgaatgcaagggattgctttctacacttgccaaggagacttgtggcccaacttcatctgctacagaatcaggctattgaggtcgtatggtcccaccagcctgcattcctcagctgggtggaaggccggcacttttccgaccagggagagaacgtggccgagatcaacaggcaggtaggccagaagcttgggctcagcaacggcgggcaggtcttcctcaagccctgcagccatgttgtttcttgccaacaggtggaagtggagcccctgagtgcagacgactgggaaatcttggaactgcacgcagtatctctcgagcaacacttgctggatcagatcaggatagtctttcccaaagctatttttcctgtgtgggtggaccaacagacgtacatcttcatacaaatcgttgccctaattcccgcagcctcttatggacggctggagaccgacactaagcttttgatccaaccgaaaacccggcgggcaaaggaaaatactttttccaaggcagatgcggaatacaagaagctgcattcctacggacgcgatcagaagggaatgatgaaagagctgcagaccaaacaacttcagtccaataccgtcgggattaccgaatccaatgaaaatgagtccgagatccccgtggattcttccagcgtagcatccttatggacaatgatcggcagcatctttagctttcagtccgaaaagaagcaagaaacgtcgtgggggttgaccgagattaatgcctttaagaatatgcaatctaaggtcgtgccactggataatatctttagagtttgcaaatctcaacctccatcgatttacaatgcgtcagctaccagcgtgtttcacaagcactgtgcgatccatgtcttcccttgggatcaagagtattttgatgtggagccatcattcactgtgacatacggcaagctcgtgaagctgctaagccccaagcagcagcagtcgaaaaccaaacagaacgtgttaagtccagaaaaggaaaaacaaatgtccgagccgctggatcagaagaagattcgtagcgatcataatgaggaggacgagaaggcttgtgtgttgcaggtggtgtggaacggcttggaggagctgaacaatgccatcaagtacactaagaatgtggaggtgctgcatctgggcaaggtttggatccccgatgaccttcggaaaagactgaatatagaaatgcacgccgtggtcaggattaccccagtggaggtgactcccaagatcccacgaagcttgaagcttcagcctcgcgagaacctgccgaaagatatctcggaggaggatatcaagacagttttttacagctggcttcaacaatccacaacgacaatgctgcctctggtgatttccgaggaggaattcattaagctcgagacgaaagatggcctgaaagagttctcactgagcatagtgcactcctgggaaaaggagaaagacaaaaatatctttctgctgagtccaaacctcctgcagaaaactaccatccaagtgctgctggatcccatggtcaaggaagagaatagtgaagagattgatttcatcctcccattcctaaaactgtccagcctgggaggcgtcaattccctgggtgtaagttccctagaacatatcacacacagtctcttaggtcggcccctgagcagacagctgatgtccttggtggccgggctccgcaacggcgccctgttacttactgggggtaagggatctggcaagagtacgctcgcgaaggccatttgcaaagaggcatttgacaagctcgatgcccacgtggaacgggtcgattgcaaggctcttagaggaaaaagacttgagaatatccagaaaacactggaggtggctttctctgaggcagtgtggatgcaaccctctgtcgtcctcttggatgacctagacttaattgctggcttgcccgctgtacccgagcacgagcacagcccggatgcggtgcagagtcagcgcctggcgcatgcattgaatgacatgattaaagaattcatctccatggggagtctcgtcgctctgatcgccacatcgcagtcccagcagagcctccatccccttctggtctcggcccagggtgtgcacatattccaatgtgtccagcacatccagcctcctaaccaagagcagcgctgtgagattctttgcaatgtgattaaaaacaaacttgattgcgacatcaacaaatttacagatttggacctgcagcacgttgccaaggaaacggggggctttgtggctcgcgactttacggtacttgttgaccgcgcaatccacagccggcttagtagacaatctatttcaactagagagaagcttgtgctgactaccctggacttccagaaagctctgcgcggatttctgccggcaagcctacgatctgtcaacctgcataaaccaagggacctgggctgggataagatcggcgggctgcacgaagtgaggcagatcttgatggacactatccaattacccgccaagtaccccgagctgtttgccaatttacccatccgccagcggaccggaatcctgctctatggccctcccggcacaggtaagaccctgctcgccggagtgatcgctcgtgaatctcgcatgaatttcatctctgtcaaaggaccggagctgctcagcaaatacatcggtgctagcgaacaagccgtgagagacattttcatacgggcacaggcagccaaaccatgtatcctctttttcgatgaattcgagtccattgccccaagaaggggtcatgataataccggggtcaccgacagggtggtgaaccagctgctcactcagctggacggcgtggagggattacaaggggtctatgtccttgcggccacttcacggcccgaccttatcgatcccgccttgctccgaccagggcggctggataagtgtgtttattgtccacccccggaccaggtgagccggctggagatattgaatgttctgtccgatagcctccctctggccgacgacgtcgacctccagcacgtggcctctgtgaccgatagcttcacaggagcagacctcaaggcactgctgtacaatgcccagctggaagctctgcatggcatgctcttgagctccggactacaggatgggtcttccagctcggatagtgatctttctttgagtagtatggtgtttctgaaccactcctcaggctctgacgacagcgctggggacggcgagtgcggcctggaccagtccctcgtgtccctggaaatgtccgaaattcttcccgacgagtcgaaattcaacatgtatcgattgtacttcggaagttcatacgaatctgagctggggaacggcacatcaagtgatctgagctcccaatgtctgtccgctcctagttctatgacccaggacttgccaggtgtcccgggcaaagaccaattatttagtcagcctcccgtactgcgcacagcaagccaggaggggtgtcaagagctgacgcaagaacagcgagaccagctccgggcggacattagcattatcaaaggtcgctaccggagccagtctggcgaagatgagtctatgaatcaacccggcccaattaagactcgtctcgcgatcagtcagtctcatcttatgacagctttgggccacacccgcccttccatttctgaagacgattggaaaaatttcgcagaactgtacgagtcgttccaaaaccccaaacggagaaaaaaccagtccggtactatgtttcgaccggggcagaaagtcacattagcttag

SEQ ID NO: 128190 - DNA, 3681 bp, synthetic construct
  misc_feature 1..3681: note = Description of Artificial Sequence: Synthetic coding sequence
  source 1..3681: mol_type = other DNA
atgtgggggagtgaccgcctggctggagcggggggaggcggcgctgctgtaaccgttgcattcaccaatgcccgggattgttttttacatctgccacggcgcctcgtggcacagctgcatttgctccaaaaccaggctatagaagtggtttggagccatcagcccgcctttctatcttgggtagagggacgccatttcagcgaccaaggggagaatgtggccgaaattaatcggcaggtgggtcagaagctggggctctctaatggcgggcaagtattcctcaagccatgttcacatgtggtttcctgtcaacaggtcgaagtggagccactgtctgcagatgattgggaaattctggagctccacgccgtgtccttggagcagcacctgttagaccaaataagaatcgtgtttcctaaagccatctttccagtgtgggttgaccagcagacctatatcttcattcagatcgttgccctgattccggcagctagttatggtcgtctagaaaccgacaccaagctgctgatacagccgaagacacgtcgtgctaaggaaaatacgttcagtaaggcagacgctgagtataagaagctccattcatacggaagagatcagaaagggatgatgaaggaattacagactaaacagcttcagtccaacaccgtgggcattactgaatccaatgagaacgagtcggaaatccccgttgattcctctagcgtggcaagtctgtggactatgatagggtccatcttttcctttcagtcggagaagaagcaggaaacctcatggggtcttaccgagatcaatgcttttaagaacatgcaatcaaaggtagttccattggacaacattttcagggtgtgcaagtctcagccaccatctatctacaacgcatcagcgactagcgtctttcataaacactgcgcaattcacgtctttccatgggatcaagaatactttgatgtggagccatcgttcactgtgacttatgggaaactggttaagctcctgtctcctaagcagcagcaaagcaagaccaagcagaacgtgctttcccccgaaaaggagaagcagatgtcagaacccttagaccagaagaagataagaagcgatcacaacgaagaggatgaaaaggcctgcgtcttacaggttgtttggaacggtctagaagagttgaacaacgccataaaatacaccaaaaacgtggaagttcttcacctggggaaggtttggatacccgacgatctgagaaaaagactgaacatagaaatgcatgcagtcgtgcgaatcaccccagttgaagtcacacccaaaatccctaggtctctcaagctgcagccaagagagaacctgccaaaagacatctctgaggaagatattaaaacagtgttctactcctggctgcagcaatcgacaacaacaatgttacccttagtgattagcgaagaagaattcattaagttggagaccaaggacggactcaaggagtttagcttgagcatcgttcactcatgggagaaagaaaaggataaaaacatcttcttactgagccccaatctgttgcaaaaaaccacgatacaggtactgctggacccaatggttaaggaagagaatagcgaggagattgatttcatcctgcctttccttaagctcagcagcctgggaggagtgaactctttaggtgttagttcacttgagcatatcacacactcactgttgggacgccccctgagtaggcagttgatgagcctggtggccgggctgaggaacggtgctctactccttactggaggcaagggcagtggtaagtccactcttgccaaagccatatgcaaagaagccttcgacaaactggatgcacacgttgagcgcgtcgattgcaaggcactcagagctttgaatgatatgatcaaggagttcatcagcatgggctctctcgtggccttgatcgcgacttcccaatcacagcaaagcctacaccccttgctggtgtcagcacagggcgtgcacatctttcagtgtgtgcagcacattcagccacccaatcaggagcagaggtgtgaaattctgtgcaatgtgattaaaaacaaattggattgcgatatcaacaaatttaccgacctggacctgcagcacgtcgccaaggagacaggaggattcgtggctcgggactttactgtgctcgtggatcgcgctatccacagtaggctgagccgccagagcatcagcactcgagaaaaattggttcttactacactagatttccagaaagcgttgagaggcttccttccagcctctttgcggagcgtcaatcttcataagcctagggacctggggtgggacaaaatcggcggcctgcatgaagtccgccagatcttgatggacaccattcagctgcctgccaaatatccagagctgttcgccaacctcccaatcagacagagaacagggattctgctgtatggaccaccaggcacaggtaaaaccctgctggccggagttatagctcgggagtcacgaatgaatttcatctccgtgaagggaccagaactcctttcgaagtacattggggctagcgagcaagctgttagggacatctttatacgagctcaggctgccaagccctgtattctgttctttgacgagtttgaaagtattgcgccgaggcggggacacgataacaccggggtcactgacagagtggtcaatcaacttctgactcagttagatggtgtggagggcctacagggcgtatatgttctcgccgcaacatctaggcctgacctgatcgatcctgccctcctgcgcccgggtcgcctggacaagtgtgtctactgtcctccaccagaccaagtctcacgactcgagatcttgaacgtgctcagcgactccttgcccctggccgatgatgtcgatctgcagcacgtagcttctgttactgattcattcaccggcgctgacctcaaggcattactctataatgcacagctcgaggctctgcatggaatgttgctgtccagtggcctccaggacggtagcagtagctccgacagcgacctgtcgctgtccagcatggtgttcctgaaccacagctctggaagtgacgatagcgccggcgatggggagtgtggtctcgaccagtcacttgtctccctagagatgtctgaaattcttcctgatgaaagtaaattcaacatgtataggttgtacttcggctcttcctatgagtccgagctgggtaatggtacgagcagtgacctttctagccagtgcctgagcgccccctcttccatgacgcaggaccttccaggagtgcctggaaaggaccagttattttcccagcctcccgtgctccgtacagctagccaggagggttgccaagaactcactcaagaacagagggatcaactccgggcagacatttccatcatcaagggaaggtaccggagccaaagcggggaagatgagagcatgaatcaaccaggtcccatcaagacccgcctggcgatctcacagagccatctcatgaccgccctgggacatactcgaccatcaattagcgaggatgattggaagaatttcgctgaactgtacgaaagttttcagaatccaaagcgtagaaaaaatcaaagcggcactatgtttcgtccgggccagaaggtcacccttgcatag

SEQ ID NO: 128191 - DNA, 483 bp, synthetic construct
  misc_feature 1..483: note = Description of Artificial Sequence: Synthetic coding sequence
  source 1..483: mol_type = other DNA
atgagcctcgtcgctggactccgcaacggggcgttgctgctcactggaggaaagggctccggtaagagtacactggctaaggccatatgcaaggaggcattcgacaaactggacgcgcacgtagaaagagtggactgcaaggctctgagaggcaagcgcttagaaaatatccagaagacactggaggttgccttttccgaagctgtgtggatgcagccgtcagttgtcttgcttgatgatctcgatctgattgctggcctccccgctgtccctgagcacgagcatagtcctgacgctgtgcaatctcagcgactcgctcacgcgctaaatgatatgattaaagaatttatcagtatgggcagcttagtggcccttattgccaccagccaaagccagcagtccctgcacccgctgctggtcagcgctcagggggtgcacatctttcagtgcgtccagcacattcagccccctaatcaaaattag

SEQ ID NO: 128192 - DNA, 1899 bp, synthetic construct
  misc_feature 1..1899: note = Description of Artificial Sequence: Synthetic coding sequence
  source 1..1899: mol_type = other DNA
atgtgggggagcgaccggttggccggcgctggcggaggcggagcggctgtcacagtcgccttcactaacgctcgcgattgcttccttcatttaccgaggcgccttgtggcacagctccatcttctgcagaatcaggccattgaggtggtgtggagccatcagcctgcattcctatcatgggtggagggtagacactttagcgaccagggggagaacgtggctgaaatcaaccgccaagtgggccagaagctgggactctccaacggtggacaggtgtttctgaaaccttgtagccatgttgtcagctgtcagcaagtggaagttgaaccactctcagccgacgactgggagattctcgagttgcacgctgtgtcactcgaacaacaccttttagaccagatcaggatcgtgtttcccaaggccattttcccagtgtgggtggaccagcagacctatatcttcattcagattgtggccctcattcccgccgcatcctatggccgattggagacggataccaagttgttgattcagcctaagacgcggcgcgctaaagaaaatactttcagtaaggccgatgctgaatacaaaaagctgcattcctacggccgcgaccaaaaaggcatgatgaaagagctgcagacaaagcagttacagtctaatacagtgggcattacagagagcaatgaaaacgagtctgagatcccagtggacagctcctccgttgcttctctgtggactatgatcggcagcatctttagctttcagtcagagaaaaaacaggagacctcctgggggctgaccgaaattaatgcttttaaaaatatgcagtccaaggtcgttcctctggacaatatctttagagtttgcaagagccagcctccaagcatatataacgcttcagccacaagtgtgttccataaacactgtgcaattcatgtgttcccttgggaccaggagtacttcgacgtggaaccttcatttacggtaacatacggaaagctggtcaaactcctgagtccaaagcaacaacagtctaaaactaagcagaacgttctcagtcctgaaaaggagaagcagatgagcgaacctctggatcagaagaagatccgtagcgatcataacgaagaagatgagaaggcatgcgtgttacaagtcgtatggaatggattagaagaactcaacaatgccatcaaatacaccaagaatgtggaagtcctgcatctggggaaagtttggattccagatgacctgaggaaacgcctgaatattgaaatgcatgcagtggtccggatcacgccagtggaggtaactccaaagattccgagaagtctgaagctgcaacccagggaaaatctccccaaggatataagcgaggaggatatcaagactgtcttttacagctggcttcaacagtcgactacgactatgcttccactggtgatttcagaggaggagttcattaagctagaaacaaaagacggtcttaaggagtttagcctgtcgattgtgcacagctgggagaaagagaaggacaagaacattttcctgctgtcccccaacttgctccagaaaaccacaattcaggtgctccttgatcccatggtgaaggaagaaaacagcgaggaaattgacttcattctcccgtttctcaagctcagtagcctaggtggggtgaatagtctgggagtgagtagcttagaacacattacgcattctttactcgggagaccacttagtagacaactgatgtctctcgtcgcgggcctcaggaacggagccctgctcctgacggggggaaagggcagcgggaaatccacgctggcgaaagctatctgtaaagaggcattcgataagctggacgcccacgttgaacgcgttgactgtaaagctctgtag

SEQ ID NO: 128193 - DNA, 1041 bp, synthetic construct
  misc_feature 1..1041: note = Description of Artificial Sequence: Synthetic coding sequence
  source 1..1041: mol_type = other DNA
atggcccccgcagctgcttctcctcccgaggtcatacgagctgcacaaaaggacgagtactacagaggaggactgagaagcgctgctgggggcgcactgcacagccttgccggtgcgagaaagtggcttgagtggcgaaaggaagtcgagctactgtccgatgtcgcctactttggcctcacaaccctggccggctatcagaccctgggagaggagtacgtgtccattattcaggtagatccttcgcggatccacgtgccctcgtcacttcgacggggcgtgctggtcacactgcacgctgtactaccatacctgctggacaaagccttactgccgttggagcaggaactacaagcagatccggacagtggcaggcctctgcaaggcagcctcgggccaggcggaagaggctgcagcggggctagacgctggatgcggcaccacacagctactctcactgaacagcagcgtcgggctctgctccgcgcagtattcgtgttacgacagggcctagcgtgcctacagcggctgcatgtggcttggttttatattcatggcgtattttaccatttggccaagagattgaccggcatcacataccaggctcttagaccggatcctcttagggttctgatgtcagtggctccgtccgctctccagttgcgggtgcggagtttaccaggcgaggaccttagggccagagtgagttataggctgcttggcgtgatcagcctgctacatctggtattgtctatgggcctgcagctctacggcttcaggcaacgccagcgcgcgagaaaagagtggcggctgcatcgaggcctttctcaccggcgcgcatcactggaggagcgtgccgtttcacgcaaccctctgtgcaccctctgcttagaagaacgcaggcacccaacggcaacaccatgtggccacctgttctgttgggagtgtatcacagcttggtgctccagcaaggcagaatgtcctctgtgtcgggaaaaatttccccctcagaaactcatttacctgcggcattacagatag

SEQ ID NO: 128194 - DNA, 981 bp, synthetic construct
  misc_feature 1..981: note = Description of Artificial Sequence: Synthetic coding sequence
  source 1..981: mol_type = other DNA
atggcacccgccgctgcctctcctcctgaggtaatcagggccgcccagaaggacgaatattaccgtgggggcctccgaagcgccgcaggaggggccttacactccctagcaggggcaagaaaatggctcgagtggcgcaaggaggtcgagctcctttccgacgtggcctacttcggtctcaccactctggccgggtaccagaccttaggagaagagtacgttagtattatacaggtcgatccatctaggattcacgtaccttcctcacttagaaggggagtgttggtgactttgcacgctgtgctgccttacctgctagataaggcactgttgccgctcgaacaggaattgcaggccgatcccgacagcgggagacctctgcagggatcattgggccctggcgggaggggctgtagcggcgctaggagatggatgcgacatcatacagccactttaaccgagcaacagcgaagggcactccttcgtgctgtgttcgtgctacgtcaggggctggcttgcctccagaggctgcacgtcgcttggttctatatccacggagtcttttaccacctggctaaacggctcacaggaatcacatacctgagggttaggagcttgccaggcgaagacctgagagctcgcgtgtcataccggctgctgggggtaataagtctattacaccttgttctatccatgggtctgcagctctatggttttcgccagcgccagagagcgcgcaaggagtggcgcctgcacaggggtctgtcccaccgtagggcctctctggaggaacgggcagtgtcacgaaatcccctctgcacactctgcctggaggagcgtcggcatccaactgcgacaccctgcggccatcttttctgttgggaatgtatcacagcttggtgttcgagcaaggcagagtgcccgctgtgtcgggaaaagttcccgccgcagaaactcatctacctgagacattatcgctag

SEQ ID NO: 128195 - DNA, 744 bp, synthetic construct
  misc_feature 1..744: note = Description of Artificial Sequence: Synthetic coding sequence
  source 1..744: mol_type = other DNA
atggacgcatttacgagatttactaaccagacacaaggccgggatcgcctgtttcgtgccacacagtacacatgcatgctgctccgttatctgctcgagcccaaggccggcaaagagaaagtcgtgatgaaactcaaaaaactggaaagcagcgtgagcactggacgtaagtggtttaggcttggcaatgtcgtccacgccatacaagctaccgaacagagcattcatgccaccgacttagtccctcgcctttgcctgaccttggccaacttgaaccgggtcatttacttcatctgcgacactatcctgtgggtgcgatccgtcggcttgaccagtggaatcaacaaggagaagtggagaaccagagcggcccatcattactactatagcctgctgctgtccctggtcagggacctctatgaaatctctctgcagatgaaacgcgtgacgtgcgaccgggccaagaaggaaaaaagtgcttcccaagaccccctgtggttcagtgtcgccgaggaagagacagagtggctccagtccttcctcctgctgcttttccggtcgctgaagcagcacccaccacttctactggacacagtgaagaacctttgtgacattctcaatccccttgaccagctgggcatatacaagagcaatcctggtattatcggccttggcggtctcgtctcctccatagcaggcatgattactgtggcttatcctcagatgaagctgaagacacggtag

SEQ ID NO: 128196 - DNA, 1209 bp, synthetic construct
  misc_feature 1..1209: note = Description of Artificial Sequence: Synthetic coding sequence
  source 1..1209: mol_type = other DNA
atgccatggaagctgtggcgcggcagtgtgggctgccctggggacctctcctctgacggtcttctattcaggttgggacctcctaaaccaccaacagaattagagccggaaccggaaatagagggtctgctcacacctgtgctagaagccggggacgtggatgaaggaccagtggcccgcccactctcaccaacacgcctgcagcccgccctgccgccggaggcgcagtccgttcctgagcttgaggaggtggcccgtgtcctcgctgagattccacgacccctgaaacggcgggggagcatggaacaagcacctgccgtggccttgccacccacacacaaaaagcagtaccagcagatcatatctcgactgtttcatagacatggaggccctggtcctggcgggcctgagccagaactcagtcctattaccgaagggtccgaggcaagggctggccctcctgcacctgcaccccccgcaccaattcctccacccgctccttctcagtcttccccacccgagcagccccagagcatggaaatgcgatcagttctgagaaaagctggctctcctagaaaggctaggcgagccagactcaatccgcttgtgttgctgctcgacgccgccctaactggcgagttggaggtcgttcagcaggctgtcaaagaaatgaacgacccctctcaacccaatgaagagggaataacagctctgcataatgccatctgcggtgctaattatagcattgttgacttcctgattaccgccggagctaatgtgaactcaccagactctcacggttggactcctttgcactgtgcagcctcatgtaacgataccgtgatctgcatggcacttgttcagcatggtgccgccatctttgcaaccaccttaagtgacggggccacagcttttgaaaagtgcgacccttatagagaaggttacgcagattgcgcaacttaccttgcggacgttgagcaatccatgggcctgatgaatagtggagctgtgtacgccctgtgggactactctgctgagttcggcgacgagctgtccttcagagagggcgaatccgtgaccgtgttacgacgggatggacccgaagagacagactggtggtgggcggctctgcacggccaagagggctatgtccctagaaattactttggcttgttcccacgcgtcaagcctcaacgatctaaagtctag

SEQ ID NO: 128197 - DNA, 507 bp, synthetic construct
  misc_feature 1..507: note = Description of Artificial Sequence: Synthetic coding sequence
  source 1..507: mol_type = other DNA
taataccgcggccgggacaggctcattcgggtgctgggatattgttgccagctggtaggaggcgtgctggtggagcaatgtcctgcaagaagtgaggtggggacccgcttgctggtggttagcacacaattaagccactgtcgcaccatccttagactgtttgatgaccttgcaatgttcgtttatactaaacagtatggcctcggggcccaagaagaggatgcattcgtaagatgcgtctctgtgctgggcaatctggccgaccagttgtattacccttgcgagcatgtcgcctgggccgcagacgctagagtgctgcacgtggactcttcccgatggtggacactctcaacaactttatgggctttgtctttactcctgggcgtggcccggtctctatggatgctgcttaaactcagacagcgactgagatctcctacggctcctttcacctccatgtatcaggccgccagggccggtggccaagccgaggctactactccctag

SEQ ID NO: 128198 - DNA, 1212 bp, synthetic construct
  misc_feature 1..1212: note = Description of Artificial Sequence: Synthetic coding sequence
  source 1..1212: mol_type = other DNA
atggcctctcagcctccccccccgccaaagccgtgggagacgaggcggatcccaggggccggacctggacccggcccaggccctacgtttcagtcggcagacctcggacccacactgatgaccagacccggccagcccgctctgactagagttccaccacctatacttccgaggccaagccagcagaccgggtcttcttccgttaacacattccgccccgcttactcaagtttcagttccggctatggcgcatacggcaactccttctacggaggttactcaccatacagttacggctacaatggcctcgggtataaccgcctgcgagtggatgacctgccccccagtcgcttcgttcaacaggccgaggagtcttccaggggagcgtttcagagcattgaaagcattgttcacgcattcgcgagcgtgtcaatgatgatggatgctactttctctgcagtttacaactcgtttagagctgttcttgatgtggcaaaccatttcagcaggctgaaaatccactttactaaagtgttctccgccttcgcgctggttagaaccattcgctacctctatcgtcgccttcaacgaatgctcggtttgaggaggggcagcgagaatgaggacttgtgggctgaatccgaaggtacagtggcatgcctgggagccgaggatagagcagccacctccgcaaagtcttggccgattttcttatttttcgccgttatccttggaggaccctacctgatctggaaattactatcaacgcactccgacgaggttacagacagtattaattgggcatccggtgaggacgatcacgtggtggcccgcgccgaatacgacttcgctgcagtttccgaggaggaaatctcctttagggcaggagacatgctgaaccttgctctgaaagaacagcagccaaaggttcggggctggctgctagcgagcctggatggccagacaacaggcctgattcccgcaaattacgttaagatcctgggaaagcgaaagggccgaaagacggtggagagctcaaaggtgagtaaacagcaacagagctttacaaaccctacacttacaaaaggcgccaccgtggccgattcactcgatgagcaagaggcagctttcgagtcggtgttcgtggagaccaataaggttcccgtggctcctgattcaattgggaaggatggagagaaacaggatctttag

SEQ ID NO: 128199 - DNA, 1134 bp, synthetic construct
  misc_feature 1..1134: note = Description of Artificial Sequence: Synthetic coding sequence
  source 1..1134: mol_type = other DNA
atggccagcagcgagcaggctgagcaaccttctcagccctcatccacccccgggtccgagaatgttctgcccagggagccgctaatcgccacagcagtgaagttcttgcagaacagtcgtgtgcgccagtctcctcttgccacacgccgagccttcctgaagaagaaaggtctgacagatgaagagatagatatggcgttccagcagagcggaaccgccgcagacgaaccctcatcactaggccccgctacgcaagtagtgcccgtgcagccgccacatctaatctcccagccctatagccctgccggaagtcgctggagggactatggcgcactggccatcatcatggccgggatcgcctttgggttccatcagctgtacaagaaatatcttcttccccttattctgggcgggcgggaagatagaaaacagctggagagaatggaggctggtctatccgaactttccggatcagtcgcgcagactgttacgcaactgcagaccacactggcctcggtccaggaactgctaattcagcaacaacaaaaaattcaggagctagctcacgagctggccgccgctaaagctacaacctctactaactggattttggagagccagaacattaacgagctcaagtctgaaattaatagtcttaagggtttactgctcaaccgacggcagttcccgccttctccttctgcccccaagatccccagctggcagattcccgtgaaatctccttccccgtccagcccggctgcggttaaccaccactcctcatcggatatatcacccgtgagcaacgagtctacctccagcagtcccgggaaagaaggacatagccccgaaggctccactgtgacataccaccttcttgggccccaggaagaaggggagggcgttgtggacgttaaaggccaggtccggatggaggtgcagggcgaggaggagaagagagaagataaggaagatgaggaggatgaagaggatgatgacgtatcacatgtggacgaggaggattgcctgggtgttcaacgcgaggacaggcggggaggtgacggacaaataaatgagcaggtggagaaactccgacgccctgagggcgcctcgaacgagagcgaacgggactag

SEQ ID NO: 128200 - DNA, 942 bp, synthetic construct
  misc_feature 1..942: note = Description of Artificial Sequence: Synthetic coding sequence
  source 1..942: mol_type = other DNA
atggcgttccagcagagcgggactgcagctgatgagccctcttccctgggtccagccacacaggtggtcccagtgcagcccccacacttaattagccaaccatattccccggctgggtccaggtggagagactatggtgcccttgctataatcatggccgggatcgcgtttggcttccaccagttgtacaagaagtaccttctgcctttaatactgggcggaagagaggatagaaaacagctggagcggatggaggcgggtctgtcagagctgagtggatcagtcgcacaaacagtgacccagctgcagacgactctggcctcagtacaggagcttctgatacagcagcagcagaagatccaggagcttgctcatgagctggctgcagccaaggctaccactagcactaactggattttggagtctcaaaatatcaacgagctgaaaagcgaaatcaactccctgaagggactgcttctcaatagaagacagtttccaccatcgcctagcgcgcctaagattcctagctggcagatccccgtcaagtccccctctccaagcagcccggcagccgtcaatcatcactcttcaagcgatatatcccccgtttcaaacgagtctactagcagctcccccggcaaggagggccacagccccgagggatcaactgtaacttaccacctgctagggccacaggaggagggagaaggcgtggtggacgtgaaaggtcaggtgcgcatggaggtgcagggcgaagaagaaaaacgggaggataaggaggacgaggaagatgaagaagacgacgatgtcagccacgtggatgaggaggactgtttgggggtgcagcgcgaggaccgacggggaggagatggccaaatcaatgagcaggttgaaaagctgagacggcctgagggagctagcaatgagtcagaaagagactag

SEQ ID NO: 128201 - DNA, 1041 bp, synthetic construct
  misc_feature 1..1041: note = Description of Artificial Sequence: Synthetic coding sequence
  source 1..1041: mol_type = other DNA
atggagaaattgcggctactggggctgcgctaccaggagtatgtaactcgccatccggctgccaccgctcaactcgagactgctgtacgcgggttcagctatctgctcgctggtaggtttgccgattctcacgaactcagtgagttggtctacagcgcctccaatctcctggtgttgctcaatgatggcatcctccgcaaggagctgcggaagaaacttccagtaagtctgtctcaacagaaactactgacgtggctttccgtgcttgagtgtgtcgaagtattcatggaaatgggcgcagccaaagtttggggggaagtcggacgctggcttgttatcgcgcttgttcagcttgccaaggctgtgctgcggatgttgcttctgctctggttcaaagcgggactgcagacctctccacccatagttcctctggaccgagagactcaggctcagccaccagacggcgatcacagccccggcaaccacgaacagagttatgtcgggaaacgctccaacagggttgtgaggaccctgcagaacaccccctctctgcatagcaggcattggggagctccacaacagagagagggccgccagcagcagcatcacgaggagctgtcagccaccccaacacccttaggactgcaggaaaccatagccgagttcctctacattgctcgtcccctgctgcacctgctgagtttgggcctttgggggcagcgctcctggaaaccctggctgctggcaggagtggtggatgtcacctctctaagcctcctaagtgaccggaaaggattgaccagacgagaacgtcgggaactgcggaggcgaaccatccttttgctgtactacctgttgcggtctccattttatgaccgcttttcagaggcacgcatcttgtttctgttacagctgttagcggatcacgttccaggagtcggtctggtgaccacaagtcagcgggctgcctccccatgcctacccgcgcggccgcacacccagccatggagcccccctgccttcttgcccgggcatccatag

SEQ ID NO: 128202 - DNA, 1011 bp, synthetic construct
  misc_feature 1..1011: note = Description of Artificial Sequence: Synthetic coding sequence
  source 1..1011: mol_type = other DNA
atggagaaactgcggctgctgggcctgaggtatcaggagtatgtcacacgccacccagccgccactgcccagctcgagaccgccgtgcgcgggttttcctacctactggccggaaggttcgccgatagccatgagctgtccgaactcgtatacagcgcaagtaacctcttggtgttactaaacgacggcatcttacgcaaggaactgaggaagaaactcccagtctccctgagtcagcagaagctgctcacttggctgtccgtcttagagtgtgtggaagtgttcatggagatgggagcagccaaggtctggggtgaagtgggccgctggctcgttattgccctggtacaacttgccaaggccgtgctacgtatgctgctgctgttatggtttaaagcgggcctgcagacctctccccccatcgtcccactagaccgcgagacacaggcccagccacccgacggggaccactcccctggcaatcacgaacagtcctacgtgggaaagcggagtaatagggtagttcgaactctccagaatactccaagcctccattcacggcactggggggccccacagcagcgcgaaggtaggcaacagcaacatcacgaggagctttcagctacgcctacacctctagggcttcaagagaccattgccgagttcctttatatcgcacgtccactacttcatttgttgagtttgggcttgtggggacagcgcagttggaaaccttggttgttggctggagtggtggatgtcaccagcttgtctcttctgtccgacagaaaaggacttacacgccgggaaagaagagagctgaggcgccggaccatcctgctgctttattatctgctgaggtccccattctatgaccgtttttccgaggcccggattctgtttctgctgcagctgctggctgatcatgtgcccggggtggggctcgtgactaggccgctgatggattatcttcccacttggcagaagatttacttctacagctgggggtag

SEQ ID NO: 128203 - DNA, 900 bp, synthetic construct
  misc_feature 1..900: note = Description of Artificial Sequence: Synthetic coding sequence
  source 1..900: mol_type = other DNA
atggctgcggctgaggagggatgctctgtaggagcagaggccgacagagagctggaggagctgcttgagtccgccctcgacgacttcgataaagctaaaccctcccctgcccccccttcaaccaccacagcccccgatgcgagtgggccacagaaacggtcccctggtgacaccgcgaaagacgcgctttttgccagtcaggaaaagttcttccaggagcttttcgactcagaactggcctcccaggcaacagctgagtttgagaaggctatgaaagagcttgcggaagaggaaccccacttggtggaacaattccagaagctcagcgaggcagctggtagagtgggcagcgatatgacaagccaacaagaattcaccagctgcctcaaagagacattatcaggattagcaaagaatgccaccgatctgcagaactccagcatgtctgaggaagagctcaccaaagcgatggagggacttgggatggatgagggggacggggaaggcaatattttacccatcatgcagtctatcatgcagaatctcttgtcaaaggacgtgctatatccaagtctgaaagagatcaccgaaaagtatccggagtggctgcagtcacatcgcgagtctttgccccccgagcaattcgaaaaatatcaggaacagcacagcgtaatgtgcaagatctgcgaacagtttgaggccgaaaccccaacagactctgagaccacacagaaagcccgctttgagatggttctcgacttgatgcagcaactgcaggatctcggccacccccccaaggaactggctggtgagatgccgcccggactcaattttgacctcgacgccctcaatctgagtggacctcccggcgccagtggtgagcaatgtctcatcatgtag

SEQ ID NO: 128204 - DNA, 708 bp, synthetic construct
  misc_feature 1..708: note = Description of Artificial Sequence: Synthetic coding sequence
  source 1..708: mol_type = other DNA
atggagtcaggtgcccttgatgacttcgacaaagctaagccttcccctgctccgcccagcaccacaactgccccggatgcaagtggaccacaaaagcgcagccctggcgacaccgctaaggacgcactctttgcttctcaggagaaattcttccaagagttatttgattctgaactcgctagccaggccacggcagagttcgagaaggccatgaaggagctggctgaagaagagccacacctcgtcgaacagtttcagaaactaagcgaggccgctggtcgggtgggttctgatatgacgtcccagcaagagttcacctcttgcctgaaggagactctgtccggcctggctaaaaacgcaacagaccttcaaaatagctccatgagcgaggaggagctgaccaaggctatggagggtctcggcatggatgagggcgatggtgaagggaatattctgccgattatgcagtccatcatgcaaaacctcttgtccaaagacgtcctctatcccagcctgaaggagattaccgaaaagtatccagagtggttacagtcacatcgagaaagtctgccgccggagcagtttgagaaataccaggagcagcactccgttatgtgcaaaatctgcgaacagtttgaagccgaaacaccaacggacagcgagacaactcagaaggctcgattcgagatggtgctggacctcatgtag

SEQ ID NO: 128205 - DNA, 840 bp, synthetic construct
  misc_feature 1..840: note = Description of Artificial Sequence: Synthetic coding sequence
  source 1..840: mol_type = other DNA
atggagtctggcgctctggatgactttgataaagccaagccaagtcccgccccacctagtacaaccactgcacccgacgccagcggccctcagaaacgatcccccggcgatactgccaaggatgcccttttcgcttcacaggaaaagttctttcaggaattgtttgactccgagcttgcctctcaggctacagctgagtttgagaaggcgatgaaagagctggccgaggaggagcctcatcttgtggagcaatttcaaaagctgtcagaggccgccggccgggtgggctcagatatgacctcccagcaggaattcacctcttgtctcaaggagacgctctccggacttgccaagaacgcaacagacctgcagaactcatcaatgagtgaggaggaactgaccaaagccatggaaggtctcggcatggacgaaggtgacggcgagggtaatattctgccaatcatgcagtccatcatgcagaatctgctaagtaaggacgttctgtatccaagtcttaaggagatcacagagaagtatccagaatggctccagtcccatagagagagtctaccccccgaacagttcgagaaatatcaggaacaacattccgttatgtgcaagatctgtgaacagtttgaggctgagacccctacagactcggagacaactcagaaggctcggttcgagatggttttggatctgatgcagcagctgcaggatttgggccaccctccaaaagagttggctggagagatgccaccaggtttgaacttcgacctggatgccttaaacctttctggaccgccaggggcttccggagagcaatgcctgattatgtag

SEQ ID NO: 128206 - DNA, 630 bp, synthetic construct
  misc_feature 1..630: note = Description of Artificial Sequence: Synthetic coding sequence
  source 1..630: mol_type = other DNA
atgaaggagctggcagaggaagagccccacctggtggaacaattccaaaagctgagtgaagccgctggacgggttggcagcgacatgacttctcaacaggagttcacctcgtgccttaaagagacattgtcaggcctggcaaagaacgctaccgacctgcagaattccagtatgagcgaggaggaactaactaaggcaatggaaggtctgggaatggatgagggcgacggagagggtaacatcctccccatcatgcaatctattatgcaaaatttacttagtaaagacgtcctctatccttccttgaaagagatcactgaaaaataccccgagtggctgcagtctcacagagagagtctgccaccagagcagttcgagaagtatcaggagcagcattcagtgatgtgtaagatttgtgaacaatttgaagcggagactcctacagatagcgaaactacacagaaagcccggttcgagatggtcctagacctgatgcaacagctgcaggatctggggcatcccccaaaggagctcgcaggagaaatgccccctggtctgaactttgacctggatgccctaaacctgtccggccctccaggggctagcggtgagcagtgcttgattatgtag

SEQ ID NO: 128207 - DNA, 561 bp, synthetic construct
  misc_feature 1..561: note = Description of Artificial Sequence: Synthetic coding sequence
  source 1..561: mol_type = other DNA
atggccgcggccgaagagggctgttccgttggagcggaagctgatcgcgaattagaggaactgctggaatccgcactcgatgacttcgataaggccaaaccaagtcctgccccaccttcgactaccactgcacctgatgccagtggaccacagaaaagatctccgggggataccgctaaggacgctttatttgcatcacaggagaagttttttcaagaactgtttgattctgagctggcctctcaagccaccgcagaatttgagaaggcaatgaaggagctcgcggaggaggagccacatctggttgaacagtttcagaagcttagcgaagcggccggcagagtggagctgcagcacgtggggcgtagggccgatcaaggccacggtggcgcgaggcatgggaggcgcggctggggccgtgaacaccccccgcatcatgccgagtattacgcagagcctaccctgcaaggctgcgccgttcctatcaccgaaggggaccacagaaaagtcagcagaatggttgcagagagctccggcatttccactagtcgcgcagtatag

SEQ ID NO: 128208 - DNA, 918 bp, synthetic construct
  misc_feature 1..918: note = Description of Artificial Sequence: Synthetic coding sequence
  source 1..918: mol_type = other DNA
atggctagcaggaaggagaatgctaaatcagctaacagagtgctgcgaattagtcagctggacgcactcgagctgaacaaggcccttgagcagctcgtctggagtcagttcacgcagtgtttccacgggtttaaacccggccttctcgcaagattcgaaccagaggtgaaagcatgcctctgggtcttcctgtggaggttcaccatctattccaaaaatgccaccgtgggccaatctgtgcttaacattaagtataagaacgacttttccccaaatctcagataccagcccccaagcaaaaatcagaagatatggtatgcagtctgtacaattggcggccgttggcttgaagagaggtgttacgatttatttcgtaatcaccatttagcgtctttcggaaaggtgaagcagtgcgtcaacttcgtgatcggtttactcaaactgggggggctgatcaatttcctcatcttcctccagcgcgggaaattcgcaacgctgacagaacgtctcctgggcatccatagtgtgttctgcaaacctcaaaacatttgcgaagttgggttcgaatacatgaaccgggagcttctgtggcacgggtttgccgaatttcttattttcctgcttcctctgataaacgtgcagaagctgaaggccaagctctcttcttggtgcattccactcactggagcacccaatagcgacaacaccctcgctacctctggaaaggagtgtgccctgtgcggagaatggcctaccatgccccatactattggttgtgaacacatcttttgttacttttgcgctaaatcttcgttcctgttcgacgtgtatttcacttgcccaaagtgtggtaccgaggtccactctctccaacctctgaaaagcgggattgagatgagcgaggtgaacgccttatag

SEQ ID NO: 128209 - DNA, 918 bp, synthetic construct
  misc_feature 1..918: note = Description of Artificial Sequence: Synthetic coding sequence
  source 1..918: mol_type = other DNA
atggcctcaagaaaggaaaatgcaaagagtgcaaaccgcgttctgcggatctcccaactggacgctcttgagttgaacaaagcattggagcaactggtctggtcacaattcacccagtgttttcacggttttaagccgggccttctggcacggttcgagcctgaagtgaaagcctgcctgtgggtcttcctctggcggtttacaatctattccaagaacgcaacggtcgggcaaagtgtcctgaacattaagtataagaacgacttttcccctaacctccggtaccagccaccctcgaagaaccagaagatctggtacgcagtttgcacaatcggaggccgctggttagaggaaagatgctacgacctctttagaaaccatcatttggccagcttcggcaaagtaaagcaatgtgtaaactttgtaatcggcctcctaaaactgggcggcctaatcaattttttgatcttcctgcaaagaggtaagttcgcaaccctgacggagaggctactgggtatccattctgtgttctgtaaaccacagaatatctgtgaggtgggcttcgagtatatgaaccgggaactgctgtggcatgggttcgccgaattccttatttttctattaccccttataaatgtgcagaagctgaaagccaaactgtcctcatggtgcatccctcttactggcgcacctaattcagacaacactctggccacatcaggcaaggaatgtgcgctctgtggcgagtggccgactatgccacatacaattggatgcgaacatatcttttgctatttttgcgctaagtcctccttcctctttgacgtgtacttcacatgcccaaaatgtgggaccgaggtgcatagcctgcaacctttaaagagcggaatcgagatgtcagaggttaatgcactctag

SEQ ID NO: 128210 - DNA, 543 bp, synthetic construct
  misc_feature 1..543: note = Description of Artificial Sequence: Synthetic coding sequence
  source 1..543: mol_type = other DNA
atggcttctcggaaagagaacgctaagtctgctaatcgggtcctgagaataagccagttagacgcactcgaactgaataaagcactggaacagctggtctggtctcagttcactcagtgcttccatggctttaagcctggcttgctggccagattcgagccggaagtgaaggcctgtctgtgggtgtttctgtggcggttcacgatctattccaaaaacgccactgtggggcagtctgtgctgaatatcaagtacaaaaacgatttcagccccaacctaagataccagccaccaagcaagaaccagaaaatttggtacgctgtctgtacaattggaggtcgatggctggaagaaaggtgctatgatctctttaggaatcaccaccttgcatcttttggcaaagtgaagcagtgcgtgaactttgtcatcgggttgctgaagctggggggcctgatcaatttcctcattttcttgcagcggggcaagttcgccactctaactgaacggctcctgggtatccatagcgtgttttgtaagccttag

SEQ ID NO: 128211 - DNA, 12 bp, synthetic construct
  misc_feature 1..12: note = Description of Artificial Sequence: Synthetic coding sequence
  source 1..12: mol_type = other DNA
atggcaagctag

SEQ ID NO: 128212 - DNA, 918 bp, synthetic construct
  misc_feature 1..918: note = Description of Artificial Sequence: Synthetic coding sequence
  source 1..918: mol_type = other DNA
atggcaagccggaaagagaatgccaagagcgccaaccgggtgcttagaatttcgcagctcgacgccctcgagctaaacaaggccttggagcagttggtgtggtctcaatttactcaatgcttccacggattcaagcccggcctgcttgccagatttgagcctgaggtgaaagcttgcctgtgggtgtttttatggcggttcacaatttacagcaaaaatgccacggtagggcaaagtgtgttgaatatcaaatacaagaacgatttttctcccaacctacgctaccaacctccgtctaagaaccaaaaaatctggtatgccgtctgtaccattggcggtagatggttggaggagcgctgctatgacctgttccggaatcatcacttggcctctttcgggaaagtcaagcagtgtgtaaattttgtgataggcttgttgaaacttgggggcctgattaactttctcatttttctccagcgcgggaaattcgcaactctcacagagcggcttctgggcatccactcggttttctgtaagccgcagaacatctgtgaggtgggttttgagtatatgaatcgagagctcctgtggcatggatttgctgaattccttatatttcttcttccactcattaacgttcagaagcttaaagctaaactcagctcttggtgtattccccttaccggggctcccaattctgacaacacgctggcaacctctggcaaggaatgcgcactgtgtggtgagtggcctaccatgccacataccatagggtgcgagcatatcttctgttacttctgcgccaagagcagcttcttgtttgacgtttatttcacatgccctaagtgtgggaccgaagtgcacagcttgcagccgcttaagagcggcatcgagatgagcgaggtgaacgccctgtag

SEQ ID NO: 128213 - DNA, 918 bp, synthetic construct
  misc_feature 1..918: note = Description of Artificial Sequence: Synthetic coding sequence
  source 1..918: mol_type = other DNA
atggcgtcccgcaaagaaaatgctaagagcgctaatagagtcttgcggattagccagctggatgctctcgagctgaacaaagccctagaacaattggtgtggtctcaattcactcagtgctttcatgggtttaaacctggtttactggcacgcttcgagccagaggtcaaagcatgtttatgggtttttctttggaggtttaccatctatagcaagaatgcgaccgtgggccaaagtgttcttaacataaagtacaaaaacgatttctcaccaaacctcaggtaccagccaccttccaagaaccagaagatctggtacgctgtgtgcacaatcggcggtcggtggctcgaggagcgctgctacgatttgtttagaaaccaccatctggcttcattcggcaaggtcaaacagtgtgtgaatttcgtcattggccttctgaagttgggagggctcataaacttcctaatatttctgcagcgcgggaagttcgccaccctcacggaacggctgctgggtatccatagcgtcttctgcaagccacaaaacatctgcgaggtgggatttgagtatatgaaccgtgaattgttatggcacggatttgctgaatttctcatcttcctcctgccacttattaatgtccaaaagctcaaagcaaaactatcttcatggtgtataccgctcaccggtgcccctaacagtgacaacactctggccaccagcggaaaagaatgtgccctgtgtggagaatggccgaccatgccacacaccatcgggtgtgagcatattttctgctatttctgcgccaaaagctcattcctttttgatgtctactttacctgccccaagtgcggaacagaggtacacagcctgcagccccttaagagtggcattgaaatgtcagaggtcaacgcattatag

SEQ ID NO: 128214 - DNA, 918 bp, synthetic construct
  misc_feature 1..918: note = Description of Artificial Sequence: Synthetic coding sequence
  source 1..918: mol_type = other DNA
atgaaaagtgacagctccacctccgcagctcccttacggggtctgggaggacccttgcggtcctctgagcccgttcgcgccgttccagcaagggcaccagcagtggacctgcttgaggaggccgcggacctgctggtcgtacacctagactttcgcgcggcactggaaacctgcgaacgcgcatggcagagccttgctaatcatgccgtcgctgaagagcccgcaggcacatcattggaagttaaatgctccttatgtgtggtgggtatccaggccctggcagaaatggatcggtggcaggaggttctttcttgggtgttacagtactaccaggtgccagagaagctgcctcctaaggtcctggagctgtgcattctcctgtatagcaagatgcaagagcctggcgctgttctggatgtcgtgggggcctggttacaggatccagcaaatcagaatttacccgagtatggagcacttgccgagtttcatgttcagagggtcctccttcccctggggtgtcttagcgaggctgaggaactcgtggttggttccgccgcttttggggaggagcggcgcctggacgtgctgcaggctatacacactgcgagacagcagcagaaacaagagcattccgggtcagaagaggcccagaaacctaacctggaagggagcgtgagccacaagtttctgtccctgcccatgctggtgcggcagctgtgggacagcgcggtgtctcatttcttcagccttccattcaagaagtcactgctcgctgctctgattctgtgtttattggtggttaggttcgaccccgcttcaccaagctcacttcatttcttgtataagctggcccagctcttcagatggattagaaaagcagccttttccagactataccaattaagaattcgggattag

SEQ ID NO: 128215 - DNA, 918 bp, synthetic construct
  misc_feature 1..918: note = Description of Artificial Sequence: Synthetic coding sequence
  source 1..918: mol_type = other DNA
atgaagtctgactccagtacatccgctgccccactcagaggactgggggggcctctgagaagttcggaaccagtgcgcgctgtgccagcccgcgcccccgcagttgacctcctcgaggaagcggccgacctcctggttgtgcatctggactttcgcgccgcattggagacttgcgagcgcgcgtggcagtcgttggcaaaccatgctgttgcagaggagcccgctggcacatcgctcgaagtaaagtgctctctgtgcgtggtaggaatccaggccctggcagagatggaccgatggcaggaggtcctgagttgggtacttcagtactaccaggtccctgaaaagctgccccccaaggttctggagctgtgcatcctgttgtattcaaaaatgcaggagcccggtgctgtcctggacgtggtgggggcatggctgcaggaccctgccaatcagaacttgcccgaatatggtgcattagctgaatttcatgttcagagggtactgttgccactaggctgcttatccgaagcagaggagttagttgtcggttctgctgcatttggagaagagcgccgactggatgtgctgcaggcaatacacaccgctcggcagcaacaaaagcaggaacactctgggagcgaagaggctcagaaaccaaaccttgagggcagtgtgtcacataaatttctcagcctcccaatgctggtcagacagctgtgggacagcgccgtcagccactttttctctctaccattcaaaaagtcactgctcgccgctctgatcctctgcctccttgtagtgagatttgatccagcatctccttctagccttcactttctgtacaagctggctcagctttttcgatggatcaggaaggcagccttctccagactgtaccagctgaggatcagagattag

SEQ ID NO: 128216 - DNA, 1098 bp, synthetic construct
  misc_feature 1..1098: note = Description of Artificial Sequence: Synthetic coding sequence
  source 1..1098: mol_type = other DNA
atgaaaagtgattcttccacctctgcagcgcccttgcgtgggctgggcggcccacttcggagttccgaaccagtccgcgccgtccccgcccgcgcccccgcagtcgacctgctggaagaagccgcagacctactcgtggtacacctggatttccgcgctgcactggagacatgcgagagggcatggcagagtctggcaaatcacgctgtggccgaagagcctgccggcacttctcttgaagttaagtgttctttgtgtgtggtcgggatccaggcactagcagaaatggataggtggcaagaagttctatcatgggtacttcaatattatcaagtgccggaaaagctaccccctaaagttcttgagctctgcatcctgctctacagcaagatgcaggagcccggtgcggtcctggacgtggtaggcgcctggttacaggacccagcgaatcaaaacctgcccgaatatggcgcactggcagaattccatgtgcagagggtgctcctcccacttggttgtctcagcgaggccgaggagctggtggtgggcagcgccgccttcggcgaagagagaaggctggacgtactccaggccatccatactgccagacaacagcagaaacaggagcattctggatccgaagaggcgcagaagcctaatctagaagggtccgtgtcacacaagtttctgtccctgccaatgttagtgagacaactatgggatagcgccgtctcccactttttctccctgccatttaaaaagtcccttctggcggcactgatcctgtgtctcctagtggtacgcttcgaccctgccagcccctcgtctctgcattttctgtataaacttgcacagctgtttgccggatccggtcgtctccatttcctggcaagcacttctagtgccagtgttactgaagggccctgtgccccacagcctctctgcagctcacgcccctggccgcagaaacagagcgatcgtgccacgcaccctcaggcacctctggggaaatgggaccagcctaatttggcagaatgcaccgtgtcgtgttgtctgggcgccctgtcctttgcaccttattttgggtggagccggtag

SEQ ID NO: 128217 - DNA, 771 bp, synthetic construct
  misc_feature 1..771: note = Description of Artificial Sequence: Synthetic coding sequence
  source 1..771: mol_type = other DNA
atgaagtcagatagttctaccagcgcagctcccctgaggggattagggggccctctcagatcatccgaacccgtacgagctgtccccgcacgagcaccggctgtagacctgcttgaggaagccgcggaccttcttgtggtccacctggatttccgggccgccctcgagacttgcgagcgggcttggcaatcgctggccaaccatgcagttgcggaggagccagcgggcacttcactcgaggtgaagtgcagcttgtgcgtcgtgggcatacaggcacttgccgaaatggataggtggcaggaagtgctgagttgggtgctgcagtactaccaagtgccagaaaagttaccacccaaagtcctcgaattgtgtatcctgttgtactcgaaaatgcaggagccaggggctgtgctggatgtcgttggggcatggctgcaggacccagcaaatcaaaatctgcctgaatatggcgccctagctgaatttcacgtgcaaagggtgctgttgccgctggggtgcctgagcgaagcagaggaattggtggtgggatctgctgcgttcggtgaggaacgtagactggacgtgctgcaggcgatacatacagccaggcagcagcaaaagcaggagcattcgggcagcgaagaagcacagaagcccaacctcgaagcaagcccttcatccctgcatttcttatacaagttagcacaactgttcaggtggatcagaaaggcagccttcagcagactctaccaactccggattcgagactag

SEQ ID NO: 128218 - DNA, 549 bp, synthetic construct
  misc_feature 1..549: note = Description of Artificial Sequence: Synthetic coding sequence
  source 1..549: mol_type = other DNA
atgttgagatccgtgtggaattttctgaaaaggcacaaaaaaaagtgcatcttcctcggcacagtgttaggcgtcctctctatgctgcccactctgcgggaggccctgatgcagcaactaaattcagagagcctgaccgcactgctgaaaaatcgaccgtcaaacaagctggagatctgggaagacttaaagattatttccttcaccagatccacggtggctgtatacagtacttgcatgctcgttgtgttactaagggttcagttgaatattatcggaggttatatatacctggataatgctgcggtggggaagaacgggactaccatactggcccccccagatgttcaacagcagtacttgagcagcattcagcatctgttaggcgatgggctgacagagttaatcacagtgataaaacaggcagtgcagaaggtgctgggcagcgtgagtctcaaacatagtctcagcctgctagatctggagcaaaaactgaaggagatccgaaaccttgttgaacagcataagtcttcttcttggattaattag

SEQ ID NO: 128219 - DNA, 1122 bp, synthetic construct
  misc_feature 1..1122: note = Description of Artificial Sequence: Synthetic coding sequence
  source 1..1122: mol_type = other DNA
atgctcaggtccgtgtggaattttttgaaacgacacaaaaagaagtgcattttccttggaacggtgcttggtggtgtttacatcttggggaagtacggccaaaagaagatcagagaaatccaagaacgcgaggccgcagaatatattgcccaggcacgacggcagtatcacttcgaatccaatcagaggacgtgcaatatgacggtcttgtcaatgttgcccaccttgcgcgaggcactgatgcagcagctgaactcagagtctctgactgccctgctcaaaaaccgaccttctaacaaactcgaaatctgggaggatctcaagataatttctttcaccagaagcacagttgccgtgtactctacctgcatgttagtggttctgttgagggtacaactaaacattatcggaggctatatttatctcgataacgcggctgtggggaaaaacgggacaacaattctcgcaccaccagatgtgcagcagcagtacctctccagcattcagcacctcctcggcgacggactgaccgagcttattactgttattaaacaggctgtgcagaaggtgttgggctcggtgagcttgaagcattcccttagtctgctggacctggaacagaagctgaaggaaattaggaatctggtggagcagcataagagctctagctggataaacaaggatggatcaaaaccattgttgtgccattatatgatgccagacgaggagactcccttagccgtgcaagcgtgcggcttatcccctcgtgacatcactaccatcaagctactaaatgagacacgtgacatgctcgagtctccagacttcagcaccgtgctgaacacatgtttaaatagaggattcagccggctgcttgacaacatggctgaattttttaggccgacagaacaggatctgcagcacggaaactcgatgaattcactatcctcggtaagtctgcccttggcgaaaattattccaattgttaacggacagattcacagcgtgtgtagcgagaccccctctcattttgtgcaggatctgctcacaatggagcaggtaaaagacttcgctgctaacgtttacgaggcctttagcaccccccagcagctggaaaaatag

SEQ ID NO: 128220 - DNA, 549 bp, synthetic construct
  misc_feature 1..549: note = Description of Artificial Sequence: Synthetic coding sequence
  source 1..549: mol_type = other DNA
atgttgagaagtgtgtggaacttcctgaaacggcataagaaaaagtgcatctttctagggacagtgttaggcgtgctgtcaatgttgccaacactgagagaggcactgatgcagcaactgaatagcgaatccctgaccgccctgctcaaaaatcgtcccagtaacaagcttgagatttgggaagatctcaagataataagcttcacccgaagcaccgtagccgtgtatagcacctgtatgctggttgtgctgctgagagttcagttaaatatcattggcggatacatttaccttgacaacgcggcggtgggtaaaaacgggactaccatcctagctcctccagatgttcagcaacaatatctgtctagcatccagcacctgctgggagacggattgacagaactcatcacagttattaaacaggccgtgcagaaggtgctgggttcggtctcactgaaacatagcctatctcttctggacttagagcagaagttgaaggaaattcgcaacctggtggaacagcataagtcgtcgagctggatcaattag

SEQ ID NO: 128221 - DNA, 1809 bp, synthetic construct
  misc_feature 1..1809: note = Description of Artificial Sequence: Synthetic coding sequence
  source 1..1809: mol_type = other DNA
atggccatgcgggagctagtggaggccgagtgtggcggcgcaaatcccctaatgaaactggcaggtcacttcacccaagacaaggccctgcgtcaggaaggactgcgacccggcccatggccacccggggccccagcttccgaggccgcgtcgaagcctctgggggtagcgtcagaggatgagttggtggcggaatttctgcaggatcagaacgccccactagtgagtagggccccacagacatttaaaatggacgatctgctcgcggaaatgcagcagattgagcagtctaatttccgacaagcaccccagagggctcctggcgtcgccgacctggcgttaagtgagaattgggcacaggaatttctggcagccggggacgctgttgatgttacccaagactataatgagactgattggagccaggaattcatcagtgaggtgactgacccactatccgtatcccctgctcgttgggccgaagagtacctcgagcagtccgaagaaaagttatggctgggtgaaccggaagggactgccacggatagatggtacgacgaataccatccagaggaggatttgcaacacacagccagtgacttcgtggctaaagtcgacgacccaaagttggctaactccgaaggaacatctgacgcatgggtggaccagttcaccagaccagtgaacacctccgcattagacatggaattcgagcgagcaaaatctgcgatcgaaagcgacgtcgatttttgggacaaactccaggcggagctggaagagatggctaaaagggatgctgaggcgcatccatggctgagtgactatgatgacctgacatcagctacatatgacaagggatatcagtttgaggaagagaaccccttgcgagaccatccccagccatttgaggagggactgaggcggctccaagagggggaccttcctaatgctgtgttgttgtttgaggctgccgtgcagcaggaccctaagcacatggaagcgtggcagtaccttggtacaacccaggccgaaaatgagcaagagctgctggctatcagcgccctgcgtcgctgcctggaacttaagccggataatcagacggccttaatggccctagccgttagcttcactaatgagtctctccaaagacaggcctgtgagaccctgcgcgactggcttagatacaccccagcctatgcccatttggtaacccccgccgaagagggggcaggaggcgctggactgggaccatctaagagaatcttgggttctctactcagcgatagtctcttcttggaagtgaaagagctctttctggctgcagtgagacttgacccgactagcatagaccccgacgtccagtgtggtctgggtgttctgttcaatctgtctggcgaatacgacaaggccgtggattgcttcaccgccgccctaagtgtgcgcccgaatgactacctactgtggaacaagctgggagccactctggcgaatgggaaccagagcgaagaggcggtagcagcatatagacgtgctctggaactacagccgggatatattaggtctagatataatctggggatctcttgtatcaatttgggcgcccatagggaagctgtggagcattttcttgaggcactgaatatgcagagaaagtctagaggcccacggggggagggaggtgctatgtctgagaatatatggtcgactctgcgattggcactgtccatgctggggcagtctgatgcatacggcgcagccgacgcgcgagatctgtcaaccctactgacaatgtttggacttccccagtag

SEQ ID NO: 128222 - DNA, 1896 bp, synthetic construct
  misc_feature 1..1896: note = Description of Artificial Sequence: Synthetic coding sequence
  source 1..1896: mol_type = other DNA
atggctatgagggaactggttgaagcagaatgcggaggcgctaatcccttgatgaagttggcaggccatttcactcaggataaagcgctgcgtcaagagggccttcgcccaggcccatggccccctggggcacctgcctcagaagctgctagcaagcccctgggcgtagcgagcgaggatgagctggttgcggaattcttgcaagatcagaacgctccattggtttcccgagcccctcagaccttcaaaatggatgatctgctggcagagatgcagcagattgagcaatctaatttccgacaggcgccacagcgtgctccaggggtggccgaccttgctctgagcgagaattgggcccaggagtttcttgcggccggcgacgcagtggacgtgacccaggattacaatgaaacagactggtcccaggaattcataagtgaagtgacagaccctttgtccgtgagccccgccagatgggcggaggagtacttagagcagagcgaggaaaagctttggctcggcgaacccgagggtacggccaccgataggtggtacgacgagtaccatcccgaggaggacttgcagcacaccgcttccgactttgttgcaaaagtggatgatcctaagcttgccaattccgagttcttgaaattcgtacggcagatcggcgaaggacaagtgtctctcgagagtggtgctggcagtggacgagcacaagctgagcagtgggccgcagagttcattcaacagcagggtacctccgatgcatgggtcgaccagttcacaagaccagtgaacacttccgcattagacatggagttcgaacgcgccaagtcagcaattgagctgcaggccgagctcgaggaaatggcaaagcgggacgccgaggctcacccctggcttagtgattacgatgacttgacctccgcaacttatgacaagggataccagttcgaggaggagaatccgcttagagaccatcctcagcccttcgaagaaggtctgcgtcgcctgcaggagggagatctgccgaatgccgtgctgctgtttgaagcagcagtgcagcaggatccaaaacacatggaggcttggcagtacctgggcacaactcaagctgagaatgaacaggaactgctcgccatcagtgcactgcggaggtgcttagaactgaaaccggacaaccagacggctctgatggcattggccgtttctttcactaacgaaagtctgcagcgccaagcgtgtgagacgctgcgcgactggctcagatatactccagcatacgcacatctcgtcactccagctgaagaaggagctgggggtgccgggctgggtccatcaaagagaatcctcggcagcctcctgagcgactcactgtttctggaggttaaggaattgtttctggcagcagttaggcttgaccctactagcattgacccagacgtgcagtgtggtctgggggtattgtttaacctttccggtgagtatgacaaagccgtcgattgcttcaccgcggctttgtccgtaaggcctaatgactatttactctggaataagctcggagctacgttggcgaacggcaatcagagtgaagaagctgtggcagcctatcgccgcgccctggaattgcagccaggctatattagatcacgctacaacctagggatttcgtgtattaatctaggggcacatcgcgaagcagtcgagcattttctcgaggcacttaatatgcagagaaagtctcggggcccccggggcgagggtggcgctatgtcagaaaatatctggagtaccctccgcctggcactaagtatgttaggacaatcggatgcctacggtgctgcagatgcccgggacctctctacccttttgacaatgtttggtttgccacagtag

SEQ ID NO: 128223 - DNA, 1233 bp, synthetic construct
  misc_feature 1..1233: note = Description of Artificial Sequence: Synthetic coding sequence
  source 1..1233: mol_type = other DNA
atggcgatgcgagagcttgtggaagccgaatgtgggggagccaatccccttatgaagttagcaggtcacttcacccaagataaagcactcagacaggagggactgcgcccaggaccatggcccccaggcgccccggccagcgaagccgtgtctgtccttgaagtggaatctcctggcgccgcctcggaggcggcgtctaagccgctaggcgtcgcgtccgaagatgagttagttgccgagtttttacaggatcaaaacgcgcctctggtgtcaagagccccccagacatttaaaatggatgacctgttggccgaaatgcagcagatcgaacaatcaaactttaggcaagctccccagcgcgcgcccggtgtcgccgatctggctttgtcagagaactgggcacaagaatttcttgccgcaggcgacgccgtggatgtgacgcaagattataacgagactgactggtcccaagaatttattagcgaggtgacagaccccctgtccgttagccctgccaggtgggccgaagaatatttagaacagagcgaagagaagctctggctgggggagcccgaggggactgcgaccgacaggtggtatgatgaataccaccccgaagaagaccttcagcataccgccagtgattttgtggccaaagtggatgatcccaagttggccaactctgaagggacatcggatgcatgggtcgaccaatttacaagacccgtgaatacgagtgcgctcgatatggaatttgaacgcgcgaagagtgcgatcgagctgcaggcagaattagaggagatggccaaaagggatgctgaggctcatccctggctctccgattatgatgatcttacgagcgcgacatacgacaaaggataccagtttgaggaggaaaacccactgagagatcacccccagccctttgaagaaggcctgaggagactccaagaaggagacctccccaatgctgttctgttatttgaggctgcagtgcagcaggatccgaagcacatggaggcctggcagtatctcggtaccacccaggcagaaaatgagcaggagctgctagctattagcgcactaaggcgttgtcttgagctaaagccagataatcagacggctctaatggctctcgctgtctcatttactaacgagagcctgcaaaggcaggcttgcgagacgttacgagattggttgagatacactcccgcgtatgcacatctcgtatag

SEQ ID NO: 128224 - DNA, 1983 bp, synthetic construct
  misc_feature 1..1983: note = Description of Artificial Sequence: Synthetic coding sequence
  source 1..1983: mol_type = other DNA
atgctgctatgcagggcacatagggtgctcggactgcgcggggctcgtgagcttgcagtgacgatggctatgcgggagctggtggaagctgagtgtgggggtgccaatccactgatgaagctggctggacatttcacccaggacaaggctctccggcaggaaggccttaggccgggaccatggcctcccggcgccccagctagtgaagctgcctctaagcctctgggtgtcgcatctgaagatgagctggttgcagagttcctgcaggaccagaatgcgcccttggtctctagggcaccccagacgtttaaaatggacgatctgttggcagagatgcaacagatcgaacagagcaactttcggcaggcaccccagcgtgcgcccggcgtagcggatctggccctgtcagagaattgggcacaggaatttctggcagcaggcgatgccgttgacgtgacgcaagactacaatgagactgattggtcccaagagttcattagcgaggtaacagacccgctttccgtctcgcccgcacgatgggctgaggaatatttagaacagtccgaagagaagttgtggttaggagaacctgagggtaccgctacagacaggtggtacgatgagtatcacccggaggaggacctacagcatacagcatctgacttcgtcgccaaggtagacgacccaaagttagccaacagcgaatttttgaaattcgttagacagattggcgaaggccaagtgtccctagagagcggggccgggagcggcagggctcaagccgagcagtgggcggctgagttcatccagcagcagggaacgtccgacgcgtgggtggaccaatttacacgacctgtgaacacttctgctctcgacatggaatttgaacgggcaaagagcgctatcgaatctgacgtggatttctgggacaagctgcaggcagaacttgaggaaatggctaaaagggacgccgaggcacacccctggctcagcgattacgatgacttaacttccgccacctacgacaaagggtaccaattcgaagaggaaaatcctctgcgtgaccaccctcagccttttgaagaggggctgcgacgcttacaagagggcgacctaccgaacgccgtcctgctgtttgaggccgcagtgcaacaggacccgaaacacatggaggcatggcagtatcttggaacaacccaggctgagaacgaacaagaattgctggctatctcagcccttaggcgatgtttggagctcaaacctgacaatcagacagccttgatggccctggcagtctcattcaccaacgagagtttgcaacgtcaggcgtgcgaaactctaagggattggctccggtatactccagcatacgctcaccttgtaacccccgctgaagaaggcgcagggggcgcaggtctaggacccagtaaaaggatccttgggagtctgctgagtgatagtttgttcttggaggtaaaggaactgttcctggctgccgtacgcttggatccgacatcaatagaccccgacgtgcagtgtggtcttggcgtgttatttaacctgagcggggagtacgataaggccgttgactgcttcaccgccgctctaagcgtcagacccaatgactacctgctgtggaataagctgggcgccaccctggcaaatggtaatcagtctgaggaggcagtggccgcgtatcggcgggcccttgaactgcaacctggctacatcagaagccgctacaacctcggaattagttgtatcaacctgggcgcccaccgggaagccgtcgagcacttcctcgaggcgttaaacatgcagaggaagtccagggggcctcgaggcgagggaggggccatgagcgagaacatatggagcactctgcggctcgctctaagtatgctcgggcagtctgatgcatacggcgctgccgacgctagggatctgtctactctactcaccatgtttggtctaccacaatag

SEQ ID NO: 128225 - DNA, 1920 bp, synthetic construct
  misc_feature 1..1920: note = Description of Artificial Sequence: Synthetic coding sequence
  source 1..1920: mol_type = other DNA
atggctatgagagaactggtggaagccgaatgcggtggcgctaatcccctcatgaagctggccgggcatttcacacaggacaaggccctgcggcaagagggcttgcgccctggaccctggcctccaggagcgccggcctctgaggctgcgtccaagccactgggggtggcgtctgaggacgagttggttgccgaatttctgcaggatcagaatgctcctctggtaagcagagcacctcaaaccttcaaaatggatgatctgctcgccgagatgcaacagatagaacagtccaattttcgccaagccccacagcgcgccccaggggtggcagacttggctctgagcgaaaattgggcacaggagttcttggcagctggggacgctgttgatgtgacacaagactacaacgaaacagattggagtcaggagttcattagcgaggtaaccgacccgctatccgtgtccccagccaggtgggctgaggaatacttagagcagagcgaggaaaagctttggctgggtgaacccgagggcacggccaccgatcgttggtatgacgaataccatcccgaagaggacctgcaacatacagcctccgacttcgtagcaaaggtcgacgaccctaagctggctaacagtgaattcctgaagttcgtgcggcaaatcggagaaggacaagttagcttggaatccggcgccggaagcgggcgggcccaagcagagcagtgggcggccgagtttatccagcagcagggaacttcggatgcatgggtggaccagttcacgagacccgttaacacttccgcgttggatatggaatttgagagagccaagtcagccatcgagtccgacgtggatttttgggataaactacaagccgagctcgaggaaatggcaaagcgggacgcagaggcccacccatggcttagtgattacgatgatctgacatctgcaacttacgataagggctatcagtttgaggaagagaacccccttcgggatcatcctcagccctttgaggagggcctgcggagactacaagagggagacttgcctaacgcggtcctcctcttcgaagctgccgtgcagcaggaccccaagcatatggaagcctggcagtacttgggaaccacccaagctgagaatgagcaggagctgctggccatctctgcactgagacggtgcctggagctcaaacccgataaccagaccgccctgatggcccttgctgtgagttttacaaatgagagccttcagcgccaagcgtgtgagaccctacgggattggctcagatatacaccagcctatgctcatctcgtgacaccagccgaggagggtgccggcggcgccggcttgggcccatctaagcggatcctgggctcactcctaagcgattccctctttttggaggtgaaggaactctttctggccgcagtgaggcttgatcccacctccatcgaccctgacgtccagtgcgggctgggcgtcttgtttaacttatctggcgaatatgataaggctgtcgactgctttacagctgcgctttctgttcggcccaatgattacttattgtggaacaaattgggtgcgaccctggccaacggcaaccagagtgaagaggccgtagccgcctaccgacgcgctctggaacttcagccgggttacattcgaagtcggtacaatctcgggatttcctgtattaatttgggggcccatagggaagccgtggaacacttcctggaagccttgaatatgcaacgcaaatcccgcggcccgcgtggtgaaggaggtgctatgagcgaaaacatctggagcaccctgcgtctcgcattgtccatgctggggcagtccgatgcctatggggcagccgacgcccgggatctgagtaccttactcacgatgtttggattgcctcaatag

SEQ ID NO: 128226 - DNA, 1965 bp, synthetic construct
  misc_feature 1..1965: note = Description of Artificial Sequence: Synthetic coding sequence
  source 1..1965: mol_type = other DNA
atggcaatgagggagctggtggaggctgagtgcggaggtgcgaatccgttaatgaaactggcaggccacttcacacaagataaggctctgcgccaggaaggcctgcgccctggcccatggccgcccggcgccccggcgtccgaggccgtgagcgtgctagaagtcgaatcacctggagcggccagcgaggcagcaagcaagcccctgggagtcgcgtccgaagacgaattagtggctgagttcctgcaggaccagaacgctcccttggtgtcccgcgcaccacaaacgttcaagatggacgacttactggccgaaatgcagcagattgagcagtctaattttaggcaagctccacagagggcccccggagtagccgatctggccctatccgagaactgggcgcaggaatttcttgcagcaggggacgcggtcgacgttacccaagattataacgaaacagattggtctcaggagtttatttccgaggtcacagatccattgtccgtctcacccgctcggtgggcagaggagtatctcgaacaaagtgaggagaaactgtggcttggcgagcccgaaggtacggcaacagacaggtggtatgatgagtaccatcccgaggaagatttacagcacactgcttctgacttcgtggcaaaggttgatgatccaaaactggccaacagcgagtttctgaaatttgttagacagattggcgaagggcaagtgtcactggagtccggagcaggatcgggccgtgcccaggctgaacagtgggcggctgaatttatacagcaacaggggaccagtgatgcgtgggtagaccagttcacaaggcctgttaatacttcggccttggacatggagttcgagcgtgctaagtccgctatagaatctgacgtcgacttttgggacaagttacaggctgagctggaggagatggctaagagagacgcggaggcgcatccttggctgagcgactatgatgatttgacatccgctacctacgataaaggatatcagttcgaagaagagaatcctctgcgggaccatcctcagcctttcgaggagggtctgagacgcctacaggaaggagatttgcctaatgctgtcttgcttttcgaagctgccgtccagcaggatcctaaacacatggaggcctggcagtacttgggtaccacgcaggccgaaaatgaacaggaactgctcgctatatctgccctgcgaaggtgtctggagctcaaacccgataatcagacagccctgatggcccttgccgtgagctttacgaacgagagcctccagagacaggcatgcgagaccctgcgtgattggttgagatacactcctgcctatgcccacctggttacgccagccgaagaaggtgctgggggggccggcctgggccctagtaaaaggattctaggatcactgctctccgattctttatttttagaagttaaagagctgtttttagcagccgtgaggctggatccaacctccattgatccagacgttcaatgcggccttggagtgttattcaatctcagcggtgagtacgataaggcggtcgattgcttcaccgcagcactgagcgtgaggcccaatgattaccttttgtggaacaagctcggtgctactcttgccaacggcaaccagtcggaggaggctgtggccgcctaccgcagggctctggagctccagccgggctatatacgttctaggtacaatttagggatcagctgcattaaccttggtgcccatcgcgaggccgtggaacactttctggaggctctgaacatgcagcggaaatcaagaggccctaggggggaggggggcgccatgtcagaaaacatctggtcaaccttaagactggccttatccatgctgggccagtctgacgcctatggcgcagccgacgcgagagacttatctactctgttgaccatgttcgggctgccccagtag

SEQ ID NO: 128227 - DNA, 1920 bp, synthetic construct
  misc_feature 1..1920: note = Description of Artificial Sequence: Synthetic coding sequence
  source 1..1920: mol_type = other DNA
atggctatgcgggaactagtggaggcggagtgcggaggtgctaatccattaatgaagctcgccgggcatttcacccaagataaggccctccgtcaggagggcctgagaccaggcccgtggcctcctggggctccagctagtgaggcagcatctaaaccgctgggcgtcgcgtccgaggatgagctagtcgcggagtttttgcaagatcaaaacgcgcctttagtgagtagggcgccccagaccttcaaaatggacgacctccttgctgaaatgcagcagatcgaacagtctaacttcagacaggcgccacagcgggcccctggggtagccgatctagctctgtcagaaaattgggcacaggaattcctcgccgcaggcgatgcagtggacgtcacccaggactataacgagactgactggtcccaggagttcatctccgaagtcaccgatcccttatctgtgagtccggctcgctgggccgaggagtatctcgagcagtccgaggagaagctatggttgggcgaacctgaaggcaccgccaccgataggtggtatgatgagtaccatccagaggaagatctccaacatacggcgtcagacttcgtggccaaagtcgatgatcccaaactggctaacagcgaattcttgaagtttgtaaggcaaatcggcgagggtcaggtgtcgctggagtctggcgctggctcaggccgagcgcaggccgaacagtgggccgcggaattcatacagcagcagggaacctcggacgcttgggtggatcagtttacaagaccagtgaacacctctgcgctggacatggaattcgagcgagctaaatctgccattgagtccgacgtggatttttgggataagctgcaagccgagctggaagagatggccaagcgagacgccgaagctcacccgtggcttagcgactacgacgatctgacatccgctacgtacgataagggctaccagttcgaggaggagaatccactccgggaccacccacagccatttgaagagggcttaagaagactgcaggaaggcgacctgcccaatgctgtgttactgttcgaggctgccgtacagcaggaccctaagcacatggaggcttggcaatatttggggactactcaagcagaaaatgaacaggaactgctggcaattagtgccctgcggcgctgtctcgaattaaagcccgacaatcagacagcactcatggccctggcagtgtcctttacaaatgagtcccttcagagacaggcttgtgagacgctacgcgactggctgcgctatacgcctgcctacgcccacctggtaacacccgctgaggaaggggccggcggagcaggcttgggcccaagcaagaggatactgggttccctgctgtccgattccctgttcctcgaggtgaaggagctgtttctagcagccgtaaggctggatcctacaagcatcgacccggacgtgcagtgcggcctgggggtgctgttcaatttgagcggggagtatgacaaggctgtggactgctttaccgctgctctgtccgtccggcccaatgattatctcctgtggaacaaattgggcgctactctcgcaaacggaaaccagtctgaggaagccgtggccgcttaccgtagagcgctggagttacaaccaggttatatcagatcccgctacaaccttggcatctcctgtattaacctaggagctcacagggaagccgtcgaacacttcttggaagctttgaatatgcaacgaaagtcccgcggtccgcggggcgaaggtggagcaatgtcagagaacatttggtccacgctccggttagccctctcaatgctgggtcagtccgacgcttacggcgctgctgatgcccgtgatctttccaccttgctgacaatgtttggcctgccgcagtag

SEQ ID NO: 128228 - DNA, 345 bp, synthetic construct
  misc_feature 1..345: note = Description of Artificial Sequence: Synthetic coding sequence
  source 1..345: mol_type = other DNA
atggccatgagagagttagtggaagccgagtgcgggggcgcaaatccccttatgaagttggctggacatttcacacaggataaagcgttacgacaggagggactcaggccaggtccttggcctcctggtgcaccagcatcagaggcagcatctaagccgctgggggtcgcctccgaagacgaactggtggctgaattcctccaggaccagaacgctccgctagtctcgagagctccacagacatttaaaatggatgatctgcttgcagagatgcagcagattgaacagagcaatttcaggcaggccccacagcgggctcctggggtcgccgatctggcgctttag

SEQ ID NO: 128229 - DNA, 309 bp, synthetic construct
  misc_feature 1..309: note = Description of Artificial Sequence: Synthetic coding sequence
  source 1..309: mol_type = other DNA
atggccatgcgagaattggtggaagccgagtgcggcggcgcaaacccactcatgaagctggctggccactttacccaagacaaggccctgagacaggaagggttacggcccgggccctggccccccggggctcctgcatcagaggctgcctccaagccacttggtgtagcctctgaagacgagttggttgccgaattcctacaggaccaaaatgccccccttgtgagtagagctcctcagaccttcaagatggacgatctgctcgctgagatgcagcagatcgaacagagtaattttcggcaggcatag

SEQ ID NO: 128230 - DNA, 747 bp, synthetic construct
  misc_feature 1..747: note = Description of Artificial Sequence: Synthetic coding sequence
  source 1..747: mol_type = other DNA
atggcaatgagagaactggtcgaagccgaatgtggtggtgcaaaccccctgatgaaacttgcaggtcacttcacccaggataaggctttacgccaagagggactccgccccggcccatggcctcctggggctcccgcatcggaggccgcaagtaagccactgggggtagcctctgaagacgaactggtcgcagagtttctgcaggaccagaatgccccactcgtgtctagagccccccagactttcaagatggatgacctgctagccgaaatgcagcagattgaacagtctaacttcaggcaagctccacagcgtgcgcccggtgtagccgatcttgctctctctgagaactgggcgcaggaattcctggcggccggagacgctgtggacgttacccaggattacaacgagacagactggtcccaagaattcatctctgaggtcacagaccccctgtcagtctcacccgctcggtgggctgaagagtaccttgagcagtctgaggaaaagctctggctgggggagccagagggtacagctacagatcgttggtatgacgagtaccatcccgaagaggacctgcaacacaccgccagtgactttgtagcaaaggtggatgacccaaagttggctaactcagaatttctcaagtttgtgcgccaaattggcgagggacaagtgagcctggagagcggcgctggctctgggagggcccaggccgagcagtgggccgcagaattcatctag

SEQ ID NO: 128231 - DNA, 315 bp, synthetic construct
  misc_feature 1..315: note = Description of Artificial Sequence: Synthetic coding sequence
  source 1..315: mol_type = other DNA
atggcaatgcgggagcttgtggaagctgaatgcggaggggccaatcctttgatgaaactcgcaggccactttacacaggacaaggcactcaggcaggaagggctgcggcccgggccttggcccccaggggcgcccgctagcgaggccgcttccaagccactaggtgtagcgtcagaggacgaactagtggcggaattcctccaggaccagaatgcgccacttgtcagtcgggctccccaaacctttaagatggatgatcttctggccgagatgcagcagatagagcagtcaaactttagacaagccccccagtag

SEQ ID NO: 128232 - DNA, 1875 bp, synthetic construct
  misc_feature 1..1875: note = Description of Artificial Sequence: Synthetic coding sequence
  source 1..1875: mol_type = other DNA
atgtatcagggccacatgcaagtggtgggcgttacattaaaaaagaaatggcactgcctccagaaatctgatctcaccctggcattagggaaaggatcgcgcgcagcagacaaagccgtggccatggtcatgaaggaaatcccccgcgaggagagtgccgaggaaaaaccccttctcactatgacttcccaattagttaatgaacagcaggagagccgcccactgctcagtccttcgatagatgactttctgtgtgagaccaaatccgaagctattgccagacccgtcacttccaacacagcagtgttgactacaggacttgacctacttgacctgagtgagcctgtctcccagacccagaccaaggctaagaagtccgagccatcatctaaaacatcctctctcaaaaaaaaagcggacgggtcagatctcatcagcaccgacgccgaacagcgcggccagcccttacgagtccccgagactagctccctggatcttgacatacagactcagctcgaaaaatgggatgatgtcaaattccacggagatcgaaacactaaaggtcatccgatggccgagagaaagagttcatcctcacgtaccgggtctaaagaactgttgtggagttccgaacatcgatctcagcccgaactctctggagggaagtcggccctcaactcggaaagcgctagcgagttggaactggtggctcccacccaggcaaggctaacaaaagagcatcggtggggaagcgctttactatccaggaaccactcactcgaagaggagttcgagagggccaaggcagcagtagagtcagacacagagttctgggacaagatgcaggccgaatgggaggaaatggcccggcgaaattggatttctgagaaccaggaagcgcaaaaccaggtcaccatctctgcctcggagaaaggttactatttccacacggaaaatccgtttaaggactggccaggtgccttcgaggagggattgaagcggctcaaggagggagatctgcccgttactattctgttcatggaggctgcaatcctgcaggatcctggagatgccgaggcttggcaatttttgggaatcacacaggctgagaacgaaaatgaacaagcagccatagtcgcattgcagcggtgcctggagctgcagccaaataacttgaaagccctcatggcactggccgtcagctatacaaatacgggtcatcagcaggacgcatgtgatgcacttaagaattggatcaaacagaacccgaagtacaaatatctcgtgaagtcgaagaaagggagcccaggcctcactaggcgtatgtctaagtcccctgtagactcttcagtcttggagggggttaaagaactgtaccttgaagccgcacatcaaaacggcgacatgatcgaccccgacttgcagaccggactgggggtgctgttccacctgagcggcgagtttaatcgtgcaatcgatgcatttaatgccgcactgacagtgcggcccgaagactattctctgtggaaccggctaggagcaacccttgccaatggggaccgctctgaggaagcagtcgaggcctatacgcgcgcacttgaaattcagcctgggtttatccggtcacgctataacctgggcatttcttgcattaacctgggcgcttaccgcgaagcggtttctaactttctcacggccttgagcctccaacggaagagccgcaaccagcaacaggtgcctcaccccgcgatctccggtaatatatgggccgctttacgcatcgcgcttagcttgatggaccagccggagctcttccaggccgctaacctcggtgacctggacgtgctcctgcgagcctttaatctggacccgtag

SEQ ID NO: 128233 - DNA, 1875 bp, synthetic construct
  misc_feature 1..1875: note = Description of Artificial Sequence: Synthetic coding sequence
  source 1..1875: mol_type = other DNA
atgcaccagaatggaagtcaggtcgtaggggtcacccttaaaaagaaatggcattgcttacagaaatcagatcttacactggcgcttggaaagggatcacgagccgccgataaggcagtggccatggtgatgaaggaaattccacgcgaagagtccgccgaggagaagcccttgctgaccatgaccagccagttggttaatgaacagcaggaatcacgacctcttctctccccatcaattgacgacttcctctgcgagacgaagtccgaagctatcgcaagacccgtgacatcaaatacggctgtgttgactacaggactggacctgctcgacttgtctgagccggtctcccagacgcagactaaagccaagaagtcagaaccttctagtaaaactagctctcttaaaaagaaggctgacggatctgacctaatctcgaccgacgccgaacagcggggccagccactgagggtgcctgaaacctcctccctggatcttgatatccagactcagcttgagaagtgggacgatgtgaaatttcacggcgatagaaacaccaaaggccaccctatggcggagaggaagtccagtagttcgcgcaccgggagtaaagaactcctttggagtagcgagcatcgatctcagcctgagctgtcaggcggaaagtccgccctcaactccgaaagtgcatctgaactggagctggtggcacccacacaggcacggctgacaaaggagcatcggtgggggtccgctcttctgtcccgcaatcacagcttggaggaggaattcgagcgcgccaaggccgcggttgagagtgacacagaattttgggataaaatgcaggccgaatgggaagaaatggcaaggaggaattggatcagcgaaaaccaggaggcccagaatcaggtaaccatatccgcttccgaaaaggggtactattttcatactgagaatcctttcaaagattggcccggcgcgtttgaggaggggctgaaacgtctcaaggagggcgatctgcccgtcaccatcctgtttatggaggccgcaattttacaggaccctggcgatgcggaagcatggcaatttcttgggataacacaggctgaaaacgaaaatgaacaggctgcgatcgtcgccctccagcgctgtctggaattacagcctaacaacttgaaggccctgatggccctggcagtatcgtacaccaacaccggccaccagcaggacgcgtgcgatgcactgaaaaactggatcaagcagaacccaaagtacaagtatttggtgaagtccaaaaagggttccccaggcctgaccagacgaatgtctaaatctccagtggactccagcgtcctcgagggcgtcaaggagctgtacctcgaagccgcccatcagaatggggacatgattgaccctgacctccagactggcctcggagtactttttcacctgagtggcgagttcaatcgcgccatcgatgcctttaacgcagccctgactgtcaggcccgaggactattctctctggaaccgtctaggagcaaccctagccaacggggaccggtccgaagaggctgtggaggcttatacccgcgcactggagatacagcccgggtttatcagatcccggtacaatttgggtattagttgtatcaatctgggcgcgtatcgggaggctgtatccaactttctgacagcactctctctccagcgcaagagtagaaatcagcagcaggtgccacatcctgctattagcgggaacatatgggctgctctcaggatagctcttagcttgatggatcaacctgaactgttccaggcggccaatcttggagacctcgatgtgttgctccgcgcctttaacctggatccgtag

SEQ ID NO: 128234 - DNA, 1557 bp, synthetic construct
  misc_feature 1..1557: note = Description of Artificial Sequence: Synthetic coding sequence
  source 1..1557: mol_type = other DNA
atggttatgaaggaaatcccccgagaagagagcgccgaggagaagcccctgctcactatgacttcccagttggtgaacgagcaacaggagtccagaccactgttatccccaagcattgacgatttcttgtgcgagaccaaatctgaggcaattgccaggcccgtgacatctaacacagccgacattcaaacacagctcgaaaagtgggatgatgtgaaattccacggagatcgcaataccaaggggcatcccatggccgaaaggaaaagcagcagtagtaggaccggatcgaaggaactgctctggtctagcgagcaccgcagtcagccagagctcagcggagggaaatccgccctgaactctgagagcgcaagcgagcttgagctcgtggcccccacccaagctcgccttactaaggaacatcggtggggatccgccctattatcccgcaaccatagcctagaggaggagtttgaaagggctaaagctgcagtggagagcgacacagaattttgggataagatgcaggcagagtgggaagagatggccaggaggaattggatcagtgagaaccaggaggcccagaaccaggtgacgatatccgcctctgagaaggggtactactttcacacagaaaacccattcaaggattggcctggagctttcgaggagggcctcaagagactgaaagaaggagacttgcctgtcactatcctctttatggaggctgccatccttcaggacccgggcgatgccgaggcgtggcagttcctggggattacccaggctgaaaacgagaacgagcaggccgctatcgtggcccttcagaggtgtctagagctgcagcctaacaacttaaaagccctgatggcattagcagtatcttacacaaataccgggcaccagcaggacgcatgcgatgctttgaaaaactggatcaagcaaaaccctaagtataaatatctggttaaatctaagaagggatctcctggcctgacccggcgcatgagtaaaagccccgtagatagcagcgtgttggagggagtgaaagagctctacctggaggctgctcatcagaacggcgacatgatagaccctgacctgcagactggattgggcgtgctcttccacctgtctggggaatttaaccgcgccatagatgccttcaacgctgcccttactgtgcggcctgaggattattcactatggaaccgactgggagccactctggctaatggggatcggagcgaggaagctgtcgaggcttataccagagcgctggagattcagcccggatttatacgctcccgctataaccttgggatcagctgcatcaacctgggcgcatacagagaggcggtgtctaattttctcacagcgctctccctccagcgcaaatctcgcaaccagcagcaggtaccacacccagccatcagcgggaatatttgggcagctctcaggatcgcactgtccctgatggaccagcctgaactgtttcaggctgcgaacctgggtgatctcgacgtgctgttgagagccttcaacctagatccgtag

SEQ ID NO: 128235 - DNA, 1809 bp, synthetic construct
  misc_feature 1..1809: note = Description of Artificial Sequence: Synthetic coding sequence
  source 1..1809: mol_type = other DNA
atgtaccagggtcacatgcagggaaaaggttctcgggctgctgataaggcagtcgccatggtgatgaaagagatccctcgtgaagagtccgccgaagagaaacccctccttaccatgacatcccagctggttaacgagcagcaggagtccagacctctcctttctcccagtatagacgattttctttgcgagaccaagagcgaagccatcgcccgaccagtgacatcaaatactgctgtgttgacgaccggactagacctcctggacctgtcggaacccgtgtcccagacccagacaaaagcaaagaagtcagaaccaagttctaagacaagcagtctcaagaagaaggctgacggatccgatctcataagcacggacgccgagcagcgagggcaaccactacgagtgcccgagacttcttccctcgacttagacatccagacacaactggagaagtgggacgacgtgaagttccacggcgataggaatacaaaaggccaccccatggctgaaaggaaatccagtagttcacgcacgggaagtaaggagctcctgtggtcaagcgagcatcgcagtcagcctgagctgtcgggcgggaagtctgcacttaactccgagtcagcatctgaactcgagttggtcgcgccgacccaggccagactgactaaagagcacagatggggctccgcccttttaagccgcaatcattccctggaggaagagttcgaacgtgcaaaggctgccgtcgagagcgatactgaattctgggataaaatgcaggcagagtgggaggaaatggcccggcggaattggatatctgagaatcaagaagctcagaaccaagttacaatctccgcctcggaaaaaggatattactttcacacagagaatccctttaaggactggcccggagcgttcgaagagggactgaaacggctgaaagagggtgatctgcccgtgacgattttatttatggaggctgcgattctccaggaccccggcgacgccgaggcatggcagtttctggggattacgcaggccgagaacgaaaacgaacaagctgccattgtcgcactccagaggtgtctcgagttacagccaaataacctgaaagcgcttatggcgctggccgtgtcctacacaaatactgggcaccagcaagacgcatgcgacgcccttaagaattggataaagcagaacccaaagtacaaatacctggtgaagtccaaaaaagggtcaccggggctcactcgccggatgagcaagtctcccgtggatagctcagtgcttgagggcgtgaaagaactatatttggaggccgcgcatcagaatggtgacatgatcgatcccgacttacagaccggccttggagttctgtttcatctgagtggcgaattcaaccgagcaatagacgcgttcaatgcagccctgacggttcgaccagaggactactccctctggaatcggctgggcgccacgctggccaatggagaccggtctgaggaagccgtggaggcctatacgcgcgctctcgagatccaaccaggttttattcgctcacgctacaaccttggtatttcatgcatcaacttgggggcatacagagaggcagtcagtaactttctcacagccttgtctttacagaggaaatctcggaaccagcagcaggttcctcatcctgccatctctggcaatatttgggcagccctgagaattgcccttagcctcatggatcagcccgagctgtttcaggccgcaaacctcggggatctagacgtgctcctccgcgctttcaacctggacccatag

SEQ ID NO: 128236 - DNA, 1545 bp, synthetic construct
  misc_feature 1..1545: note = Description of Artificial Sequence: Synthetic coding sequence
  source 1..1545: mol_type = other DNA
atgtcatctctgtcgctcaagcccctggtgcaggttagtgtgggcgcctttgtacaactggtgaatgagcagcaggagagtaggccgctactatcacctagtattgacgattttctgtgcgaaactaagagcgaagcaatcgccaggcccgtgacaagcaacaccgctgacatccaaacacagttggagaagtgggacgatgttaagttccatggcgacagaaatactaaagggcatccaatggccgaacgtaaatcctcctcatcacggacaggctccaaggaactgctgtggtccagtgaacacaggagtcaacccgagctttcaggagggaagtctgcactgaatagcgaaagtgcgagtgagctggaactggtcgctccaacccaggcacggctgaccaaagaacatcggtggggatcagccctactatctaggaaccattcattggaggaggagttcgaacgtgccaaagcagctgttgagtcagacaccgagttctgggacaaaatgcaggccgaatgggaggagatggccaggagaaactggatctcagagaatcaggaggcgcaaaatcaggtgacaatcagtgctagcgaaaaaggatactattttcacaccgagaacccattcaaggattggccaggcgcatttgaagagggattaaagcgcctgaaagagggagatctccctgtcactatcttgtttatggaggctgccatcttgcaggatcccggcgacgcagaggcttggcagtttttaggaattacacaagcagaaaacgagaatgaacaagccgcaatcgtggctctgcaacgctgtctcgagctacaacctaacaacctaaaagcccttatggccctggccgtgtcttatacgaacactggacaccagcaggacgcttgcgacgcattgaaaaattggattaaacagaaccctaagtacaagtacctggttaaatctaagaagggaagccctggactaacccgcaggatgagcaagtcacccgtcgattcttctgtcttggagggcgtcaaagagctgtacttagaagctgctcatcaaaacggggatatgattgatccggatttgcagaccggtctgggagtcctattccatctgtccggcgagttcaatcgagcgatagacgccttcaacgccgccttaaccgtgcgacccgaagactacagcctgtggaacagactaggagccaccctggccaatggtgatcgcagtgaggaagccgtggaagcttacactcgcgccctggaaattcagcctggcttcattaggtcccggtacaacttagggatttcctgcatcaatctgggtgcataccgcgaagctgtgtctaatttcctgaccgctttgagtttgcagcgcaaaagtcgaaatcagcaacaggtgccccaccctgccatttctggcaacatctgggctgctctcaggatagctctgagtctgatggatcaacccgagctctttcaggccgctaatctgggagatttagatgtgctgttgagggcctttaacctggacccttag

SEQ ID NO: 128237 - DNA, 1881 bp, synthetic construct
  misc_feature 1..1881: note = Description of Artificial Sequence: Synthetic coding sequence
  source 1..1881: mol_type = other DNA
atgtatcaggggcacatgcagaaatctaaggaacagggctacggtaagctgtcttcagacgaggacctggagatcattgtagatcagaaacaggggaagggtagtcgcgcagctgataaggccgtagcaatggtgatgaaagaaatcccccgggaggagagcgccgaagagaagccgctcctgaccatgacctctcaactcgttaatgagcagcaggagtcccgacccctgctgagcccttcaatcgacgatttcctttgcgaaacgaagtctgaggccattgcaagacctgtgacctctaacactgctgtgctgaccacaggtttagacctgctcgacctctcggaacctgtgagtcagacacagacaaaagctaagaagtccgagccttcatccaagactagttccctgaaaaaaaaggcggacggatcagacctgatctcaacagacgccgagcagcggggtcagccccttcgcgtgcccgaaacaagcagcttggatctggacatacagacacaactggagaagtgggatgacgtcaagttccatggagaccgcaatacaaagggccatccaatggccgaacggaagagcagctcaagccggaccggctccaaagagctcctgtggagttccgaacatcgttctcagccagagttgagcggtgggaagagcgctctcaacagcgagtccgcctccgaactggagcttgtagctcctactcaagctcgcttgaccaaggagcaccgctggggctcggccctgctgagcaggaaccattcattggaagaggagttcgaacgtgcgaaagcggccgtggagagcgatactgaattttgggacaaaatgcaggccgaatgggaggagatggcccgcagaaattggatctcagagaaccaggaagcccagaatcaggtgacgatatccgcttcggagaagggatactattttcataccgaaaatccctttaaggactggccgggagcttttgaggaaggactgaaaagacttaaagaaggagacctcccagtgacaatcctgtttatggaagccgctatcttgcaggatccaggcgatgctgaggcctggcagtttctggggattacgcaggctgagaacgaaaacgagcaagccgccatcgtggccctccagagatgtctggagctgcagccaaataatctcaaggccctaatggccttagctgtatcctataccaacacaggacaccaacaggacgcatgtgacgcactcaagaactggatcaagcagaatccaaagtataagtatttggtcaagtctaaaaaaggttcccctggcctgacaaggaggatgtcaaaatctcctgtggactccagtgtgctggagggagtgaaagagctgtaccttgaggcggctcatcagaatggagatatgatagacccagatcttcagacaggactcggggtcctctttcacttatccggcgaattcaatcgggccattgacgcattcaacgcagcccttaccgtgcgaccagaagattatagcctgtggaatagactcggcgctactctggctaatggagatcggagtgaagaggctgtcgaggcatacacgagggcgctggagatccagcccggctttatccggagcagatacaatctgggcatttcatgtattaaccttggagcctacagggaagctgttagtaattttctgactgccctctcacttcagagaaagagccgaaaccagcaacaggttccccatcctgctatttctggaaacatctgggccgctcttcggattgccctgtctcttatggatcagcccgagttattccaggccgctaaccttggcgatctagatgtgctcttaagagcctttaatctagacccttag

SEQ ID NO: 128238 - DNA, 1752 bp, synthetic construct
  misc_feature 1..1752: note = Description of Artificial Sequence: Synthetic coding sequence
  source 1..1752: mol_type = other DNA
atggtaatgaaggaaattccgagagaggaatcggctgaggaaaagcctttgctcacaatgacctcccagctggtgaatgagcaacaagagtcgagaccactgttgtccccaagtatcgatgactttctgtgtgagacaaaatccgaggccattgcccgacccgtgacatccaataccgctgtcctgacaaccggccttgacttactcgatttgtccgaaccagtaagtcaaacccagacaaaagctaaaaagagcgaacctagctcgaagacatctagccttaagaagaaagctgacggcagtgatctcatctcaactgatgcagagcagcgcgggcaacccttgagggtccccgagaccagttctctggatctggacatccagacccaacttgaaaaatgggacgacgtcaagtttcatggcgaccgcaatactaaggggcaccctatggctgaaagaaagagctccagctcgaggaccgggtctaaagagcttctgtggagttcagagcacaggtcccagcccgaactgagtggcgggaaatccgcactgaactccgaatcagccagcgaactcgaactggttgctcctacgcaggctaggttaacaaaagaacatcggtggggatccgccctactgagcagaaaccatagtctggaagaagaatttgaacgcgctaaagccgccgtggaaagtgatactgagttttgggacaagatgcaagcggagtgggaggaaatggcccgcaggaactggatttccgagaaccaggaagctcagaaccaggtgacaatttctgcctctgagaaaggctattactttcacacagagaacccctttaaagattggcccggcgccttcgaggagggtctgaagcgtctgaaggagggcgatctccctgttaccattcttttcatggaggccgccatcttacaggaccccggagacgcagaggcctggcagttcctgggtattacccaagcagagaacgagaacgagcaagctgcaatagtcgccttgcagagatgccttgagctccagcccaacaacctgaaagcccttatggctctggcagtgagctacacaaacaccggccaccagcaggacgcctgcgatgctttgaaaaattggattaagcagaaccctaagtataagtacttggtgaagtcgaagaagggaagtccaggactgacgcgtcgaatgtccaagtccccagttgattcatcagtgcttgagggtgtaaaagaattgtatcttgaagccgctcaccagaatggagatatgatcgaccctgatttgcagactgggctgggagtactcttccatctcagtggcgaattcaacagggcgatcgacgcctttaacgctgctctgaccgtgcggccagaagactatagcctgtggaatcggctcggagccaccctggccaacggtgaccgctcagaggaggcagtggaggcttatacacgtgccctggagattcagcccggttttatcagatccaggtacaatcttggcatctcctgtataaatctgggcgcgtatcgggaagctgtaagtaatttcctcaccgctctctctttgcagagaaagagccggaatcagcagcaggttcctcatccagccatcagcggaaatatatgggccgcgttgagaatcgcattatccttaatggaccagcccgagctattccaggccgcaaacctcggagacttggatgttctgctccgcgcctttaaccttgacccgtag

SEQ ID NO: 128239 - DNA, 1776 bp, synthetic construct
  misc_feature 1..1776: note = Description of Artificial Sequence: Synthetic coding sequence
  source 1..1776: mol_type = other DNA
atgtaccagggacatatgcagaaatctaaagagcaggggtacggtaagctgtccagcgacgaggacctcgaaataatcgttgatcagaagcagctggtgaatgagcaacaggagtcaagaccgcttctcagcccttccattgatgacttcctgtgtgagaccaagtcagaggccatcgcacggcccgttactagcaataccgccgtgctcaccacgggcctcgacctcctggaccttagcgagcctgtgtcccaaacccagacaaaagccaaaaagtcggagccaagcagcaaaactagtagcttgaagaagaaggctgacggaagcgatcttatctctactgatgctgaacagcggggacagccactgagggtgccagagacatctagcctggatctcgatattcagactcaactcgagaagtgggacgacgtgaagttccatggcgatcgtaacactaaggggcacccaatggcagagcggaagtcctcctcatctagaaccgggagcaaagagctactttggtcttcagagcaccgaagccaacccgaactaagcgggggcaagtccgctttaaacagtgaatcagcctccgagctcgaattagtggcacctacccaggcgaggttaaccaaggagcatcgctggggatctgcactgcttagtaggaaccacagcctagaagaagaatttgaacgggccaaagcagccgtggaatcggatacagagttttgggacaaaatgcaggccgagtgggaggaaatggcccggaggaattggatcagcgaaaaccaggaagcacagaatcaagtcaccatcagtgcttcagaaaaaggatattattttcacacagaaaatccattcaaggattggccaggtgcttttgaagagggtctcaaaaggctaaaagagggggacttacccgtcaccatcttatttatggaggccgcgatattgcaggaccctggcgatgctgaggcctggcagttcttgggtattactcaggcggaaaacgaaaatgagcaggcagcaatcgtggctctccagaggtgtctagaactgcaacctaacaacttgaaagctctcatggcccttgccgtgtcctacaccaacaccggccaccagcaggacgcgtgtgatgccctgaagaattggattaaacagaaccctaagtataagtatctggtcaagagcaaaaagggaagtccaggacttaccagaagaatgagtaaaagccccgtggatagttccgtgctggagggagtaaaggaactctacctggaggcagcacatcagaatggcgatatgatcgaccctgacctacaaaccggcttaggcgtgctgtttcacctgtccggtgagtttaatcgggcaatcgacgctttcaacgccgcactcacggtcagaccggaggattactcactgtggaatcgtctaggggctactctggctaatggtgataggtctgaagaagcagtcgaagcatacactcgcgccttggaaattcaacccggatttatcaggtctaggtataacttaggcattagctgtatcaacctgggggcataccgagaggccgtcagtaatttcctgactgcgcttagcctgcagcgaaaaagtagaaatcagcagcaagttccccaccctgccatctctggcaatatttgggcagccctccgcatcgccctgagcctgatggaccagcctgagctgtttcaggcggcaaacctgggggatcttgacgtgcttctgcgagcatttaacctagatccctag

SEQ ID NO: 128240 - DNA, 2217 bp, synthetic construct
  misc_feature 1..2217: note = Description of Artificial Sequence: Synthetic coding sequence
  source 1..2217: mol_type = other DNA
atggctctggccgtgctgagggtgctggagccattccctacagagacacctcctttagctgtcttgctcccccctggaggcccctggcccgcagccgagctcgggctcgtcctcgctctccgccccgcaggtgaatctccagccggcccggctctgctcgtggccgccttggagggacctgacgctgggaccgaggagcaaggccctggaccacctcagctactggtcagtcgcgcattactgaggcttctcgctttggggtccggagcctgggtgagagcacgcgcagtgcgcaggcctcccgctttggggtgggcgctccttggtacctcactcggaccagggctgggccctagagttgggccattacttgttcgcagaggcgagacgctccctgtgccgggccccagggtgctcgagacccgaccagcactccagggactacttgggcctggtactcgactcgctgttacagaactccggggtcgcgcccgcctgtgccccgagtccggggacagttctcgccccccacccccgccagtggtctccagtttcgcagtctccgggacggttcgcagactgcagggcgtgctcgggggtacgggcgactcccttggggtaagccgctcctgtttaagagggctcggactgtttcagggtgagtgggtctgggtcgcacaagcacgtgaaagtagtaacacctctcagccacacctggcgagagtgcaggtcctggagccaaggtgggatctgagtgaccggttaggccccgggagcggcccgcttggagaacctctcgctgacggcctagccctcgtgccagccacactggcatttaacttagggtgcgacccactggagatgggtgagctacgaatacagcggtacctggaaggatccatcgcgcctgaagacaagggctcatgttccctcctgcccggaccaccatttgctagagagctccatatcgagatcgtgtctagcccccactactcaactaacggcaactacgacggcgttctgtatcgccacttccagatcccccgagtggtgcaggaaggggatgttttgtgcgttcctacgatcggccaggtggaaattctggagggctccccagagaaactcccaagatggagggagatgttctttaaggtaaagaaaacagtgggcgaggcacctgatggacccgcatcggcctacctggcagatactacacacacttcactgtacatggttggctccacgctgtcccctgtcccctggctgccaagtgaggaatctacgctgtggtctagcctcagtccccctgggctggaagccctcgtgtccgaactctgtgctgtgctgaagcctcgactgcagcctggcggagccctgctgactggcacttcttccgtcctgctccgcgggcccccagggtgtgggaaaaccacagtcgttgccgcagcatgctcccacctggggctgcacctgctgaaggtgccatgtagctcactgtgtgccgaatccagtggggcagttgaaacaaagcttcaagccatcttctcccgggcccgtaggtgccgtcccgccgtgttattgctgacagccgttgatctccttggcagagatagagatggactcggagaagacgcccgcgtgatggccgtgctgcgtcacctgcttctgaacgaagatccactaaatagctgtccgcctttaatggtggtggccaccacgtcccgtgcccaagacctgccagcagacgtgcagacggcctttccccatgaactggaagtgcccgccctgtctgagggccagcgcttgagcatactgcgggcacttacagcccacctgcctctggggcaagaggtcaatctggcacagttagccagacggtgtgccggtttcgtcgtcggggacttatacgcgttattgacgcatagttctagggccgcttgcacacgtataaaaaattccggactggccggtggccttacagaggaggatgaaggtgaattgtgcgccgccggattccctctacttgcagaagatttcggccaggcgcttgaacagcttcagacagcccacagtcaggccgttggggcccctaaggtggaaaccaaatctctggaatgtctccccgggcctgggcttcagctgcacgccttgtcctcactgatgaattggactctgtggccacaagccgggggtgaagtcgaaattttggaggaatag

SEQ ID NO: 128241 - DNA, 2943 bp, synthetic construct
  misc_feature 1..2943: note = Description of Artificial Sequence: Synthetic coding sequence
  source 1..2943: mol_type = other DNA
atggcccttgcagtgctccgggtgctggagccgtttccaacggagactccacctttggccgtactgcttccacccggtggcccttggcctgcggcagagctgggcctcgtcctagccctgcggcccgccggggaaagtccggcaggacccgccctgcttgtcgctgcactggaaggaccagatgccggtaccgaagagcaggggcctggccctccacagcttcttgtgtcccgggcactgttgcggcttctcgccttgggctccggcgcatgggtaagagctagggcggtgcggcgcccccccgccctcgggtgggccttgctaggaacgagcctggggcccggattgggcccccgcgtgggccccctcctagtgaggagaggagaaacactgccggtacctggcccacgcgtgctggagacgaggcccgcactgcaggggctcctgggacccgggactcgactggcggtcacagagttaaggggccgagctcgactttgtccggaaagcggagactcatcaaggcccccaccccctcctgtggtctcgtccttcgcagtgtcaggcaccgttcgccgcctacaaggggtgctcggcggcaccggcgattccctgggtgtgagcagaagctgccttcgcggacttgggttgttccagggcgagtgggtgtgggtggcacaagcccgtgagtcttcgaacaccagccaaccacatctggctagggtgcaggtgttagagccccggtgggacctgagtgaccgtttgggtccaggtagcggccctctcggcgagcccctcgctgatggactggcccttgtgccagctacacttgcatttaatctaggatgcgacccgttagaaatgggggagttgcggattcagaggtacctggaaggctcgatcgcccccgaggataaaggatcttgctctttgctcccgggtccccctttcgcaagagaactccatattgagatcgttagtagcccccattatagtacaaatggtaattatgatggcgttctgtaccggcattttcaaatcccaagggtcgtccaggagggcgacgtgctctgtgttccaacgatcggacaggtggagatactggagggctcaccggagaaactgccgagatggcgggaaatgttcttcaaagtgaaaaaaacagtcggcgaagcacccgatggccctgcaagtgcttaccttgccgacactacccacacgagtctgtatatggttgggagcactctatcccccgttccgtggctaccttctgaagaaagtaccctgtggtcctccctctcaccgcccggtctagaagcattggtgtccgagctctgtgcagtgctcaaacccagattgcagccaggcggagcattactcactggaacaagtagcgtgctactgcgggggcctcctggctgtggaaagaccactgtggtggccgctgcgtgctctcacctaggacttcatttactgaaggtcccttgctcttccctctgtgctgaaagctccggagcagtggaaacaaaactgcaagccatcttcagcagagccaggcggtgccggccggcggttctgttgctcactgcggtggacttgctcggccgcgatcgagacggtcttggcgaagatgcacgcgttatggcggttctccgacatctgcttctcaatgaggatccactgaactcatgtccacctctcatggtggttgcaactacgtcacgagcccaagacctacccgccgatgtccagaccgcctttccgcatgagctggaagtgcctgcgttgtcagagggccagagattgagtattctgagagctttgacagcccatctcccgctaggccaagaggtgaacctggctcagctggccagacggtgcgcaggattcgtcgtgggagacctgtacgccttactgacacattcctcccgcgccgcgtgcacacgaatcaagaattcagggcttgcaggaggtctaacagaggaggacgaaggggagctgtgtgccgcaggttttccgctgctggccgaggacttcggccaggcgctggagcagctgcaaacagcccacagccaggcagtgggcgccccgaagatcccatccgtctcctggcacgatgtgggcggcctgcaggaggtaaagaaagagattttggagaccattcagctccctcttgaacaccctgagctcctctcattagggctgcgccggagtggactgctgctacacggaccacctggaaccgggaagacacttcttgcaaaggctgtggccacagaatgcagcctgaccttcctctcagtgaagggccctgaactgatcaatatgtatgtgggccagtccgaagaaaacgtgagagaggtgttcgctcgcgccagagcagcagctccgtgcattattttcttcgatgagctggacagtctcgccccttccagaggaagatctggggatagcggaggggtcatggatcgagtcgtgtcccaactcctggctgagctggacggactccatagtactcaggacgttttcgtgataggggccaccaaccggccagacctgttggatcctgcactcttacgacccggccgcttcgataagcttgtttttgtgggcgccaatgaagatcgggcgtcccagcttagagtgctgtccgccatcactcgtaagttcaagcttgaaccttcagttagcctcgtgaacgtactagattgctgccctccacagttaactggagcagacctatactccctctgttcggacgccatgacagctgccctcaagcggagggtgcacgacttagaagagggactggagccagggagctcagcattaatgctgacgatggaagatcttctgcaagccgccgcccgcctccagccaagtgttagcgaacaagagcttctgaggtacaaacgtatccagaggaaatttgccgcatgttag

SEQ ID NO: 128242 - DNA, 972 bp, synthetic construct
  misc_feature 1..972: note = Description of Artificial Sequence: Synthetic coding sequence
  source 1..972: mol_type = other DNA
atgagcgccgtctgtgggggcgcggctcgcatgctgagaacacccggccgacacgggtacgctgcggagttctctccatacttgcctgggcgtctcgcctgtgctaccgcgcagcactacggtatcgccggttgtggcacacttctaatcttggatccagacgaggcggggcttcgcctgtttagatcctttgactggaatgacggcttattcgacgtgacgtggtccgagaataacgaacatgtcctgataacatgctcaggcgacgggtctttacaactttgggataccgcaaaggccgctggtccacttcaagtgtataaagaacacgcccaggaagtgtactctgtggactggagtcaaaccaggggtgagcaacttgtcgtttctggatcatgggaccagaccgtcaaactgtgggatccaaccgtcgggaagtcactgtgtacatttcggggacacgaatccatcatatactcaactatctggagcccacatatccccggatgcttcgctagtgctagtggtgaccagacactcaggatctgggacgtaaaagccgctggtgttcgcatcgttattccggcccatcaggctgagatcctgtcctgcgattggtgtaagtacaatgaaaatctgctggtgacaggggctgttgattgctctctccgcggatgggatctgcgtaacgtgcgtcaacccgtgttcgagctcctgggacatacatatgccatacggcgggttaagttctctccattccatgcctctgttctggcttcttgctcatacgattttactgtgcgcttctggaacttctcaaaacccgactccttgctggaaacagtcgagcatcatactgagtttacctgcgggctcgatttctccctgcagtcccctacgcaggtggccgattgctcttgggacgaaactatcaaaatctatgaccccgcatgcctgacaatacctgcctag

SEQ ID NO: 128243 - DNA, 369 bp, synthetic construct
  misc_feature 1..369: note = Description of Artificial Sequence: Synthetic coding sequence
  source 1..369: mol_type = other DNA
atgtctgccgtatgcggcggcgctgccaggatgctgaggactcctggtcgacatgggtacgctgcggagttctctccctacctgccaggaagattggcatgtgcaacagcgcagcactacggaatcgccggatgtggcacactgttgatccttgatcccgatgaagctggccttagactcttcagaagctttgactggaatgatgggctttttgacgtgacctggagcgaaaataatgagcatgtactcatcacctgctctggggacggctcacttcagctgtgggacacggccaaggcagctgggccacttcaagtttacaaagaacatgctcaagaatacgtgcagggaagttgtgtggtaaaatag

SEQ ID NO: 128244 - DNA, 843 bp, synthetic construct
  misc_feature 1..843: note = Description of Artificial Sequence: Synthetic coding sequence
  source 1..843: mol_type = other DNA
atgagcgccgtgtgtgggggggccgcaaggatgctgcggacacccggtaggcacggctacgctgctgagtttagtccatacctgcccggccgcttagcctgcgctactgcccagcactatgggatcgcgggatgcggcacattgttgatactcgacccagatgaagccggccttagactattcaggtcattcgactggaacgacggtctgtttgatgtgacgtggagcgagaacaacgagcacgtcctcataacctgtagcggggatggcagcctccagctttgggatacggcgaaggccgctggacccctccaggtttacaaggagcatgcccaggaggtgtattcagtcgattggtcgcagacgagaggcgagcagctcgtggtgagcggctcctgggaccagaccgtgaaactttgggaccccacagtaggtaagtctctttgcacctttcgtggccatgagtccatcatttactctacaatctggtcacctcatattcccggctgctttgctagcgcttccggcgaccagaccctcagaatttgggacgtgaaggcagccggcgttaggatcgtgatccccgcacaccaggctgagatcctgtcatgtgattggtgcaaatacaatgaaaacttgctagtgacaggagccgtagattgcagcctgcggggctgggacttgagaaacgtccggcagcccgtgtttgagctgttaggccacacctatgcaattcggagagtaaagatggagtcttgccccgtgacccagactaggtcgcagctgactgctacatccgctttttgggtgcaagcggttctgcttcctcagccaaccgaatag

SEQ ID NO: 128245 - DNA, 912 bp, synthetic construct
  misc_feature 1..912: note = Description of Artificial Sequence: Synthetic coding sequence
  source 1..912: mol_type = other DNA
atggccagctgggcaaagggcagaagctacctcgcccccgggctgctccaaggtcaggtggccatagttacaggaggggcaacaggaattggcaaagccatcgtcaaggagttgctagagcttggtagtaacgtggtgatagccagtcgaaaactggagagactgaaaagcgcagccgacgagcttcaagctaatctccctccgacgaaacaggcaagggttattcctattcagtgcaacattcggaacgaagaggaggtgaacaatctggtgaagtctaccctagatacgttcggcaagatcaatttcctcgtgaataacggaggcggccagttcttgtcgccagctgaacacatctcttctaaaggctggcatgcggtgttagaaaccaatctcactggcacattctacatgtgcaaggctgtgtactcctcctggatgaaggagcatggaggcagcatcgtgaatattatcgtcccaaccaaagccgggttccccctggccgtgcacagcggcgctgctcgcgccggcgtgtataacctgacaaaaagcctcgccctcgaatgggcgtgctcaggcatacggatcaattgtgtcgctccaggcgtgatttacagccagacagccgtggagaattacggtagttggggtcagagtttcttcgagggatctttccaaaagatcccggccaagcgaatcggggtacctgaagaagtgtccagtgttgtttgctttttgttaagtcccgctgcctccttcatcaccggtcagtctgtggatgtggatggtggtcggtccctttacactcatagttacgaggtgcctgatcacgataactggcccaaaggtgccggagatctctcagtagtcaagaaaatgaaagaaaccttcaaggaaaaagctaagctgtag

SEQ ID NO: 128246 - DNA, 1407 bp, synthetic construct
  misc_feature 1..1407: note = Description of Artificial Sequence: Synthetic coding sequence
  source 1..1407: mol_type = other DNA
atggtggatacggaatcccctctttgtccactttcccccctggaagcgggcgacctagagtcgcccctgtccgaggagtttctgcaagagatgggcaatatccaagaaataagtcagtccattggcgaggactcctctggcagctttggattcaccgaatatcagtatctggggtcttgtcccgggagtgacggtagcgtcatcactgatacactgagccctgcctcgtcgccaagtagcgtgacatatccggtggtccctgggagcgtggatgaaagtccatccggagccctcaacatcgagtgcaggatctgtggagacaaagcctccggctaccattatggcgtgcatgcctgcgaaggctgcaagggcttcttccgcagaaccattaggctaaaattggtgtacgataaatgcgatagatcttgtaagattcagaagaagaacaggaacaagtgccagtactgccgattccataagtgcctgagcgtcgggatgtcccacaacgctatcagattcggcaggatgcccaggtctgaaaaagccaaactcaaggccgagattttaacgtgtgagcacgatattgaagattctgagacagcagatctgaaaagcttggcaaagcggatctacgaggcttatcttaagaatttcaacatgaacaaggtgaaggcgcgcgtgattctgagcggcaaggccagtaacaatccccccttcgtgatacacgacatggagactttatgcatggctgagaagaccctggttgccaagctggtcgccaacggaattcagaacaaagaggcggaagtgcgcatctttcattgctgccagtgtacctcagtggagactgttactgaattgactgagtttgcaaaagccattccaggtttcgccaacctggatctgaacgatcaggtgactctcttgaagtatggtgtgtacgaagctatcttcgccatgctgagcagcgtaatgaacaaggatggcatgctggtggcatacggcaatggctttattacacgggaatttctcaagtcactgagaaagccattctgtgacataatggagcccaagttcgatttcgctatgaaattcaacgctctggaactcgatgactccgatatcagcctttttgtagctgctatcatctgctgcggagaccgcccaggacttctgaatgtggggcacattgaaaaaatgcaggagggtatcgttcacgtgctgcgcttacacctccagtcgaatcatccagacgacattttcctatttcccaagctgttgcagaaaatggcggatttgcgacagctagtaacagaacatgcccaacttgttcagattattaaaaagacagaatccgacgctgccttacatccactgctgcaagagatctatagagatatgtactag

SEQ ID NO: 128247 - DNA, 1407 bp, synthetic construct
  misc_feature 1..1407: note = Description of Artificial Sequence: Synthetic coding sequence
  source 1..1407: mol_type = other DNA
atggtggatacagagtcgcccttgtgtccgctaagtcccctggaggccggcgaccttgagagtccactgagcgaggagttccttcaggagatgggaaacatccaagagatcagtcaaagcatcggtgaggactccagcgggtcctttgggtttacagaataccagtacctgggatcatgcccaggctctgacggctccgtaatcaccgacactctgagtccggcctcaagcccatcgtccgtgacgtatcccgtggtgccgggatcggttgacgagtctccctctggtgccttaaacattgaatgcagaatctgtggcgacaaggcgtccgggtatcactatggcgtccatgcttgcgagggatgtaaggggttcttccgcagaaccatcagactgaaactggtttatgacaaatgcgatcggtcttgtaagatccagaagaagaatcgcaataagtgccagtactgccggttccataagtgcttgtcggtcggcatgagccacaacgcgatacgattcggaagaatgccccggagcgaaaaagctaagcttaaagctgagatcttgacttgcgagcacgatatagaagattccgaaacggcagatttgaaatccctcgccaaaagaatctatgaagcctatctgaagaactttaacatgaataaggtcaaggccagagttatcttaagtggtaaagcttctaacaatccccccttcgtcattcacgatatggagacattgtgtatggctgaaaaaacattggtggccaaactagtggccaacggaatccaaaataaagaggcagaggtgaggatattccattgttgtcaatgtactagcgtggagacggtaactgagttaacggaatttgccaaagcaattccaggattcgctaatttggatctgaatgatcaagtgaccctgttgaagtatggggtgtatgaagcaatttttgctatgctgtcctctgtgatgaacaaggatggaatgctcgttgcttacgggaatgggtttattactcgggaatttctgaaatccctcagaaaacccttctgcgacatcatggagcccaagttcgatttcgctatgaagtttaatgccctggagctagatgacagcgacatatctttgttcgtggctgccattatatgctgtggagacagacccggcctcttaaacgtcgggcacatcgagaaaatgcaggaaggaatagttcatgtgttgaggcttcacttacagtcgaatcaccccgacgatatcttcctatttcccaaactcctgcagaaaatggctgacctgagacagctcgtgaccgaacatgcacaactcgtccagattataaagaagactgaaagcgacgccgccctccatccgttactccaggagatctacagagacatgtactag

SEQ ID NO: 128248 - DNA, 1407 bp, synthetic construct
  misc_feature 1..1407: note = Description of Artificial Sequence: Synthetic coding sequence
  source 1..1407: mol_type = other DNA
atggtcgacacagaatcccctttgtgcccactctctccccttgaggcaggagatctcgaatcaccactctctgaggagtttctgcaggagatggggaacatccaggaaatcagccaatcgatcggcgaggatagctcaggtagctttggcttcaccgaatatcagtatctcggcagctgtcctggctctgatgggtcagtaattacagacaccttaagtcccgcaagctccccctcgtcagtgacctacccagtggtgcctgggtctgtggacgagtctccctccggcgcactgaatattgagtgccggatttgcggggacaaggcgtccggatatcactatggcgtgcatgcgtgcgagggttgtaaaggcttctttagacggaccatacgcctgaaattggtgtacgacaagtgtgataggagctgcaaaattcagaagaagaaccggaacaaatgtcagtattgccggttccacaagtgtttatccgtggggatgtcgcacaatgccatccgctttggaagaatgccgcgatctgagaaagctaagctcaaggccgagatcctcacatgtgaacacgacatcgaagactccgagacggctgatctgaaaagcctggccaaacggatctatgaagcctatctaaagaacttcaacatgaataaggtcaaggcccgcgtcatactgtctggaaaggcaagtaataatccaccttttgtcatccatgacatggagacactgtgcatggcggaaaagacccttgtcgcgaagctcgtggctaatggcatccagaataaggaggcagaggtgcgcatttttcattgctgccagtgcacctcggtggagacggtgactgaattaaccgaattcgccaaggcgatccccggtttcgcgaatctggacctgaacgaccaggtaactctgctcaaatatggagtgtatgaagccatcttcgcaatgctgtccagtgtaatgaacaaagatggaatgttggttgcctatgggaacggatttatcacgcgcgaattcctgaaatctcttcgtaaaccattctgcgatatcatggagccgaagtttgatttcgccatgaagttcaatgccttggagctcgatgactccgatatctcattatttgtagctgccatcatatgctgcggcgacaggcctggcctgctaaacgttgggcacattgaaaagatgcaggaggggatcgtacatgtcctgcggttgcacttacagagcaaccatccggacgacatattcctgttccctaagttgttacaaaaaatggccgatctgcgtcagttggtgactgagcacgcacagctggtgcagatcatcaaaaaaacagaatcggacgccgccctgcaccccctgctgcaggagatctacagagacatgtattag

SEQ ID NO: 128249 - DNA, 1407 bp, synthetic construct
  misc_feature 1..1407: note = Description of Artificial Sequence: Synthetic coding sequence
  source 1..1407: mol_type = other DNA
atggtagacacagaaagtcctctgtgtcctctgagcccactggaggccggagacctggagagtccgctttcagaagaatttttacaggagatgggaaatattcaggaaatcagtcagtcaattggcgaagacagctccggttctttcgggttcactgagtaccagtacctcggctcctgccctggctctgatgggtcagtgattacagacaccttgtctcctgcatcttcgccttctagcgtcacgtatcctgtggttccgggctccgtcgatgaatctcccagtggcgcactcaatatagagtgccgaatctgcggcgataaggcgagcgggtatcattatggggtgcatgcctgcgaaggctgcaaaggctttttccgcagaactatcagactgaagttggtctatgataagtgcgacaggtcctgtaagattcagaaaaaaaaccgaaataaatgccagtactgccggttccacaaatgccttagcgtgggtatgagccacaatgccattcgctttgggcgtatgccacgcagcgagaaggccaagcttaaggctgagattctcacgtgcgagcacgatattgaagacagcgaaaccgctgacttgaaatctttggccaagaggatctatgaagcgtatctcaagaactttaacatgaacaaggtaaaagcccgagtgatcttgagtggcaaggcctctaacaatccgccctttgtgatccatgatatggaaaccttatgcatggccgaaaaaacactggttgcaaagttggtcgccaatggcattcaaaacaaggaagcggaagtcagaatattccactgttgtcagtgcacgagcgttgagaccgttactgagttaacagagtttgcgaaagccattcccgggttcgccaatttggacctgaacgatcaggtcactctcctgaagtatggcgtgtacgaggcaatattcgccatgttgtcttcagtaatgaacaaagatggcatgctggtggcgtacggaaacggattcataaccagggagtttttgaagtctctgaggaaacccttttgtgatattatggaacctaaattcgactttgctatgaaatttaacgccctggaactggacgattctgacatctccttgtttgtggcggcaattatctgctgtggcgaccgccccggcctgcttaatgtaggccatatcgagaaaatgcaggagggcatcgttcacgtactgagactccatctgcagagcaaccatcctgacgatatctttctcttcccaaaattattacagaagatggccgatttgagacaattggtcactgagcatgcacagttggtccagatcattaagaaaacagaatctgacgctgctcttcacccattattgcaagagatttatagggatatgtactag

SEQ ID NO: 128250 - DNA, 210 bp, synthetic construct
  misc_feature 1..210: note = Description of Artificial Sequence: Synthetic coding sequence
  source 1..210: mol_type = other DNA
atggtggacaccgagtctccactctgtcccctcagtcccttggaagccggcgacttagagtcccctctgagcgaagagttccttcaggagatgggtaatattcaggaaatatcacagtcaatcggtgaagatagtagcgggtccttcggattcactgagtaccagtatctaggttcctgcccaggatctgacggctctgtaattacatag

SEQ ID NO: 128251 - DNA, 402 bp, synthetic construct
  misc_feature 1..402: note = Description of Artificial Sequence: Synthetic coding sequence
  source 1..402: mol_type = other DNA
atggtggatactgaatctcctctgtgccccctgagtccgctagaggccggtgatctggaatcacccctgagcgaggagtttctgcaggaaatggggaatatccaggaaatttctcaaagtatcggcgaggattccagtggttcctttggctttacagaataccaatacctgggatcgtgtcccggtagtgatggatctgtgatcacagataccctgagcccagctagtagcccgagttctgtgacatatcccgtggtaccaggatctgttgacgaaagtccatccggggcccttaacattgagtgcagaatctgcggcgacaaagctagcggctaccactatggcgtgcatgcctgtgaaggttgtaaggtggaggggagttggaatcgggcatggtggtag

SEQ ID NO: 128252 - DNA, 525 bp, synthetic construct
  misc_feature 1..525: note = Description of Artificial Sequence: Synthetic coding sequence
  source 1..525: mol_type = other DNA
atggtggatacagaatctccgctctgccccctttccccgcttgaagccggcgacctggaatccccgctcagtgaggaatttctacaggaaatgggcaatatccaagaaatcagccagtcaatcggcgaagattcctcagggagctttggatttaccgaataccagtacctcgggtcttgccctggctctgacgggagcgttataaccgatacactgtccccagctagctccccttccagcgtgacgtacccagtcgtgcctggaagtgtggatgagtcccccagcggcgcattgaacattgaatgtaggatctgtggagataaagcctctgggtatcattacggcgtgcatgcatgcgaaggctgcaagggtttctttcgacgcactatcagattaaaactggtgtacgataagtgtgatcgctcctgtaaaattcagaaaaaaaaccgaaacaagtgtcagtactgcaggttccacaaatgcttgtctgtgggtatgagtcacaatgctttctgccacacctag

SEQ ID NO: 128253 - DNA, 30 bp, synthetic construct
  misc_feature 1..30: note = Description of Artificial Sequence: Synthetic coding sequence
  source 1..30: mol_type = other DNA
atggttgataccgagtctcccctctgttag

SEQ ID NO: 128254 - DNA, 489 bp, synthetic construct
  misc_feature 1..489: note = Description of Artificial Sequence: Synthetic coding sequence
  source 1..489: mol_type = other DNA
atgaacaaggttaaggcacgagtcatattatctggcaaagcttctaataaccctccatttgtcatccacgacatggagaccctctgtatggctgaaaaaacactggttgcgaagctcgtcgcgaatggcattcagaataaggaggcagaggtgcgaatctttcattgttgtcaatgcacctcagtggaaactgtcacagagctgacagagtttgccaaggcgattcctggattcgcgaatttggacctgaacgatcaggtaactttgctgaaatacggcgtatatgaggctattttcgcaatgttgtccagcgttatgaacaaagacggaatgcttgtcgcttatggtaatggattcatcacaagagaatttctgaaaagcttgcggaagcccttctgcgatattatggagccgaaattcgactttgctatgaagttcaatgcgctggaactggatgacagcgacatttccctgttcgttgcagcctag

SEQ ID NO: 128255 - DNA, 1326 bp, synthetic construct
  misc_feature 1..1326: note = Description of Artificial Sequence: Synthetic coding sequence
  source 1..1326: mol_type = other DNA
atggaacaaccacaggaagaggcccctgaggtgagagaagaagaagagaaggaggaggttgccgaggcagagggtgctcctgagcttaacgggggcccccagcatgcactgccgtccagctcatataccgatctctcaagatccagctcacccccctcgctgctggaccagctccagatggggtgtgacggagcttcatgcggctctctgaatatggaatgtcgcgtgtgtggagataaagctagcggctttcattatggtgtgcatgcctgtgaaggttgcaagggattttttcgcaggacaatccggatgaaactggagtacgaaaaatgtgagcggagctgtaagattcaaaagaagaacaggaacaagtgccagtattgtcggtttcagaaatgtctcgccctgggaatgagtcataatgctattcgctttgggcggatgcccgaggccgagaagcgcaagttggtagccggtctcaccgccaacgaaggctcacaatataacccacaagtggctgacctgaaggctttttccaaacacatctacaacgcctacctgaaaaacttcaacatgacaaaaaagaaggcacgcagcattctgaccggcaaagccagccacactgctccttttgtaatccacgacatcgaaaccctgtggcaggctgaaaaggggttggtctggaaacagcttgtcaatggcctcccgccatacaaagaaatcagtgtccacgttttctacagatgccagtgtacaaccgtggagaccgttcgcgaactgacagaatttgccaagtccatcccctctttcagttcactcttccttaatgatcaggtgaccctgctcaaatacggcgtgcacgaggccatcttcgcaatgctggcctccattgtaaataaggacgggctcctagtggccaacggctcaggcttcgtgacccgcgaatttctccgttctctgcggaagcccttttctgacattattgaacctaagttcgaattcgcggtgaagttcaacgctcttgagctcgacgattctgatctagccctgtttatcgccgcaatcatactgtgtggtgacagacccgggttaatgaatgtccctagagtggaggctattcaggatacgattctccgggccttggagtttcacttgcaggccaaccacccagatgcccaatacctgtttcccaagcttcttcaaaaaatggctgatttaagacagcttgtcacagaacacgcacagatgatgcaacggatcaagaagacagagaccgagacaagccttcaccccctcctgcaggagatctacaaagatatgtactag

SEQ ID NO: 128256 - DNA, 1086 bp, synthetic construct
  misc_feature 1..1086: note = Description of Artificial Sequence: Synthetic coding sequence
  source 1..1086: mol_type = other DNA
atggagcagccccaagaggaagcccctgaagtgcgcgaagaggaggagaaggaggaagtggcagaagccgagggggctcctgagctgaacggtggccctcagcacgcgttacccagttcctcgtatacagatctcagtagatcaagcagtccaccttccctattggatcagctccaaatgggatgtgatggggcaagttgtggtagtctgaatatggagtgccgtgtttgcggagataaggccagcgggtttcactatggtgtgcacgcttgtgagggttgtaagggatttttccgtaggaccattcggatgaaattagagtatgagaagtgcgagaggagttgcaagatccagaagaagaacaggaacaaatgccaatattgtcgatttcagaaatgcctggcccttggcatgtcacacaacgctatccggttcggaagaatgcctgaagccgagaaacgcaagctggtagccggattgacggccaacgagggcagccagtacaacccccaagtggctgacctcaaggccttcagcaagcacatatacaacgcatatcttaagaattttaatatgactaaaaagaaggcccggtccatcctcaccgggaaggcctctcataccgcaccctttgtaatccatgacattgaaaccctttggcaggccgagaagggcctggtctggaagcagctggtgaacggcctgcctccttacaaggagatcagtgttcatgtgttttaccgatgtcagtgtacgactgtggagactgtgcgcgaactcaccgagttcgccaagagcatccccagcttctcatctctgttcttaaacgaccaagttacgctcctgaaatatggcgtccacgaggccatattcgcaatgcttgcgtccattgtcaataaggacggactcctggtcgcgaatggatcagggtttgtgacacgggagtttttgaggagtttgagaaagccgttttcagatattattgaacccaagtttgaatttgccgtcaagtttaacgctttagaactggacgattcagacctcgccctgtttattgctgccatcatcctgtgtgggggagagtag

SEQ ID NO: 128257 - DNA, 1326 bp, synthetic construct
  misc_feature 1..1326: note = Description of Artificial Sequence: Synthetic coding sequence
  source 1..1326: mol_type = other DNA
atggagcagcctcaggaagaggcgcctgaggtgcgggaggaagaggagaaagaagaagtggcagaagccgagggggctccagaacttaatggggggccgcagcatgccctgccaagttcctcctacacagatttatcacgatcttcaagtcctccctcacttttagatcagcttcagatgggttgcgacggcgcctcctgtggatcattgaatatggaatgcagagtgtgcggggataaggcctctggcttccactacggagttcacgcctgcgagggttgcaaaggcttcttcaggaggaccatccgcatgaagttagaatacgaaaaatgcgaaagaagctgcaagatccagaagaagaatagaaataagtgccagtattgccgctttcagaagtgcttggccctcgggatgtcacacaatgctattagatttgggcgcatgcccgaagccgagaagcgcaagctggtggcggggctgaccgcaaatgagggcagccagtacaatccccaggttgccgacttaaaagccttttctaaacacatatacaatgcctatcttaagaacttcaatatgaccaagaagaaagcccggagcattctaacaggaaaggcttcccacaccgcccctttcgtgatacacgatatcgaaacgctgtggcaagctgagaaaggcctcgtgtggaagcagcttgttaatgggctcccaccttataaagagatcagtgtgcacgtgttctaccgctgtcagtgcactacagtagagaccgtccgggagctcacagagtttgcaaagagtatcccaagtttttcttcactgtttctgaacgaccaggtgactctgctcaagtatggtgtccacgaagcaatttttgctatgctggccagcatcgtgaacaaggatggtttgctcgtggctaatggatcagggttcgtcacccgagagtttctgcgcagtttacggaagcctttcagtgatattatcgaacctaaatttgagtttgctgtgaagttcaacgctctggaattggatgattcggacctcgcactctttatagcagctattatcctgtgtggcgataggccaggccttatgaatgtcccaagagtcgaagcgatccaagatactatactgagagctcttgagtttcatctccaggctaatcatcctgatgcccaatatctatttccgaagttgcttcagaagatggccgatttaagacagttggtgaccgagcacgcgcagatgatgcaaaggattaagaagactgagaccgaaacatcccttcaccctctgttgcaggagatctataaagatatgtactag

SEQ ID NO: 128258 - DNA, 1032 bp, synthetic construct
  misc_feature 1..1032: note = Description of Artificial Sequence: Synthetic coding sequence
  source 1..1032: mol_type = other DNA
atggaacagcctcaggaggaggctcccgaggttcgagaggaagaggagaaggaagaggtggccgaggccgagggcgcaccagagttaaacgggggacctcaacacgctcttcccagtagttcttatacagccattaggttcggaaggatgcccgaggccgaaaagcggaagttggtagcgggcctgacagcaaatgaggggtcccagtacaacccgcaggtagctgacctaaaggcctttagcaagcacatttataacgcctacctcaaaaacttcaacatgaccaagaaaaaggcacggagcatccttacaggtaaggcctcccacacggcaccgttcgtgatccacgacattgaaaccctctggcaggctgaaaagggcctggtgtggaagcagcttgtgaatggtctgcctccgtataaggagatctccgtgcacgtattctaccggtgtcaatgtacgaccgtcgagactgtacgtgagctgaccgaattcgcaaagtctattccatctttctcatctttgttcctcaatgaccaggtgaccctgcttaagtatggagtgcacgaggccatctttgccatgctggcatcaatagtgaataaagatgggctcctggtcgcaaacggaagcggctttgtaactcgcgaatttctcagatccttacgtaagccattctctgacattatagagccaaagtttgaatttgccgtaaagttcaacgccctcgagctcgatgactcagacctcgctcttttcatcgcagctatcattctctgtggcgaccgccccggcctgatgaatgtgcccagggtcgaggctatacaagatacaatactccgtgctttggagtttcacttgcaggccaaccatccggatgctcagtacctgtttcccaagctgctacagaaaatggctgacctccggcagctggtcacagagcatgcccagatgatgcagcgcatcaaaaagacagagacagagaccagtcttcaccctttgctccaagagatctacaaggatatgtactag

SEQ ID NO: 128259 - DNA, 1086 bp, synthetic construct
  misc_feature 1..1086: note = Description of Artificial Sequence: Synthetic coding sequence
  source 1..1086: mol_type = other DNA
atggaacagccccaagaagaggctccagaagtgagagaagaggaggagaaagaagaggttgccgaggctgagggggctccagaactgaacggagggccccagcacgccctcccctcatcatcttataccgatctcagtcggtcttcctctcccccttctctcctggaccagctgcaaatgggatgcgacggggcctcatgtggatcacttaatatggaatgcagagtatgcggcgacaaagccagcgggtttcattacggagtccatgcctgtgagggatgtaagggcttcttccgacggacaataagaatgaagctggagtacgaaaaatgtgagcgatcttgtaagattcagaagaagaaccgtaacaagtgtcagtattgcagatttcaaaaatgtctggccctgggtatgagccataatgccatccgattcgggaggatgccggaggcggagaagcgaaagctcgtcgcgggcttgaccgctaacgaagggtcccaatacaatcctcaggtggctgacctcaaagctttttccaaacatatctacaatgcctacctgaagaactttaacatgactaagaagaaagcacgttcaattcttaccggcaaggcatctcacacagctcctttcgtgattcacgatattgaaacattgtggcaggctgagaagggactggtctggaaacaacttgtaaatggtcttccgccatacaaggagattagcgtgcatgtcttttatcggtgccagtgcaccacggtagagactgtgcgtgaattaaccgaattcgccaagagcataccttcgttctctagcctttttctcaatgaccaggttactttgttaaagtatggagtgcacgaggccatctttgccatgctcgcatctattgttaacaaagacggcctgctggtagccaacggctctggattcgtaacccgcgagtttctgcgctccctgcgcaaaccattctcggacataattgagcctaaatttgagttcgcagtcaaatttaatgcactggagctagatgacagcgatctggcgctgtttattgcagccatcattctatgtgggggtgagtag

SEQ ID NO: 128260 - DNA, 1209 bp, synthetic construct
  misc_feature 1..1209: note = Description of Artificial Sequence: Synthetic coding sequence
  source 1..1209: mol_type = other DNA
atgcaccagagggaccttagccgcagtagcagccccccttctttactggaccagctgcagatggggtgcgatggcgcttcctgcggatctctgaacatggagtgtagagtctgcggtgataaagccagcggatttcattatggcgttcacgcctgtgagggatgtaagggcttcttcaggcgtacgattcgtatgaagttggaatacgaaaaatgtgagagaagctgcaagatacaaaaaaaaaacagaaacaagtgccaatactgcagattccagaagtgtttggcgctgggcatgtcgcacaacgctatcaggtttgggagaatgcccgaagcggagaaaagaaagcttgtcgccgggcttacagcaaacgaaggctctcagtacaacccccaggtcgcagatctgaaggcatttagtaagcatatttataatgcctacctgaaaaattttaacatgacgaagaaaaaggcgagatcaattctgaccggtaaggcttctcatactgcgccatttgtcattcatgatatcgaaaccctatggcaggctgaaaaaggcctggtgtggaaacagttggttaacggcctgccaccttacaaggagatttccgtgcacgtattttatcgttgccagtgcactacagtcgagacagtgagagagcttaccgaatttgccaagtctattccgagtttttcaagcttgttcctgaacgaccaggtgaccttgctcaaatatggcgtgcacgaggcaatctttgctatgctggcctcaattgtcaataaagacgggctcctcgtagccaacggcagtgggttcgtgacccgggagtttctgcgctcattacgaaaaccgttttcagatattattgaaccaaaatttgaattcgctgtgaagttcaatgctttggagctggacgacagcgatctggctcttttcatcgccgcgattatcctttgcggagatcgacctgggctaatgaacgtgccgcgggtcgaagctattcaagacactattctgcgggccctggagtttcatctccaggcaaaccatccagatgcccaatatctgttccctaaacttctgcagaaaatggctgatctacgtcaactagtcacagaacatgcacagatgatgcagagaataaaaaaaaccgaaacagaaaccagtctgcatcctctgttacaggaaatttataaggacatgtattag

SEQ ID NO: 128261 - DNA, 1017 bp, synthetic construct
  misc_feature 1..1017: note = Description of Artificial Sequence: Synthetic coding sequence
  source 1..1017: mol_type = other DNA
atgaagctggagtacgagaagtgtgaaagatcttgcaaaatccagaagaagaacaggaacaagtgccagtactgcagatttcaaaaatgtctggccctgggcatgtcccacaacgccatccgctttggtcggatgccagaagccgagaagagaaagctggtggccggcctcaccgccaacgagggctctcagtacaatccccaggtggccgaccttaaagcattctctaaacatatttacaatgcttatttgaaaaatttcaacatgaccaagaagaaagcccgatctatcctgacgggcaaagcatcccacacagccccttttgttatacacgatatcgagaccttatggcaggcagagaaggggctcgtatggaaacagctggtcaatggactgccaccatataaggagatttctgtccatgtgttttaccgctgtcagtgcactactgtcgagacagtacgcgagctgaccgagtttgcaaagtcgattccaagtttttcctcactgttcctaaatgaccaggttaccctgcttaaatacggcgttcacgaggcaatatttgctatgttagccagcattgtgaacaaggatgggctactcgtggccaacggctctggtttcgtgaccagagagttcctgcgaagcctcaggaaaccatttagcgacatcattgaacctaagttcgaatttgctgtaaagttcaacgccctggaactcgatgattctgatctggccctttttattgcagccattatactctgtggggatagaccaggactaatgaatgtgccaagagtggaagccattcaggatacgatcctcagagcccttgagttccaccttcaggccaatcaccctgatgctcaatacctgtttcccaaacttttgcagaagatggcagatctgagacaactggtgactgaacatgctcaaatgatgcaacgtataaaaaaaacagaaaccgagacgagcttgcaccccctgcttcaagaaatctataaagacatgtactag

SEQ ID NO: 128262 - DNA, 1518 bp, synthetic construct
  misc_feature 1..1518: note = Description of Artificial Sequence: Synthetic coding sequence
  source 1..1518: mol_type = other DNA
atgggcgagaccctgggggattcccctatcgaccccgagagcgacagtttcacagatacactgagcgccaatatctcccaagaaatgactatggttgatactgaaatgcctttttggcctaccaatttcggaatctcttccgtcgacctcagcgtgatggaggatcattcccacagctttgatattaagcctttcactacagtagacttcagcagcatctctactccacattacgaagatattccgtttacccgcacagaccctgttgtcgcagactacaaatatgatctaaaactgcaagaataccagagcgccatcaaggtggagccagcatctcccccatattatagcgagaagactcaactctataataagccccacgaggagccttcgaactcactcatggcgatcgagtgtagggtgtgcggtgacaaggctagcgggttccattatggcgttcacgcctgtgaaggatgcaaaggcttcttccgacgaactatcagactgaaactgatatatgataggtgtgatctgaattgtcgtatacacaagaagagccgaaacaagtgccagtattgtcgcttccagaagtgcttggccgtaggaatgtcgcacaacgcaatccgatttggcagaatgccacaggccgagaaagagaagttactggctgagataagctctgatatagaccagctgaaccccgaatcggcagacttgagagctcttgctaagcacttatacgattcatacataaagtcattccctctgaccaaggctaaagcacgagcaatattaacaggaaagaccaccgacaaatctccctttgtgatctatgatatgaattctctcatgatgggcgaggacaaaatcaaattcaaacacatcacacccctccaggagcagtctaaggaggtagccattaggatttttcagggttgccagtttagatcagttgaggccgtacaggagatcaccgagtatgccaagtccattcccggttttgtgaacttagatctgaatgatcaagtgactctgctgaaatatggcgtacacgagatcatctacaccatgctagctagcctgatgaacaaggacggggttctgattagcgaggggcagggattcatgacaagggaattcctcaaatccctcaggaaacctttcggagactttatggaacccaagtttgagtttgccgtgaaattcaacgccctggagctggacgattccgacttggctatcttcatcgcggtgatcatactctctggagaccggcccggtctgctgaacgtcaagccaatcgaggacattcaggacaacctgctgcaggccctggaactgcaattgaaactgaatcaccccgagagtagtcaattgttcgcaaaattactccagaagatgacggacctccgacagatcgtgaccgaacacgtgcagctcttgcaggttatcaagaagaccgagacagacatgtccttgcacccactcctgcaggaaatttataaagacttgtactag

SEQ ID NO: 128263 - DNA, 1434 bp, synthetic construct
  misc_feature 1..1434: note = Description of Artificial Sequence: Synthetic coding sequence
  source 1..1434: mol_type = other DNA
atgaccatggtagacactgagatgccgttttggcccaccaactttggtatctcatctgtggacttgtctgtgatggaagatcacagccactctttcgatattaaaccgttcacgaccgtggactttagtagcataagcactccccattacgaggacatcccttttaccagaacagaccccgtagtcgccgattataagtacgacttaaaactccaggagtaccaaagcgccatcaaagtcgaacccgctagcccaccttactattcagagaagacacaattgtataacaagccccatgaagagccatccaacagtctaatggcaatcgaatgtcgcgtttgtggcgacaaagcttctgggtttcactatggggtccacgcttgcgaaggctgcaagggcttcttcagacgaactatcagactcaaattaatctacgatcgctgcgacttaaactgccgcatacataaaaaaagccggaataagtgccaatactgccggtttcagaagtgcctggctgtagggatgtcccacaacgccattaggttcggcagaatgccacaggcagagaaagaaaagctcctggctgaaatatccagcgacatcgatcagctgaatccagagagtgctgatttaagggcgctggctaagcacctgtatgatagctatataaagagttttcccttaacaaaggcaaaagccagggccatcctcacgggaaagaccactgataagtccccgttcgttatctacgacatgaattccctcatgatgggggaagataagatcaagttcaagcacatcactccactgcaggaacagtcaaaggaagtggcgatcaggatctttcagggttgccagtttcgcagcgtggaagcagtacaggaaataactgagtatgcgaagagcatccctggcttcgtgaaccttgatctgaatgaccaagtaacactgttaaaatacggggttcacgaaatcatctacaccatgctggcctctctgatgaacaaggatggcgtgctgatcagcgagggacaaggctttatgactcgcgaattcctcaagagtcttcgtaagccctttggcgatttcatggagcctaaattcgagtttgctgtgaaattcaacgcattggagttagatgattcggacttggctatctttatcgccgtgattatcctttccggggacaggccggggcttctcaacgtcaagccaatagaggacatccaggacaaccttctccaagcactggagttacaactcaaactcaatcatccagagtcttcccaactgtttgctaagctgctgcagaagatgaccgacctgcgacaaattgtcactgagcacgtacaactgctgcaagtgattaagaaaacagagacagatatgtctctgcaccctttgctgcaagagatttataaagacctgtactag

SEQ ID NO: 128264 - DNA, 753 bp, synthetic construct
  misc_feature 1..753: note = Description of Artificial Sequence: Synthetic coding sequence
  source 1..753: mol_type = other DNA
atgaccatggtcgacacggaaatgcccttctggcctacaaactttggtatctcgtctgtggacctgtctgtgatggaagaccattcacactcattcgatatcaaacccttcactaccgtggacttcagctcgatttctacacctcactacgaggacattcccttcacaagaacagaccctgtggtcgcggactataagtacgacctgaagctccaggaataccagtcggctataaaagttgaaccagcatcaccaccgtactattctgaaaagactcagctctacaacaagcctcacgaggagccatctaattccctcatggctatcgagtgcagagtatgtggggataaggcgagtggctttcattatggagtgcacgcgtgcgaggggtgcaagggcttctttcgacgaactatccgcctcaagcttatttacgatcgttgtgacctgaactgtaggatccataaaaagtcacgcaacaaatgccagtactgcagatttcagaagtgtctcgccgtgggcatgtctcacaatgccattaggtttggccgtatgcctcaggctgaaaaagaaaaactcctggctgagatctccagtgatattgaccaactgaatcctgagtccgcagatttgcgcgccttggctaaacatctctacgactcttacataaaaagtttccctttgacaaaagcgaaagctcgcgctattcttactggtaaaactaccgataagagcaccgcacaggtgtgctag

SEQ ID NO: 128265 - DNA, 1434 bp, synthetic construct
  misc_feature 1..1434: note = Description of Artificial Sequence: Synthetic coding sequence
  source 1..1434: mol_type = other DNA
atgaccatggtcgacactgagatgcccttctggcctacgaacttcgggatttcctccgtcgatttgagcgtcatggaggaccatagccattccttcgacataaagccatttactacagtggactttagttccatctctacaccccactatgaggatatcccattcacacggactgaccctgttgttgcggactataagtacgacctgaaacttcaagagtatcagtccgcgattaaggtggaacccgcatcgcccccctattacagcgaaaaaactcagctctacaacaaaccccacgaggagccatctaattctctgatggcaattgagtgtagagtttgcggggataaagcatccggatttcactacggtgtccatgcttgtgagggatgcaaggggttttttaggcgcactattcgactgaagctgatttacgatagatgcgacttaaactgcagaatccacaagaaaagccgcaacaagtgtcagtattgccgtttccagaagtgtttggcagtggggatgagtcataatgctatccgcttcggcaggatgccccaggccgaaaaagagaagctgctggctgagatttcctccgacatcgatcagctcaatcccgaatctgctgacctacgcgccctcgccaaacacctctacgattcttacatcaagtcctttcctttaaccaaagctaaagctcgtgcaatcctgaccgggaagacaactgataaatctccctttgtcatttacgacatgaactccctgatgatgggggaagacaaaattaagttcaagcacataaccccccttcaggagcagagcaaggaggtggcgatccggattttccagggctgtcagtttcggagtgttgaagctgtgcaggaaatcacagagtacgctaagtctatcccgggatttgtgaacctcgacctgaatgatcaggtgacactcctgaaatatggggttcatgagatcatttacaccatgctagcaagcctgatgaataaagacggagtgttaattagtgagggccagggtttcatgacacgggagttcttgaaaagcttgcgcaagccattcggcgactttatggaacccaagttcgaatttgccgtcaaattcaatgccttagagcttgacgattcagacctagctatttttattgctgtcattatcttaagcggagaccgccccgggcttctgaatgttaagccaatcgaggatatccaggacaacctgctgcaagctttggagttgcagctgaagttgaaccaccccgagtccagtcaactgttcgccaagctgctacagaaaatgacagacctccggcagattgtcactgaacacgtccagctcctgcaggttattaagaagacagagacggacatgtccctgcatcctctgctgcaggaaatctacaaggacctgtactag

SEQ ID NO: 128266 - DNA, 1434 bp, synthetic construct
  misc_feature 1..1434: note = Description of Artificial Sequence: Synthetic coding sequence
  source 1..1434: mol_type = other DNA
atgacgatggttgacactgaaatgccgttctggcccacaaatttcggcatctcctctgtggatctttctgtgatggaggaccattcccactccttcgatatcaagcccttcacaacggtcgactttagctcaatatccaccccacattatgaggacattcctttcacccgcactgatccagtagtggccgattacaaatatgatctgaaacttcaggagtaccagtctgctatcaaagtggaacctgcttcacccccttattacagtgagaaaacccagctctataacaagccccacgaggagccatccaattcactaatggcgatcgaatgccgcgtgtgcggggataaagcttcaggattccactacggtgtacatgcgtgtgaagggtgcaaaggtttctttagaagaaccataagattaaaattgatttacgataggtgtgacttgaactgccgcattcacaagaagagccggaacaagtgccaatactgtcgtttccaaaaatgcctggccgtgggtatgagtcataatgcgattcgatttgggcggatgccccaggcggaaaaggaaaagctactggccgaaatttcctcggacatcgatcagctgaatccggaatccgcagatctgagagccttggctaaacacttgtacgattcctatattaaatcttttccactgaccaaggcaaaggctagggccattcttaccggtaagacaacagacaaatctcctttcgtgatttacgatatgaacagcttgatgatgggcgaggataagatcaagttcaagcacatcacaccactacaggagcaatctaaggaggtggccattcgcatttttcagggatgccagtttcgtagtgtggaggctgtgcaggaaattaccgagtacgcgaaaagcattcctgggttcgtgaatctggaccttaatgatcaagtgaccttgctaaagtacggtgtgcacgagattatatacaccatgctcgcgagcttaatgaacaaagacggcgtgctcatcagcgagggacaagggtttatgacaagggaattcctgaagtcattaaggaagcctttcggcgacttcatggagcccaaattcgaatttgcagttaagtttaacgcgctcgaactggacgattcagatctggcgatatttatcgcagttataatcttgagcggtgacagacccggactgctgaatgtaaagcccatcgaggacatacaggataacctgctgcaggctcttgaactgcagctgaagctaaaccatccagagtcttcccaactcttcgccaaactactgcaaaagatgacagatctgcggcaaatcgtgacagagcacgtgcaactgctgcaagtgatcaaaaaaacagaaacagatatgtctttgcaccccttactgcaggagatctataaggacctttattag

SEQ ID NO: 128267 - DNA, 1434 bp, synthetic construct
  misc_feature 1..1434: note = Description of Artificial Sequence: Synthetic coding sequence
  source 1..1434: mol_type = other DNA
atgactatggtcgatactgaaatgccattctggccaacaaacttcggaattagtagcgtggatctgtccgtgatggaggatcactctcacagcttcgacatcaagcccttcaccacggttgacttctcttccatcagcacacctcactacgaagacatccctttcactagaacagatccagtggttgccgattataagtatgacttgaagctccaggaatatcagtccgcaatcaaggtcgaacctgcatcccccccgtattactctgaaaaaacccaattgtataataagccacatgaggagcccagtaattcactcatggctattgagtgtcgggtttgcggcgacaaagctagtgggttccactacggagtccacgcctgtgaaggatgcaaaggtttttttagacgcacaattagactcaaactgatctacgatcgatgtgacctcaactgccggatccacaaaaagagccggaacaagtgccagtattgtagatttcagaagtgtctggccgtagggatgtcccacaatgccattagatttggtagaatgccccaggctgaaaaagaaaaactgttagccgagatatcaagcgatattgaccagctcaacccagagtctgcagacctaagagccctggccaagcatctgtatgactcgtatattaaaagtttccccctgactaaagcaaaggcacgcgccattctcacaggtaaaacaacggacaaatccccctttgttatttacgacatgaattcgctgatgatgggagaggacaaaatcaaattcaagcacatcacgccacttcaggaacagagcaaagaggtggcaatccgaatcttccagggctgccagttccgtagtgtggaggccgtgcaggaaattacggagtacgccaaatccattccgggtttcgtgaacctggacctcaacgaccaggtgactcttctcaagtatggggtccatgaaattatttacactatgctagcaagtctaatgaacaaggacggcgtccttatttcagaggggcagggatttatgacccgggagtttcttaaaagcctccggaaaccttttggagactttatggagccaaaattcgaattcgcggtgaaattcaatgccctggagctggacgacagcgaccttgccatctttatcgcagtcatcatcctgagcggtgaccgtccagggctgctaaatgttaaaccgatagaggacatccaggacaacctcctacaggctctcgagttacaactgaaactgaatcatcctgagtcctcccagcttttcgctaaactgctccagaaaatgacggacctgcgccagatcgtgaccgaacacgtccagctcctacaagtaatcaagaaaaccgagactgatatgtctttacaccccctcttacaggagatttataaggatctctattag

SEQ ID NO: 128268 - DNA, 1452 bp, synthetic construct
  misc_feature 1..1452: note = Description of Artificial Sequence: Synthetic coding sequence
  source 1..1452: mol_type = other DNA
atgaaagggttcagcgaaatgacaatggtagataccgaaatgccgttctggcccaccaattttggaatctcatcggtcgacctttccgtgatggaagaccattcgcactctttcgacataaaacccttcacaactgtcgacttctctagcatatctacgccccattacgaggatattccttttactaggactgaccccgttgtcgccgattacaaatacgacctcaagttgcaggagtatcagtccgctattaaggtggagcctgcctcacctccctactactccgagaagacccaattgtacaacaagccccacgaagaacccagtaattccctgatggcgatcgagtgtcgcgtgtgcggtgataaggccagcggattccattacggggttcacgcttgtgagggatgcaagggttttttccggcgtaccataaggctcaaactgatctacgaccgctgcgacctgaactgtcgtatccataagaagtcccggaataaatgccaatactgccgattccagaaatgcctggctgtaggaatgtcccacaacgctattagatttgggcgcatgccacaggctgagaaggaaaagctgctggcagaaattagcagtgacatcgaccaactcaacccagaaagtgctgatctccgggcccttgcaaaacatctgtatgattcctatatcaaatccttccctctgaccaaagcgaaagctcgggcaatcctgacagggaaaaccactgataagtcaccattcgtaatctatgatatgaacagtctcatgatgggcgaggataagataaaattcaagcatatcaccccactgcaggagcagagtaaggaggtcgctatccgcatattccagggctgtcagttccgctcagtcgaagcagtccaggaaattacagaatatgccaaatcaatccctggcttcgtgaatcttgatcttaatgaccaggttacactgttaaagtatggtgttcatgagatcatctacaccatgctggcatcccttatgaataaagatggagtcctcataagtgaaggtcagggttttatgacgcgggaatttctgaagagcctgaggaagccttttggcgatttcatggaacctaagtttgagttcgcagtgaagtttaacgctctggaactggatgacagcgacctggcaattttcatcgccgtgattattctttccggggacagacccggattgctaaatgtgaaaccaattgaagatattcaagacaatttactgcaggcactcgagctccaactaaagctgaatcatcctgagtcatcccagttattcgcaaagctgctgcaaaagatgaccgatttaagacagattgttacagaacatgtgcagctgctgcaggtcattaagaaaaccgagacggatatgtccctgcaccctctgcttcaggagatctataaggacctgtattag

SEQ ID NO: 128269 - DNA, 399 bp, synthetic construct
  misc_feature 1..399: note = Description of Artificial Sequence: Synthetic coding sequence
  source 1..399: mol_type = other DNA
atgacaatggtggacaccgagatgccattctggcccacaaattttgggatctcctctgttgacctctccgtaatggaagaccattcacactcctttgatataaagcccttcaccaccgtggacttcagttcaatctccactccccattacgaagatataccatttacccgtacagaccccgtggtggccgattacaagtacgatctgaagctccaggagtaccaaagcgccattaaggtggaacctgccagcccgccgtactacagtgaaaagacccagctgtacaataaacctcatgaagagccctcgaattctctcatggccatcgagtgtcgcgtctgcggggataaggcatcgggctttcattacggagttcacgcctgcgaaggttgcaagtag

SEQ ID NO: 128270 - DNA, 300 bp, synthetic construct
  misc_feature 1..300: note = Description of Artificial Sequence: Synthetic coding sequence
  source 1..300: mol_type = other DNA
atgaccatggttgacacagagatgcccttctggcccaccaactttggcattagcagcgtggacctctcggtcatggaggatcacagtcactctttcgacattaaacccttcaccacagttgactttagctcaattagtacaccgcattacgaagacataccctttacgaggactgaccccgtggtcgctgattacaagtacgacttgaaactacaggaatatcaaagtgctataaaggtggaacctgcttcgccaccatattatagtgagaagactcaactttacaacaagccccactag

SEQ ID NO: 128271 - DNA, 132 bp, synthetic construct
  misc_feature 1..132: note = Description of Artificial Sequence: Synthetic coding sequence
  source 1..132: mol_type = other DNA
atgaccatggtggatacggaaatgcccttttggcccaccaacttcggtatatcaagcgtggacctctcagtgatggaagaccacagtcatagctttgatatcaagccattcaccacagtcgatttcagttag

SEQ ID NO: 128272 - DNA, 747 bp, synthetic construct
  misc_feature 1..747: note = Description of Artificial Sequence: Synthetic coding sequence
  source 1..747: mol_type = other DNA
atggtagatacagaaatgcctttttggcccactaatttcggcatatcttctgtggatctctccgtgatggaagatcattcgcattcattcgacataaaaccttttaccactgtggacttcagttcaatctccacaccccactacgaggatattccattcacacggaccgatcctgttgtggccgactacaagtacgatctgaagctgcaggagtaccagtctgcaatcaaagtggagccagccagtcccccgtactattctgagaagactcagctgtacaacaaaccacacgaagagccaagcaacagtctgatggcaatagaatgtcgagtgtgcggcgataaagcctccggatttcactacggggtgcatgcctgtgagggatgtaaaggtttctttcgacggacgatccgcctaaagcttatttacgatcgctgtgatctgaattgccggatccataagaagtcccgcaacaagtgtcagtattgtcgctttcagaaatgtcttgctgtcggaatgagccacaatgcgattcgttttggcaggatgccacaggctgagaaagaaaaactgcttgcagagatctcttccgatattgaccagcttaatcccgaatccgccgacctgcgcgcattagccaagcacctgtatgattcctacattaagtcattccccttgaccaaggccaaagcaagggccatactcaccgggaaaacaaccgacaaatcaaccgctcaagtgtgttag

SEQ ID NO: 128273 - DNA, 2955 bp, synthetic construct
  misc_feature 1..2955: note = Description of Artificial Sequence: Synthetic coding sequence
  source 1..2955: mol_type = other DNA
atggctggaaacgattgcggggccttgctggacgaggaactaagctctttttttctgaactacctggcagacactcaggggggtggttccggggaagagcaactttacgccgacttccctgagttagatttatcccagcttgacgctagtgattttgattcagctacgtgtttcggagaattgcagtggtgtcccgaaaactctgagactgagccaaatcagtacagtcccgacgactccgaactatttcagattgactccgaaaacgaggctttactggccgaactgaccaagacgctggacgacatcccagaagacgacgtgggactggcggcctttcctgctctggatgggggcgacgcattgagttgtaccagtgcgtcaccagcacccagctcggctccaccatcccccgcacctgaaaagcctagtgcaccggctcccgaggtggatgaactttcgctggcagattccacccaggataaaaaggctcccatgatgcagagccagtcccggtcctgcacagagctgcacaaacacctgacatcggcgcagtgctgcctgcaggacagagggctgcagcctccctgccttcaatctccccgcctgccagccaaagaggacaaagagcctggtgaagactgtccatccccgcagcctgctcccgcatcaccccgggactcccttgccctcggccgggccgatcccggagcccccgttagtcaggaggacatgcaggctatggtccagcttatccgatacatgcatacctactgcctgccgcagagaaagttgcctccccagacacctgagcccctgcccaaggcgtgcagtaatccatcccagcaggtacgatcaaggccttggtctcgtcaccactccaaggcaagctgggcagagttttccattcttagagagcttctggcccaggatgtgctctgcgacgtgagcaagccatacaggctggccacaccagtgtacgcatcccttacacctcgttctaggccaagaccccctaaagatagccaggcaagtccaggtaggcctagcagtgttgaggaggtcaggatagcagccagcccgaaaagcacaggcccccgaccctctttgcgcccactccgtctggaagtcaaacgagaggttcgacgcccggcacggctgcagcagcaggaggaagaggatgaggaggaggaggaagaggaggaagaggaggagaaggaggaagaggaagaatgggggagaaagagaccaggtcgtggccttccctggacgaaactggggcggaaactagagtctagcgtgtgtccagtgaggagatcacgtagacttaacccggaacttgggccctggttgacatttgccgacgagccgctcgtcccctccgaaccgcagggcgccctgccttcactctgcctggcccccaaggcttacgacgtcgaacgggaactggggtctcccaccgatgaggacagcgggcaggaccagcagctgctacgcgggcctcagattcccgccctggagtctccgtgcgaaagcggctgcggcgatatggatgaagacccttcttgccctcaactgcctccaagggattccccccgatgcctgatgctggccctgagccagagcgatcctacatttggaaaaaaatcttttgaacaaaccctcaccgttgaactgtgtgggaccgccggcctgaccccccccactacaccgccttacaagcccaccgaagaggatccattcaagcccgatattaagcattcactcggaaaagaaattgcgctttctcttccgtccccagaaggactgtcacttaaagccactccaggcgctgctcataagctgccaaaaaaacatccagaacgatctgaactgttgagccacctgaggcatgccacagcccaacccgccagccaggctggtcagaagcgcccgttcagctgcagctttggggatcatgattattgccaggtgctgaggcctgagggtgtcctgcagcgaaaagtccttcgttcttgggagcccagcggagtgcacttggaggactggccacagcaaggggcaccatgggcggaggcacaggcacccggccgtgaggaagaccgaagttgcgacgctggcgccccaccgaaggattccactctcctgcgtgatcatgagatccgggccagtttgaccaagcattttggccttctggagaccgcattggaggaagaggatttagcatcctgcaagagccctgagtacgacactgtgtttgaagactcttcctcctcctcaggagaatcttcatttttacctgaagaggaggaggaagagggcgaagaagaggaagaagatgatgaagaagaggatagcggcgtgagtcctacctgttccgatcattgtccataccagtctcccccttcgaaagctaataggcaattatgttcgaggtcaagatcgtcctccggcagttcaccctgccactcatggtccccggcaaccagaaggaacttcagatgtgaatctcgaggcccatgcagcgacagaaccccgtctatccgccacgctcgtaaaagaagagagaaggccatcggcgaaggtagggtggtgtatatccagaatctgagctctgatatgtcgtctcgagagctgaagcgccggtttgaggtgtttggcgaaatcgaggagtgtgaggtactcacacgaaatcgtaggggagaaaagtatggttttattacatatcggtgctctgaacacgccgctttgtcacttactaaaggcgccgcactgcggaagagaaacgaaccgtcattccagctgagctacggaggcctgcgacatttttgttggcctcggtataccgattatgattccaactcagaggaagccctgcccgcaagtggcaagtctaaatacgaagcgatggactttgatagcctcctcaaggaggcccaacagtccctgcactag

SEQ ID NO: 128274 - DNA, 2880 bp, synthetic construct
  misc_feature 1..2880: note = Description of Artificial Sequence: Synthetic coding sequence
  source 1..2880: mol_type = other DNA
atgggcgggggttccggcgaagaacaattgtacgctgatttccctgaactggacctgtctcagttagacgcatcagattttgactcggccacgtgttttggtgagctacaatggtgccctgagaactctgaaacagaaccaaatcagtactccccagatgacagcgagctctttcagatcgatagtgagaacgaagctttgctggcagaactgaccaagacgttggacgacatccccgaggacgatgtcggcctggctgctttccctgccctagacggaggggatgccctgtcttgcacctccgcttcccccgctcctagctcggccccaccttcccctgccccagaaaagccaagtgctcccgcccctgaggttgatgagctctcactcgccgactccacccaggataagaaggcaccgatgatgcagtcccagagccgatcttgtactgaattgcataagcacctgacatcagcacagtgctgtctgcaagatagagggctgcagccaccgtgcttgcagagccctcgcctgccggctaaggaagataaagaacctggtgaggactgtccaagtccacaacccgcaccagctagtcctagagactctctcgcacttgggcgggcggatcctggagctcccgtgtcgcaggaggatatgcaggccatggtccagctgattagatacatgcacacttactgtcttccacagcgtaagcttcccccccagacacccgagccactccccaaggcctgcagtaacccttctcagcaggtgcggagccggccttggtcaagacaccactctaaggcttcttgggccgaattctcaatattgagggaactgctggcccaagacgttttgtgcgatgtaagcaagccatatcggctggccactcctgtttatgcatcacttacaccccgatcacgcccaaggcctccaaaagacagccaagcgagcccaggccggccctcctcagttgaggaggtacggattgccgctagccccaagagcacaggcccaagaccaagccttcgcccactccgacttgaagtaaagagagaggttcgtcgcccagcgagattacagcaacaggaggaggaagacgaggaagaggaggaagaggaggaggaggaggagaaggaagaggaagaagagtggggacgcaaacgacccggacggggcctcccgtggacaaagctcggacggaagctagagtcctccgtctgtcctgtgagaagatctagacggctcaatcctgagttgggtccctggttgacgttcgccgacgagcctcttgtgccaagtgaaccacagggtgctctgccctccctgtgcctggcccctaaggcatatgatgtagagcgggaactaggctctcctacggatgaggactcagggcaagatcagcaactcctaagagggccacagatccccgctctggagtcaccctgcgaaagcggctgcggagacatggacgaggaccctagctgtccccaacttccaccacgtgattccccgagatgtcttatgttggcattgtcccagagcgaccctacttttggcaagaagtcattcgaacaaaccctgacagttgagttgtgtggcacggcggggcttacccctcctacaacacctccttacaagcctacagaagaggatccatttaagcccgacataaaacattcactgggcaaagaaatagcccttagcctgccctccccggaagggctgagcttaaaggcaacacccggcgcagcccataagttgccgaagaaacatcccgagaggtccgagctgctgagccacctgcggcatgctactgcacaacctgcgtcacaggcaggtcagaagcgtcctttctcctgctcattcggagatcacgactactgtcaggttcttcggccagagggggtcctccagcggaaggtgctgcggtcatgggagccaagcggcgtgcatctagaagactggccacagcagggggccccttgggcagaggctcaggctccgggtcgagaggaagaccgctcttgcgacgccggggctcctcccaaggactcaactctcttacgagaccatgagatacgggcttcactcacgaagcatttcgggctgcttgagacggctctggaagaggaagaccttgcgagttgtaagagccctgaatatgataccgtctttgaggatagttcctcttctagtggtgaatcttcgtttctgcctgaagaagaagaggaggaaggggaggaggaggaagaagacgatgaggaggaagactccggggtgtccccgacttgtagtgatcactgcccttaccagagccccccatcaaaagccaaccgacagctgtgcagcagatcaagatccagtagcggatcttcgccctgtcactcatggtccccggccactcgccgtaatttccgatgcgagtccagaggcccgtgctcagaccgaacaccttctatcaggcacgccaggaagagacgagagaaggcgattggggagggaagggtcgtgtatattcagaacctaagctctgacatgtcttcacgggagttaaagaggcggtttgaagtgtttggggagatagaagaatgcgaagtactgaccaggaacaggaggggcgaaaaatatggctttattacctaccgttgtagcgagcacgccgctctcagccttactaagggggcagcattgcgaaaacgcaatgagcctagttttcaactgagttacggagggctgcgacacttctgttggcctcgctatacagactacgactccaactcagaagaggctctccccgcctccgggaagtccaaatatgaagccatggacttcgattcgctgttgaaggaggcacaacagtctctacattag

SEQ ID NO: 128275 - DNA, 2397 bp, synthetic construct
  misc_feature 1..2397: note = Description of Artificial Sequence: Synthetic coding sequence
  source 1..2397: mol_type = other DNA
atggcctgggatatgtgcaatcaagattcagaatccgtgtggtccgatatcgagtgcgccgcattggtgggagaggatcagccactgtgtccagatctgcccgaattagatttgtccgaactcgacgtgaatgatttagataccgacagtttcctgggtggactgaaatggtgttcggatcagtccgagataatatcaaatcagtataataacgaacccagcaatatttttgagaagatcgatgaagagaacgaggccaatcttctagcagtccttactgagacacttgactctctcccagtcgacgaagacggtctcccctcatttgatgccttgactgacggagacgtcacaacagataacgaagcctctcctagctccatgccggatggcaccccaccacctcaagaggcagaggaaccatctctgctgaagaaactgctgctggctccagccaatactcagctgagttataatgagtgttcaggcctgtctactcaaaaccatgccaatcataaccatagaattaggaccaaccctgcgattgtcaagactgagaattcctggagcaacaaggcaaaatccatttgccagcagcagaagccccagaggcgcccgtgttctgagttgttaaagtaccttaccacaaacgatgacccgcctcacaccaagccaacggaaaataggaattcttccagagacaaatgtactagtaagaagaagtctcacactcagtcacagtctcaacatcttcaggccaagcccactaccctttccctgcctctcacccctgagagcccgaacgaccctaagggaagtccatttgaaaacaagaccattgaacgcaccctttccgtggaactctctggaacagccggcctgacgcctcctaccacaccaccacataaggccaaccaggacaatcctttcagagctagcccaaaactgaagtcaagttgcaagaccgtggtcccccccccgtctaaaaagccaaggtactctgagagctctggtacccagggaaacaactctacaaagaaaggtcccgaacaatccgaactctatgctcagttgagcaagtcttccgtcctaactggaggacacgaagagagaaaaaccaagaggccgagtctgaggctgtttggagatcatgactattgccaaagcatcaattctaagaccgaaattctgattaacataagtcaggagctgcaggactcccggcaactagagaacaaagacgtatcatccgactggcagggacaaatctgttcaagtacggactccgaccagtgttacctacgggaaactctggaagcatcaaaacaagtttccccttgcagcacccggaagcagctacaggaccaggaaatacgtgccgaactcaataaacatttcggacatccttcccaggctgtattcgatgacgaggcagacaagacaggcgagcttcgtgacagtgacttctctaacgaacaatttagtaaactgcctatgttcatcaatagcggactggccatggacggcttgtttgacgactccgaagatgaatccgataaactttcttacccttgggacgggacacagagttactccctctttaatgtgtctccctcctgcagttccttcaacagcccttgtcgggacagcgtaagccctcccaaaagcctcttcagccagagaccccagaggatgaggagcagatccagatccttcagcaggcaccgcagctgctccagatctccatacagtaggtccaggagccgcagccctggatcacgcagtagctcgagatcctgttattactacgagtctagccattatagacacaggactcatcgcaatagtccactttacgtgaggagccgttctcgtagcccttatagtcggcggccaaggtacgattcttacgaagagtaccagcacgagaggctcaagagggaggaataccgcagagagtatgagaaaagggagagtgagcgggccaagcagcgagaacgccagcggcagaaagccatcgaggagagaagagtgatttacgtcggcaaaattcggccagatacaacaagaacagagctccgagatcggttcgaagtattcggcgagattgaagagtgtacagtcaatctcagagacgatggcgactcctatggttttatcacttacaggtacacctgcgatgccttcgcggctctggaaaatggctacactttgcgcaggtctaatgaaactgatttcgaactgtatttttgcggtcgcaagcagtttttcaaaagtaattatgccgacctggatagcaattctgatgacttcgaccccgcatccaccaagtctaaatatgactcactggactttgattccctgctgaaggaagcacagcggtcgcttcgacgctag

SEQ ID NO: 128276 - DNA, 3072 bp, synthetic construct
  misc_feature 1..3072: note = Description of Artificial Sequence: Synthetic coding sequence
  source 1..3072: mol_type = other DNA
atggccggaaacgactgcggcgcactgctggacgaagaactatctagcttctttctgaactacttagctgatacgcagggcggtggaagcggggaggaacagctctatgccgactttcccgaactggacctgagccaactggatgctagtgattttgactccgctacttgtttcggagagcttcaatggtgtccagaaaactcagaaacagagcccaaccagtatagccctgatgattctgaactgttccagatcgactcagagaatgaagctcttctggccgaattgaccaaaaccctggacgatatccccgaagacgacgtgggtcttgctgccttccccgctctagacgggggagacgcactctcgtgcacatcggcctctcctgcccccagctcggcccccccctccccagcgccagaaaaaccgtccgctcctgcccccgaggtcgacgagctgtctctgctgcaaaagctgctcctcgctacctcttatccaacaagtagctccgatactcaaaaagaagggaccgcctggaggcaggcgggcctacgctccaaatctcagcggccgtgcgtgaaggccgattctacccaggataagaaggccccaatgatgcaaagtcagtccaggagctgcaccgagctccacaaacacttgaccagcgcccagtgctgcctgcaggataggggcttgcaaccaccatgcctgcagtccccacgactgcctgctaaggaggataaagaacctggcgaagactgtccgagtccacagcctgctcccgcttctcccagagattctttagccctcggacgagccgaccctggcgctcctgtgtctcaggaggacatgcaggccatggtgcagctgatcaggtacatgcatacttactgcctgccccagcgaaagctgcctccccaaacacctgagccactgccaaaagcttgctccaacccatcacagcaggtgcggtccagaccttggagccgccaccattcaaaggcttcctgggccgaattttcaattctaagagagcttcttgcccaggatgttctgtgtgatgtgagcaaaccttacaggctggcaactccagtgtacgcaagcctgacaccgcggagccggcctcggccacctaaggactcacaggccagtcccgggcggccctcatccgtggaggaagtcagaattgcagcctctccaaaatccactggtcccaggcccagtctgaggcccctgcgactcgaagtaaaacgggaggttcgacgccctgctagactgcaacagcaggaagaggaagacgaggaggaggaagaggaagaagaggaggaggagaaagaggaggaggaggaatgggggaggaaaaggcctggccggggccttccttggaccaagcttggtagaaagctggagtcctcagtctgccctgtgcggcgctcacggaggctgaacccagagctcggcccctggctgacttttgctgacgaacccttggtgcccagcgaacctcagggcgctctgccctccctctgcctggcccccaaagcgtatgatgtggagcgcgagttgggcagtcccacggacgaggactctgggcaggaccagcagcttcttcggggtcctcagattccggcattggaatctccttgcgagtcggggtgcggtgacatggatgaggacccaagttgtcctcagctgccaccaagagatagccctcgctgcctgatgctggctctctctcagtccgacccgacattcggtaaaaagtcatttgagcagacactgacggtcgaactctgtggtaccgctggcctaacacccccaactacaccaccttataagccaacagaagaggaccctttcaagcctgacattaaacacagcctaggtaaggaaatcgcattgtctctcccatcacccgagggtctgtcactaaaggctacccctggcgcagcgcataagctccccaagaaacacccagaaagatctgagctattgtctcacctccggcatgccacggcccagcccgctagccaggcagggcagaaaaggcctttttcttgcagcttcggtgaccacgattactgtcaggtcttaagaccagaaggcgtccttcagaggaaggtactgcgtagctgggaacctagcggagtacacctggaagactggcctcaacagggagccccttgggccgaagcccaagctcccgggcgtgaagaagatcggtcttgtgacgccggagccccacccaaggacagcaccctgctccgggaccacgagatccgtgcttcactgaccaaacactttggcctcctggaaacagctttggaagaggaagatttggccagctgcaaatcaccagagtacgacacagtgttcgaagattcgtcgtcttctagtggcgaatcctcctttttgcctgaggaggaagaggaggagggggaagaggaggaagaggacgatgaggaggaggactccggtgtatcaccaacgtgctccgaccactgtccataccaaagccctcccagtaaggccaatcgccagctctgctcaagatcccggagcagtagcgggagctccccctgtcacagttggtctcccgccacacgtaggaacttcagatgtgagagtcgcgggccctgttcagaccgcaccccttctatccgccacgcccggaagcgccgcgaaaaggcaatcggggagggacgagttgtctacatccaaaatctttctagcgacatgagcagtagggagcttaagagacggtttgaagtgtttggcgaaatcgaggagtgcgaagtgctaaccaggaaccgccgtggggaaaagtatgggtttattacctatcgctgctccgagcatgctgctctctctttaaccaagggggctgctcttcgtaaaagaaacgagccgtcctttcagctgagctatggcggcctgcgtcacttctgttggccacggtacacggattacgatagcaacagcgaggaagcactgcctgctagtggaaaatctaaatatgaggccatggacttcgacagtctgctgaaggaggcccaacagagcctgcactag

SEQ ID NO: 128277 - DNA, 3054 bp, synthetic construct
  misc_feature 1..3054: note = Description of Artificial Sequence: Synthetic coding sequence
  source 1..3054: mol_type = other DNA
atggctgggaacgactgcggggccctactggatgaagaactctcgagctttttccttaactatctggctgacacacagggcggcggctccggagaggagcagttatacgctgactttccagaattagatctttcccagttggatgcctcagacttcgactcggctacatgtttcggggagttgcagtggtgcccagaaaactccgagacggaaccaaatcaatatagtcccgatgattctgaactgttccagatagactccgagaacgaggcactcctcgcggagctgactaaaacactggacgacatcccggaagacgatgtaggcctggctgcctttcctgctctagatgggggggatgccctcagctgcacctccgcttcaccggcaccgagcagtgctcccccgtcgcctgccccagagaagccatctgcacccgcccccgaggtcgacgagttaagcctgcttcagaagttgttgctcgcaactagctatccgacaagcagctcagacactcaaaaagaagggaccgcttggagacaggccggcctgaggtctaagtcacagcgtccctgcgtgaaagccgatagtacccaggacaagaaagccccaatgatgcaaagccaatctcgctcttgcactgaactgcacaagcacttaacgagtgcacaatgttgcctccaggatcgcgggttgcagcccccctgcttacagagcccaaggttgcccgccaaagaggacaaggagccgggtgaggattgtccttccccacagcccgcccccgcgtccccaagggactctctggctctcggaagggcggacccgggggcacccgtttctcaagaggatatgcaggcgatggtgcagctgataaggtacatgcacacatattgtttgccacaacggaagctacccccgcagacaccggagcccctgcctaaggcttgttccaatccaagtcagcaggtccggagtcgtccttggtctcgacaccactctaaggcatcatgggccgagttctcaattctgcgcgagctgcttgctcaggatgtgctctgcgatgtgtctaagccctaccgactagccacacccgtttacgcctcccttactcctcgatcccggccccgccctcctaaggattctcaggccagcccaggaaggccatctagtgttgaggaggtcagaatagccgcctccccgaaatcaacaggccccagacctagtcttagaccccttaggcttgaagtaaaacgcgaagtcaggcgccccgccaggttgcagcagcaggaggaagaggatgaggaggaggaggaagaagaagaagaggaagagaaggaggaagaggaggagtggggtcggaagcgccccgggcgcggcctgccgtggacgaaactaggacggaaattggagagcagcgtatgtcctgtcagaaggtcccgacgcctcaatcccgaacttggcccatggctcacatttgctgatgagccgctagttcccagtgagcctcagggggctctgccctctctgtgcctggccccaaaggcttacgacgtggagcgagagctggggagtccaacggacgaggacagcggccaggaccagcagttgctcaggggtccacagatcccagctctggagtctccctgcgaaagcgggtgcggtgatatggacgaggacccaagttgtccccagctaccaccaagagacagtccccgttgtctgatgttggcgctcagtcaatccgatcctacctttggcaagaagtcatttgagcaaacccttactgtggagctgtgcggcactgccggactcaccccacctactacacccccatataaacctaccgaggaggacccttttaagcctgatatcaaacatagcctagggaaagaaatagccttatcattgccatcacccgagggcctctccctgaaggcgactcccggtgcagcacacaaactgcccaagaagcatcccgagaggagtgagctgctaagtcacctgagacacgccaccgctcaacctgccagtcaggccgggcagaagcggcccttttcctgcagctttggtgatcacgattactgccaggtgctgcggcccgagggggttcttcagcgtaaagtactgcggagttgggaaccatccggagtgcatctggaggattggccccagcagggggctccatgggctgaggcccaagcccccggacgggaagaagaccgcagctgtgatgctggcgcacctcctaaagactccaccctgctgcgggaccacgagatcagagctagccttacaaaacattttggtctgttggagacagctctggaggaagaggacctggcatcttgcaagagccctgagtacgacactgtgtttgaggactccagttcatcgtccggcgaatcgtcctttctgccagaggaagaggaagaggaaggagaggaagaagaagaggacgatgaagaagaagattctggggtctcccccacctgttccgatcactgcccctaccaaagtcccccgagcaaagcaaatcggcagctgtgcagccgcagccggagttcctcagggtcttcaccctgtcatagttggtcacccgccaccaggcgtaatttccgatgtgaaagtcgcgggccttgctcagaccggacaccttctattcgacatgctcgtaaacggagggagaaggcaattggcgaaggtcgtgtggtctatattcaaaacctgtcaagtgacatgagttctcgggaactgaagcgcaggtttgaggtcttcggcgagatcgaagagtgtgaagttctgactcgaaatcgccggggggaaaagtacggttttatcacctaccgctgcagcgaacacgccgccctgtccctgacaaagggcgccgcgctcagaaaaaggaatgagccctctttccagctgagctacggtgggctcagacatttctgttggccaaggtacaccgactacgggaagcccctgaagcctagccactctcttgttcgtctcaaagcttgggaagccgtgccttcattgaataaaacacagagctag

SEQ ID NO: 128278 - DNA, 471 bp, synthetic construct
  misc_feature 1..471: note = Description of Artificial Sequence: Synthetic coding sequence
  source 1..471: mol_type = other DNA
atggccgtgggcaagtttttactgggatccttgctgttactgtcgctgcagcttggccagggttggggaccggacgcccgtggggtgcccgtggccgatggcgaatttagttctgaacaggtcgcaaaggccggtggtacttggctgggaacacatcgacctctggccaggttgcggcgggccttgagcggcccttgccagctctggtccctgacactgtctgttgccgagctcggactgggctatgcatccgaggaaaaagttatttttaggtactgtgccggcagttgtcctcggggagctagaacccagcacggcctggctttggcccgtttgcaaggccagggccgcgcacacggcgggccttgttgccggccgacccgctatactgatgtggccttcctggacgatagacatcggtggcagcggcttccccaattatctgccgccgcatgcggttgtggggggtag

SEQ ID NO: 128279 - DNA, 1422 bp, synthetic construct
  misc_feature 1..1422: note = Description of Artificial Sequence: Synthetic coding sequence
  source 1..1422: mol_type = other DNA
atgggacaaagtggacggagccgacatcagaagcgggcccgcgctcaagcacagctgcgaaacttagaggcatacgccgccaatccgcactctttcgtttttactagaggatgcacagggcgcaacatccgccagctgtcacttgatgtcagacgggttatggaaccgcttacagctagccgcctacaagtgcggaagaaaaactctctgaaggactgcgtggctgtggccgggcccttgggcgtgactcactttctaattctgtcaaaaaccgaaacgaatgtctatttcaaattgatgagattgccaggagggcctacactgacattccaggtcaagaaatactctctcgttagagatgtcgtgtctagcctcagacgtcatcgcatgcatgaacagcagttcgcacacccccctcttctcgttctgaattcttttggcccgcatggcatgcatgtcaagctaatggccacaatgttccagaaccttttcccatctattaatgtgcacaaggtaaatctaaacaccattaagcggtgtttactgatcgattataatccagactcccaggaactggacttcaggcactacagcataaaagtggtacctgtcggcgcttctaggggcatgaaaaaacttctgcaggagaaatttcctaacatgtccaggttacaggacataagcgaactgcttgcaactggagctggtctttcagagtctgaagcagagcccgacggagaccacaacatcacggagttgccccaggcagtcgccggccgcggcaacatgcgggcacagcagagcgcagtgcggctgaccgagataggccctagaatgacactacagcttatcaaggtccaggagggggttggcgagggcaaggtaatgtttcactcctttgtttctaaaacggaagaggagcttcaggccatcttggaagccaaggagaagaaactccggctgaaagcccagaggcaggctcaacaagcccagaacgtccagagaaaacaagagcaaagggaagcccatcggaagaagagcctggaaggcatgaaaaaagctagggtcgggggctctgatgaggaggcaagtgggattcccagtcgcaccgcttcccttgagctcggggaagatgatgatgagcaggaggatgacgacatagagtacttttgtcaagcagtgggcgaggcaccctccgaagatttattccctgaggccaaacagaagaggctagccaagtcacccggtaggaaaagaaaacggtgggagatggaccggggtaggggtaggctctgcgaccagaagtttcccaaaaccaaggataagtcgcagggagcacaggcccggcgggggcccaggggcgcaagtcgcgacggcggtcgaggccgcggcagagggcgccccggcaagcgtgtagcatag

SEQ ID NO: 128280 - DNA, 1383 bp, synthetic construct
  misc_feature 1..1383: note = Description of Artificial Sequence: Synthetic coding sequence
  source 1..1383: mol_type = other DNA
atgggacagtcggggaggagccggcaccagaagagggcgcgggcccaggcccagctgcggaatcttgaagcctacgccgccaacccccactcatttgtgtttacaaggggctgtactggcaggaatattcgacaactgtcattggatgtgcgtagagttatggagccgctgaccgcttcacgactccaagtgcgcaagaaaaattctctgaaagattgtgttgctgtcgcgggccctctgggagtcacacacttcctcatcctgagtaagaccgagactaacgtctactttaagctgatgcggctcccaggtggccctaccctcacgttccaggtcaagaagtatagcctggttagagatgtggtgtcgtcccttaggcgacaccgtatgcacgaacagcagtttgctcatccacctctactcgtgctgaacagctttgggccacacgggatgcacgtcaagctcatggcaaccatgttccaaaacttatttcccagcataaatgtgcacaaggttaatctgaataccattaaacggtgccttctgatcgattataaccccgattctcaggagctcgacttccggcactactctataaaggtcgtgccagtgggagcgagccgaggaatgaaaaagctgctgcaggagaaatttccgaacatgtcaaggctgcaagacatcagtgaattgctggccactggggctggcctgagcgaaagtgaggctgagcccgacggggaccacaatatcaccgagcttcctcaggccgtcgcaggaaggggaaacatgcgggcacagcaaagcgcagtgcgactgaccgagatcggcccacggatgacactgcagctgattaaagttcaggagggagtcggagagggtaaggtgatgttccactcttttgtttctaaaacggaagaagagttgcaagctatcttagaagccaaggagaagaagctgaggcttaaggcacagcgtcaggctcagcaagcccagaatgtgcagagaaagcaagagcaaagagaggcgcatcggaaaaagagtttggagggaatgaagaaagctcgcgtcggcggcagcgatgaagaagcgtccggtatcccatcgcggacagcctctttggagttaggagaagacgacgatgaacaggaggacgatgatattgaatatttctgccaagctgtgggagaagcaccgtcagaggatctgttcccagaggcaaagcagaaacgcttggctaaaagtccgggtagaaaacgaaagcgctgggaaatggaccggggacgaggccgcctgtgcgatcagaagtttcccaaaaccaaggacaaatcgcaggacggaggtagaggtcgtgggagaggccgacccgggaagcgtgtggcctag

SEQ ID NO: 128281 - DNA, 2385 bp, synthetic construct
  misc_feature 1..2385: note = Description of Artificial Sequence: Synthetic coding sequence
  source 1..2385: mol_type = other DNA
atgggccaaagtggtcgaagtcggcaccagaagcgcgctcgggcccaggctcagctgcggaaccttgaagcctatgccgctaaccctcactcatttgtttttactcgcggttgtaccggtcgcaacatcagacagctgtccctggacgtgcgccgggtgatggaaccccttacagctagcagactgcaggtacggaaaaagaatagtctcaaggactgtgtggctgtagccgggcccctcggtgtgactcacttcctgatcctgtcaaagactgagacgaacgtttactttaaactgatgcggctaccagggggacctactctgacattccaggtgaaaaagtattcactcgtgcgcgatgtcgtctctagtctgaggcgccacaggatgcacgagcaacagttcgcgcatccccccctcctcgtcttaaattccttcgggcctcacggcatgcatgtaaagcttatggccactatgttccagaatctctttccaagcattaacgtgcataaggtaaacctgaacactattaaaagatgcctgctcatcgactacaaccccgatagccaggagttagacttccgacattactcaatcaaggtcgtgccagtaggcgcttctcggggtatgaagaaacttctccaagaaaagttccctaacatgagtaggttgcaggatatctctgaactcctggcaaccggcgccggcctcagtgaaagcgaggcagagccagacggcgaccacaacattacagagctccctcaggcggtggctggacgggggaatatgagagcccagcagagcgcagtcaggctgacggagattggacctcggatgaccctgcagctgatcaaggtacaggaaggggtaggtgagggcaaagtcatgttccattcatttgtgtccaagactgaagaggaactgcaggccatcctggaggccaaagagaagaagctgcgcttgaaggctcagcgacaggcccagcaagcacagaacgtccagcgaaaacaggaacagagagaggcccacaggaagaagtccctggaaggtatgaaaaaggcgcgggttggaggcagcgatgaggaggcctccggaatcccctcccgaacggccagcctcgagttgggcgaggacgatgatgagcaggaggacgatgatatagagtatttctgccaggctgtcggcgaagccccaagtgaggacctattcccagaagcaaagcaaaagagactcgcaaagagtcccggcaggaagcgcaagcgctgggagatggaccgcggggcaaagagttgtccggccaattttctggccgcagctgatgataagctttccgggttccagggcgacttcctgtggcccatcctcgtagtggaattcctggtggccgtggcatcaaacggattagccttgtaccgattttctatcaggaaacagcggccctggcacccagctgtcgtcttttcagtgcagctggctgtctcagatttgctgtgtgctcttaccctgccccctctggccgcctatctgtacccccctaagcattggcgatatggcgaggccgcctgtcgcctcgaaaggttcctttttacctgtaacttgttaggatcagtgatcttcatcacttgcatctccctgaaccgttacctcggaattgtacacccattcttcgctaggagtcatctcaggccaaaacatgcatgggcggtttccgctgccggctgggtattagcagcactgctagcaatgccgaccctatctttttcccacctcaagcgacctcagcagggcgctggcaactgctctgtagcaagaccagaggcttgtattaagtgtttgggtaccgcggatcacggactggcggcctatcgcgcatatagcctggtactcgctggccttgggtgtggccttccattgctgctgactctcgccgcctatggtgctttggggcgagctgtgctccgttcaccagggatgactgtcgcagaaaagctgcgggtcgcggctctggtggccagtggggtcgctctctacgcctcttcatacgtgccttatcacattatgagagttctgaacgtggatgcccggaggagatggagtactcggtgtccttcctttgccgacatcgcacaggcaactgcagctctggagctagggccttacgtgggatatcaagtaatgcggggtctgatgccgcttgcattctgtgtgcaccctctgctctatatggctgccgttccatccttgggctgctgctgtaggcactgtccgggataccgcgactcctggaatccagaggacgcaaaaagtacaggccaggcactccctttgaatgctacagccgctccaaagccctcagagccccagagtagggaactatcccaatag

SEQ ID NO: 128282 - DNA, 1374 bp, synthetic construct
  misc_feature 1..1374: note = Description of Artificial Sequence: Synthetic coding sequence
  source 1..1374: mol_type = other DNA
atggcacagcctccaagactctcccggagcggtgcctccagcctgtgggaccccgcaagcccggccccaactagtggccctaggcctagactgtgggaggggcaggatgtgcttgcgcgttggacagacggcctcctgtaccttgggactatcaaaaaagtcgattccgccagagaggtgtgtttagtgcagtttgaggatgacagccagttcctcgtcctatggaaggacataagcccagcagccctaccgggagaagaactgctgtgctgcgtctgcagaagcgagacagtggtaccagggaaccggttggtgagttgcgagaagtgccgacatgcttaccatcaagattgccatgtgccgcgggctcccgctccaggtgaaggggaggggacttcatgggtctgtcgccagtgcgtgtttgccatcgcaacgaagagaggaggtgcgctcaagaagggcccctacgctcgtgctatgcttggaatgaagctcagcctgccctatgggctgaagggcttggattgggatgccgggcaccttagcaacagacagcagagctactgctattgtgggggtccgggtgagtggaatctgaaaatgttgcagtgtaggtcttgtctgcagtggtttcacgaggcatgcacgcagtgcttaagcaaaccactcctctacggggaccgattctacgagttcgaatgttgcgtttgtaggggagggcccgaaaaggttagaagactccagctgcggtgggtcgacgtggcccatctagtgttgtaccatctgtcagtttgctgcaaaaagaagtatttcgactttgatcgcgagattttacctttcacatcagaaaattgggactctttactgctgggagagctctccgacactccgaagggagaacggtcctctagattgctgtccgccttgaacagtcataaggatagatttatctctggccgggagattaagaagcggaaatgcctcttcgggcttcacgctcgcatgcctcctcccgtggagcctcccacaggcgacggcgccctcacacgggcgggaccatggggtcgaggccttacgagccctggtgaggctcccgaggccggtgcacgggcaccggaggaagaggccgaaggtgagagtggtggggccggagctacactcagctctgctcagagtgccagggccccgggtgctgagggggcgggcagtagcgcagaggggacagccgctgccccgtcaggatgcctcctcccctcgacgctgctgccagccccccaaggacccctcggaaccgtcgaccctcagacagggcatccatggaacttcaccctggtgtccccgcagaccagcttaaaagtgcctcccacccggtag

SEQ ID NO: 128283 - DNA, 1704 bp, synthetic construct
  misc_feature 1..1704: note = Description of Artificial Sequence: Synthetic coding sequence
  source 1..1704: mol_type = other DNA
atggcccaacccccccggctttcacgcagtggggcctccagtctctgggatccagcatctccagcacccactagcggccctcgcccacggctctgggaggggcaggatgttctagctcgatggactgatggcttactctatttaggtaccataaaaaaggttgattcggccagagaggtgtgtctcgtccaattcgaagacgattctcaattcctcgtgctgtggaaggatatctcacccgccgccctgcccggggaggagctgctgtgctgtgtatgtcggagcgagacagtagtgcccgggaaccgcctggtgtcctgtgaaaagtgccgccatgcctaccatcaggattgccacgtgcccagagctcccgcccctggtgagggagaggggaccagttgggtctgccggcagtgcgtgtttgcaatcgcgacaaaaagaggaggagccctgaagaaaggaccatacgcgcgtgccatgttaggtatgaaattaagtctgccttatggcctcaaaggcctagattgggacgccggacacctgtccaaccggcaacagtcttactgctactgtggcgggccgggtgagtggaatctcaaaatgctgcaatgtcggtcttgtctgcaatggtttcacgaggcctgcacacaatgcctgtccaaacctctgctttacggggacagattctacgagtttgagtgttgcgtttgccggggaggtcctgagaaggttcggcgcttgcagttaagatgggtggacgtggctcatttagtcctttatcaccttagcgtatgctgcaagaagaagtacttcgactttgacagagagatactgcccttcactagcgagaactgggactccctgctgttgggagagctgtccgacacccccaagggcgagcggtcatcgaggctcctgagtgccctgaactcccacaaagatcggttcatcagcggacgggagatcaaaaagcgaaagtgtctgtttggcctgcacgctagaatgcccccgcccgtcgagcccccaactggcgacggggctctgacttccttcccgagcggccaaggaccggggggcggagtctcacgccctcttggcaagcgacgccgtccagaacccgaacccctccgccggagacaaaaaggtaaagttgaggagctaggcccaccgtcagctgtgaggaaccagccagaacctcaggagcagagagaacgcgcacatctgcagagagccttgcaggcctctgtctcaccaccatcccctagcccaaatcaatcctaccaggggagcagcgggtataatttcaggcccaccgacgcaaggtgccttccgtcatctcccataaggatgtttgcctcttttcaccctagtgccagcacagccggcacgtccggtgattccggccccccagacagatccccgttggagcttcatattggcttcccaaccgacatcccgaagtctgcgccgcatagcatgacagcatccagctcatccgtaagttcaccaagcccagggttgccacgtcggtcagcacctccctctccattgtgtagaagcctgtcgcccggcactggaggcggggtcaggggaggcgtagggtatctgtcgcgcggtgacccagtccgcgtgctggccaggcgcgtgcgacccgacggatcggtacagtatctggtcgagtggggcggaggcggaattttttag

SEQ ID NO: 128284 - DNA, 732 bp, synthetic construct
  misc_feature 1..732: note = Description of Artificial Sequence: Synthetic coding sequence
  source 1..732: mol_type = other DNA
tagagtcttttgttgactgccacccggaccgtgtcgttccaaggagaacgtctaaggaggggtaacgtttgcctggtgtcgatgcttggctgcttgcctttatggtcaccactcctagaaatggagcattcgcctggccagggacccggcggcggtgtcagcagacctctaggtaagaggagacgcccagagccggagcctctccgcaggcggcagaaggggaaagtagaggagttagggcctccttcagccgtaaggaaccagcccgaaccacaggagcagcgagagagagctcacctccaaagagccttgcaggcgtccgtttcccccccttcgccatctccaaaccaatcttatcaagggtcatccggatacaattttaggcccactgacgctcgttgtctacctagtcctatccggatgtttgcttctttccaccctagcgccagcacagcaggcacttctggcgacagcggcccaccagaccggtcgccccttgagctgcacatcggcttcccaacagatattcctaagagcgcaccccattctatgacagcttcttcatcaagcgtgtcttccccatctcccgggctcccaagaagaagcgcccccccatcacccttatgccgtagcctttcaccaggcactggggggggagtcagaggcggtgtgggttacttatctcgcggggaccctgttagagtgctggcacggcgtgtccggcctgactag

SEQ ID NO: 128285 - DNA, 438 bp, synthetic construct
  misc_feature 1..438: note = Description of Artificial Sequence: Synthetic coding sequence
  source 1..438: mol_type = other DNA
atggctcaacctccacgactgagcagatctggcgctagcagcctctgggaccctgcctcacccgcgcccacaagcggccctcgcccacgactctgggaagggcaagacgtgcttgcccgctggacagacggcctcctctacttgggtacaatcaagaaggtagattcagcccgcgaagtgtgtcttgtgcagtttgaggacgactcccaatttctggttctatggaaagacattagccccgctgccctgcccggggaggagttgctttgttgcgtctgtcgtagtgagaccgtcgtgcccgggaaccgcctagtgagctgtgaaaagtgccggcatgcctatcatcaggattgccacgtccccagagcgccagccccgggggaaggtgagggaacatcctgggtctgccgccagtgtgtgttcgctatagcaacatag

SEQ ID NO: 128286 - DNA, 546 bp, synthetic construct
  misc_feature 1..546: note = Description of Artificial Sequence: Synthetic coding sequence
  source 1..546: mol_type = other DNA
tggggccatcctcagcaatgtgcaatctcaccatctcccagaagcagagggagcggtctgatctgtaggggacattgtagacctcagtgtctccaccacccccctgccctcacgcgcgtgacgcgtgcggcagcagctacaacctccggaccccagatgcctgcagcctgtccaggtcatcctatccgcatgttcgcatcttttcatccttctgcctccacagctggcacttctggcgacagtgggcctcccgaccggtcgccgctggaactgcacatcggctttcccaccgatatccctaaaagcgcaccgcacagcatgaccgcttcatcctcctctgttagcagtccgtctccggggctcccgcgacggtcagcccctccctccccactctgcagaagtttatccccagggaccggcggaggcgtgcgtggcggagtgggatatctttcccgcggcgacccagtgagggtgctggcaagacgggtgcgccccgatggctcagtgcaatatcttgtggaatggggaggtggcggcattttttag

SEQ ID NO: 128287 - DNA, 438 bp, synthetic construct
  misc_feature 1..438: note = Description of Artificial Sequence: Synthetic coding sequence
  source 1..438: mol_type = other DNA
atggcccagcctccccggctgagccgaagtggagcctcatccctgtgggatccagcatcacctgctcccacgagcggtccccggccaaggctgtgggaaggacaggacgtgctagcaaggtggacagatggccttttatatctggggacgattaagaaagtggacagcgcacgagaggtctgtttagttcaattcgaggatgattcccagttcctggtcttgtggaaagatatcagccccgcagctctcccaggagaggagctgctttgttgcgtgtgcagatccgaaaccgtggtgcccgggaatcggctggtgtcttgcgaaaaatgtagacatgcttatcaccaggactgccatgtccctcgtgctcccgcgccaggcgagggggaagggacaagctgggtctgccgccagtgtgttttcgccatagccacttag

SEQ ID NO: 128288 - DNA, 1704 bp, synthetic construct
  misc_feature 1..1704: note = Description of Artificial Sequence: Synthetic coding sequence
  source 1..1704: mol_type = other DNA
atggcccagccccctcgcttgagtcgcagcggggcttccagcctatgggaccctgcctctcctgcacccacctcaggcccacgacctcggctctgggaggggcaggacgtgctcgcccgttggactgacggactgctttacctaggaactatcaagaaagtggattctgccagagaggtctgtcttgtgcagtttgaagacgacagtcagtttctggtgctgtggaaggatatttccccagccgccctacccggagaggaactcctctgctgtgtctgcaggagtgaaacagtggtgcctggtaaccggctagtgtcttgcgagaagtgtcggcacgcttaccatcaggattgtcacgtgccgagggcccctgcccccggtgagggcgagggaacctcttgggtgtgcagacagtgcgtctttgcgatagctaccaagagagggggagcactaaaaaagggcccttatgctagggcaatgctaggaatgaagctgtccctgccatatgggctgaaaggtttggactgggatgccggtcacctgtcaaatcgccagcagagctattgctactgcggagggccaggggaatggaacctaaagatgctgcagtgccgctcctgcttgcagtggttccacgaagcatgcacccaatgtctttcaaaaccattgctatatggtgaccgtttctacgaattcgagtgctgtgtgtgtagggggggcccggagaaggtacgtagactgcagttgaggtgggtggatgtggcacaccttgtcttgtatcacctgtctgtctgttgtaagaagaagtattttgattttgaccgtgagatcctgccttttacctcggaaaactgggatagcttgctcctcggcgagctgagcgacacccccaagggggaacgctcctccaagctcctcagtgcactgaactcccacaaggaccgtttcatcagcggcagagaaattaaaaagcggaagtgcctgttcggactgcatgctagaatgccacctcccgtagagcctccgacaggcgacggcgcacttacctctttcccatccggccagggccctggggggggggtgtctagacccctggggaagcgacggagaccagaacccgaacctctgagacgaagacagaagggaaaggtggaggaactgggtcccccgtcagcagtgagaaaccagcccgaacctcaggaacagcgggagcgggctcacttgcagcgcgccctgcaggcctctgtgtcacccccgagtccgtcccctaaccaatcctaccaggggtcttcgggatacaatttccgtcccaccgatgctcgttgcctgccctcctcccctatccgtatgtttgcgtcctttcatccatccgctagtactgcaggtaccagtggtgactccggacccccagacagatcacccctggagctgcatataggcttccctaccgacatccccaagagcgcgccccacagtatgacagcgtcctcctctagcgtttcttccccttcgcctggcctccctagaagatccgcccctccctcaccactttgccgtagcctgtctcccgggaccggcgggggcgtgcgtgggggggtgggatacctgagtagaggcgaccccgtgagagtgctggccaggcgggtcaggcccgacggctcggttcaatacctcgtagaatggggcggagggggaattttttag

SEQ ID NO: 128289 - DNA, 684 bp, synthetic construct
  misc_feature 1..684: note = Description of Artificial Sequence: Synthetic coding sequence
  source 1..684: mol_type = other DNA
atggcccaacccccccgtctctcacgatctggagcaagcagcctctgggacccagcttcccccgcaccaacctcaggacctcggcctaggctgtgggaagggcaggacgtgctagctagatggactgacggcctgttatacctgggaacgattaagaaagtcgattcggctagggaggtgtgccttgtacaattcgaggatgactcccagttcctcgtgctctggaaggacatatctcctgctgcattacccggcgaggaactattgtgttgtgtgtgtaggagtgagactgttgtacccggtaacaggctggtcagctgcgagaaatgtcgtcacgcctaccatcaggactgtcacgtgccccgggctccagctccaggagagggtgaaggtacctcttgggtgtgccgccagtgcgttttcgccatcgccactaaacggggaggagccctgaaaaaagggccctatgcaagagcaatgctgggtatgaaactgagtcttccttatggactaaaagggttggattgggacgccggccacttatccaatcgacagcagagctactgttactgtggcggccccggcgaatggaatctgaaaatgttgcagtgtcggagctgcttgcagtggttccacgaggcctgtacccagtgcttaagtaagccactcctctatggggattag

SEQ ID NO: 128290 - DNA, 684 bp, synthetic construct
  misc_feature 1..684: note = Description of Artificial Sequence: Synthetic coding sequence
  source 1..684: mol_type = other DNA
atggctcagcctccgagactatcaaggtccggagcgagttctctgtgggaccccgcctctccagcccccacctctggcccaaggcctcgcttgtgggaagggcaggacgtcctggcgcgctggacagatggtctgctatacttgggaacgataaagaaggtagacagtgcccgggaggtatgtctggtccaattcgaagacgactctcagttcttagttctttggaaagacatcagccctgccgcgttgccaggcgaggagcttttgtgttgcgtatgtcgcagcgagactgtggtcccaggcaataggctggtttcgtgcgagaaatgcaggcatgcttaccaccaggattgtcatgtgccgcgagctccagcgccaggagagggcgaggggacctcgtgggtctgtcgacaatgcgtttttgctatcgcaactaagcgggggggtgccctcaaaaaaggcccatatgcccgcgcaatgttggggatgaagctgagcctgccatatggcctgaagggcctagattgggatgccggtcatctgagcaaccgacaacagtcttactgttactgtgggggtccaggggaatggaaccttaaaatgctgcagtgtcgttcttgcctgcagtggttccacgaagcctgcactcagtgcctgagtaaaccactcctgtatggggactag

SEQ ID NO: 128291 - DNA, 1374 bp, synthetic construct
  misc_feature 1..1374: note = Description of Artificial Sequence: Synthetic coding sequence
  source 1..1374: mol_type = other DNA
atggcacaacccccccgtctgtccaggtccggggcatcctccctgtgggatccagcctcaccagcacctacctcgggacctagaccccgcctctgggagggtcaggacgtcctggcgaggtggactgacggtctgctctacttgggaactatcaaaaaggtagattccgcacgcgaggtctgtcttgttcagtttgaagacgatagccagttcctggtgctgtggaaggatatatcccctgcagccctcccaggcgaagaattgctgtgttgtgtgtgccgaagcgagaccgtcgtgcctggcaacaggctggtttcgtgcgagaagtgccgacatgcctaccatcaagattgtcacgttccgcgtgcccctgcccctggtgagggggagggcacttcgtgggtctgccgccagtgcgtattcgcgattgctactaaacggggcggagctcttaaaaagggcccctacgcgagagccatgttgggcatgaagctctcactgccgtacgggctgaaaggactggattgggatgccggccacttgagtaaccggcaacagtcctactgttactgtgggggccccggcgaatggaacctaaagatgctacaatgccgttcgtgtctgcaatggtttcatgaagcctgcacccagtgtttaagtaaaccgctgctctatggcgacaggttctatgagttcgagtgctgcgtctgcaggggaggcccagaaaaagttagacggctgcagctgaggtgggtggacgtggcacatctagtactataccacctgtcagtctgttgtaagaaaaagtacttcgattttgatagagagattttgccttttactagtgagaactgggactcattattgctgggtgagctcagcgatactcctaagggcgagagaagctctaagcttttgagcgccttgaactctcacaaggaccgattcatttcaggacgggagattaagaaaaggaaatgtctatttggcctgcatgctaggatgcctcctccagtcgaaccccctaccggagatggtgcgttaacccgcgccggaccatgggggcgagggctgacctcgccaggcgaggctcctgaagctggcgcgagggcccctgaagaggaggcggagggagagtccggaggagcaggggccaccttgtctagcgcccaaagcgcccgcgctccaggagcagagggcgccggatcatcagcagaagggaccgcagcggcccccagcggatgtctcctgccctcgactttgctgcctgcaccacagggccctttaggcaccgtcgatccccagacggggcacccatggaattttaccctcgttagtcctcagacttctctgaaggtccctcctaccaggtag

SEQ ID NO: 128292 - DNA, 1497 bp, synthetic construct
  misc_feature 1..1497: note = Description of Artificial Sequence: Synthetic coding sequence
  source 1..1497: mol_type = other DNA
atggcagcagccgccgggcccggcgctgccctgagtccccgcccttgcgacagcgaccccgccacccccggcgcccaatctcccaaagatgacaacgaagacaattctaacgacgggacccagccctccaagaggcgccgcatggggtccggggacagttctcggagctgtgaaacctccagccaggatctgggtttctcttactatccagctgaaaaccttatcgagtataaatggccccccgatgaaaccggtgagtactatatgctccaggaacaggttagtgaatatcttggggtaacgagcttcaaacgcaagtatcctgacctggagcgacgcgacctgtctcacaaagaaaaactctatctgagagagctcaacgttatcactgagacccagtgcacgttaggcctcactgcactgcggagtgacgaagtgatagatctgatgatcaaagaatatccggcaaagcacgccgaatacagcgtgatcttacaggagaaggagaggcaacgtatcaccgaccactacaaagagtacagccagatgcaacagcaaaatactcagaaggtcgaggcaagcaaggtccccgaatacattaagaaagctgccaaaaaggctgccgagttcaacagcaacctgaaccgcgaacgaatggaagagcgacgcgcctattttgacctgcagacgcacgttatccaggtcccacagggcaagtataaggtcctcccgactgagcggacaaaagtgtccagctaccctgttgcactaatacctggacaattccaagaatattataaacgatactccccagacgagctgcggtacctacccttgaacaccgctctgtacgagccacccctggatcccgagctgcctgctctcgatagcgacggcgattcagatgacggagaggatggtaggggggatgaaaaacgcaaaaataaggggacatcggactctagcagtgggaatgtgtcggagggagaatccccaccagattctcaggaagacagctttcagggccgtcagaaaagcaaggacaaggccgctacccctagaaaggacggccctaaaagatccgtgctgtctaaatccgtgcccggttataagcctaaagttattccaaatgcaatatgcggcatttgtctcaaggggaaagagtcaaacaaaaagggcaaggccgagtcactgatccattgtagtcaatgtgagaacagcggccaccctagctgcttggatatgactatggaacttgttagcatgataaagacgtatccttggcagtgcatggagtgcaaaacctgtatcatatgtgggcagccacaccatgaggaggaaatgatgttttgcgatatgtgcgacagagggtaccatacattttgcgtcggacttggggcaatcccatcaggcagatggatttgtgattgctgtcagagagctccacccacgcctcgcaaggtcggacggagagggaagaactcgaaggagggttag

SEQ ID NO: 128293 - DNA, 1491 bp, synthetic construct
  misc_feature 1..1491: note = Description of Artificial Sequence: Synthetic coding sequence
  source 1..1491: mol_type = other DNA
atggccgccgccgcaggaccaggcgcggccctgagtccaaggccttgtgattcagatccagctactcccggcgcccagtcaccaaaagatgataacgaggacaactcaaatgatggtacgcaaccatctaagcggaggaggatgggtagtggggatagcagtcggtcctgtgaaacatcatctcaggacctcggcttcagctattatcctgctgaaaatctgatcgagtataaatggccccccgacgagacaggcgagtattatatgctgcaggaacaggtgtcagaatacttgggagtgacttcctttaaacgaaagtaccctgaacggcgagacctctcccataaggagaaactttatctgcgggagctcaacgtaataacggagacacaatgcacgttgggactcaccgccttaagatccgacgaagtaatcgatctaatgattaaagaatatccagccaagcacgcggagtatagtgtgatcctgcaggaaaaggagcgtcagcggattacagaccactacaaggagtactctcagatgcagcagcagaatacccagaaggtagaggcaagtaaggttcccgagtatattaaaaaggctgcaaaaaaggctgccgaattcaattctaacttgaatcgcgaacgtatggaagagcgaagagcgtacttcgatctgcaaacgcacgttatccaagtgccccaggggaaatataaagttctgcctaccgagcgcaccaaggtaagttcttaccccgttgctctgatccctggtcaattccaagagtactataagagatacagccccgacgagctacggtacctgcccctgaacacagcgctgtacgagccccccctggatccggaactcccagccctggactccgacggtgactccgatgacggagaggacgggcgcggcgacgagaagcgaaaaaacaagggaacaagcgattcctcatcaggaaacgttagcgaaggcgagtccccacccgattcacaggaagattctttccaaggccggcagaaatccaaagacaaggctgccacaccccgaaaggacggtccgaagcgaagcgttctgagtaagagcgtcccaggttataagcctaaggtgattcctaacgcaatctgcggaatctgtctgaagggcaaagagtctaacaaaaaagggaaggccgaaagccttatacattgctctcagtgtgagaactccggccacccgagctgtctggatatgacaatggaactggtgtccatgatcaaaacctacccctggcaatgcatggagtgcaaaacctgcatcatctgcgggcagcctcaccatgaagaggaaatgatgttctgcgacatgtgcgaccggggataccacactttttgtgtaggtttaggagccatccctagtggacgttggatttgtgattgctgtcagagggctcctcccacacccaggaaagtgggccggcgggggaagaattcaaaagaagggtag

SEQ ID NO: 128294 - DNA, 879 bp, synthetic construct
  misc_feature 1..879: note = Description of Artificial Sequence: Synthetic coding sequence
  source 1..879: mol_type = other DNA
atggagaagagaacgtgcgcactgtgtcctaaggacgtggagtacaacgtcctttatttcgcccagagcgaaaatattgcagcacacgaaaattgtctcctctactcctccgggttggttgaatgcgaagatcaggatccactcaaccctgatagatcatttgatgttgagagtgtgaagaaggaaatccagcggggccgaaagctgaagtgtaaattctgccataagagaggagcaacagtgggatgcgacctaaagaactgcaacaagaattaccacttcttctgcgccaagaaagatgacgccgtgccacaatcggatggggttcgcggtatctataagctgttatgccaacagcacgctcagttccctattatagcgcaatccgctaaattttccggggtgaagagaaagagaggcaggaaaaaacctctgtcaggcaaccacgtgcagcctcccgagaccatgaaatgcaatactttcatccgtcaagtcaaagaggaacatggacggcacacagacgcgaccgtgaaggttccgttcctgaaaaaatgtaaggaagccggccttcttaactacttattggaggagatacttgacaaggtccacagcattccggaaaaactgatggatgaaaccacctcagagagcgactatgaagagatcggaagcgccctgttcgactgtcggttattcgaggataccttcgtaaattttcaggccgcaatcgaaaaaaagatccatgccagtcagcaacgatggcagcagctaaaggaggaaatcgaattgctccaggacctcaaacagacactttgttcattccaggaaaaccgcgaccttatgagctcttccacctcaatctcctccttgtcctattag

SEQ ID NO: 128295 - DNA, 996 bp, synthetic construct
  misc_feature 1..996: note = Description of Artificial Sequence: Synthetic coding sequence
  source 1..996: mol_type = other DNA
atggctcaggcttcaccaccgagacccgagcgggttttgggagccagcagtcctgaggctcgccctgcccaagaagccctgctgttgcccaccggggtgttccaggtggcggagaagatggagaagcggacgtgcgcgctgtgcccaaaagacgtggagtataatgtgctttactttgcacaatcagagaatatcgccgcacacgaaaactgtttactttactcttcgggactggtggagtgtgaggatcaggatcctctcaaccccgaccgcagtttcgacgttgaatctgttaaaaaagaaatacagcggggcaggaagctgaaatgtaagttctgtcacaagcgaggcgcgacagtgggctgcgacctgaaaaattgtaataagaactatcactttttctgtgccaagaaagacgatgccgtgccccagtctgatggcgtgagaggcatttataaactcctctgtcagcaacatgcccagttccccatcatcgcccagtcagcaaaatttagcggtgtgaagcgaaagagagggaggaaaaaaccactgtcagggaaccacgtgcagcctccagaaacgatgaagtgtaatacgtttatcagacaggtcaaagaagagcacgggagacatactgacgctactgtgaaagtgcctttcctgaaaaagtgtaaagaggccgggctactgaattatctgctggaagagatccttgataaggtccactccattcccgagaaactgatggatgaaactacctctgaaagtgactatgaggagatcggatcagccctcttcgattgccgcctttttgaggatacattcgtaaattttcaagccgcgatcgagaagaaaatccacgcctcacagcagagatggcagcagctgaaggaggaaattgaattactccaggacctcaagcaaacactatgttcgttccaagagaacagggatttaatgtcatcatctacatctatctcgtccctctcttattag

SEQ ID NO: 128296 - DNA, 861 bp, synthetic construct
  misc_feature 1..861: note = Description of Artificial Sequence: Synthetic coding sequence
  source 1..861: mol_type = other DNA
tagaggcccggtcctagggggtgcagcgcccctgctgcgagacgccccggcccccggaggagacgctcttcgtttccgccactgtactccagtggacttgtggagtgtgaggaccaagaccccttaaaccctgatcgtagctttgacgtggaatcagtgaagaaggagattcagagagggcgcaagctcaagtgtaagttttgccacaaacgcggcgcaacggtagggtgtgacttaaaaaattgtaataaaaactaccactttttctgcgctaagaaggacgatgctgttccccaaagcgacggagtgcgagggatttacaagcttctgtgccagcagcacgcccagttcccaatcatcgcacaatctgcgaagtttagcggcgttaagaggaagcggggcagaaagaaacctctgtcagggaatcatgtgcagcctcccgaaacaatgaaatgcaatacctttattaggcaggttaaggaagagcacgggcggcacactgatgctaccgtgaaagtgccgttcttgaaaaagtgcaaggaggccggactcctaaactacttactggaagaaatcctcgataaggttcacagtatacccgagaagctcatggatgaaaccacgagtgagtccgactacgaggaaatcggttccgccctgttcgactgcagactttttgaggacacgttcgtaaatttccaagctgccattgagaaaaagatccatgcgagtcaacaacggtggcagcagctgaaagaagagattgaactgctacaagatctgaagcaaactctatgttctttccaggaaaatcgagatctcatgtcaagcagtacatccattagcagcctgtcctattag

SEQ ID NO: 128297 - DNA, 507 bp, synthetic construct
  misc_feature 1..507: note = Description of Artificial Sequence: Synthetic coding sequence
  source 1..507: mol_type = other DNA
atggagaagcgcacctgcgctctgtgccctaaagatgtcgagtacaacgtgttgtacttcgcgcagagcgagaacatcgccgcacacgagaattgcctgctttactcgagcgggttggtggagtgcgaagatcaggatcccctgaaccccgacaggtcatttgacgtagaaagtgtgaaaaaggaaatccagagaggacgtaaactcaaatgtaagttttgccacaagagaggggcgacagtgggttgtgatcttaaaaattgtaataagaattatcactttttttgcgcaaagaaggacgatgccgtgccacagagtgatggagttcgaggtatctacaaactcctgtgccaacagcatgctcagttccccataattgctcagtccgctaagttttcaggcgtcaaaagaaagaggggacggaagaagcctctttcggggaatcacgtccagcctccagagaccatgaagtgtaatacttttattcgccaggtcaaggaggagtag

SEQ ID NO: 128298 - DNA, 297 bp, synthetic construct
  misc_feature 1..297: note = Description of Artificial Sequence: Synthetic coding sequence
  source 1..297: mol_type = other DNA
atggaaaagagaacttgcgctctctgcccaaaggatgtggagtataacgtcttatacttcgcgcaatctgaaaacatagcagcgcacgagaactgtctgctttatagctcagggctcgtcgagtgtgaagaccaggatcctctcaacccggacaggtcatttgacgtcgagtcagttaaaaaagagattcagcgaggtaggaaacttaagtgcaagttctgccataagagaggtgcgaccgtaggatgtgatctgaagaattgcaacaagaattaccattttttctgcgccaagtag

SEQ ID NO: 128299 - DNA, 879 bp, synthetic construct
  misc_feature 1..879: note = Description of Artificial Sequence: Synthetic coding sequence
  source 1..879: mol_type = other DNA
atggagaaacggacctgcgcactttgccctaaagacgtggagtataatgtgctgtactttgcccagtctgaaaacattgctgctcatgaaaattgcttgctgtattcttccggcctagtggaatgtgaagaccaagacccccttaaccccgacagaagtttcgacgtggagagcgtcaaaaaggagatccagcgagggcggaaactgaaatgcaagttttgtcataaacggggcgccaccgtcggatgtgacttaaagaattgtaacaagaactatcactttttctgcgcaaaaaaggacgacgccgtccctcagagcgatggagttcgcggaatttacaagctgctgtgtcaacagcacgcgcaatttcctataatcgctcaaagcgcaaaattttccggtgtgaagaggaaacgcggaaggaagaagccattgtctggaaatcacgtacagccaccagaaacaatgaagtgtaatacttttatacggcaggttaaggaagagcatggaagacatacagacgcaaccgtcaaggtccccttcctgaagaagtgcaaggaggccggcctgttgaattacttgttagaggagatacttgacaaagttcattccatccctgaaaagctaatggatgagaccacctctgagtccgactatgaagaaataggctccgcactctttgactgcaggctgttcgaggacacattcgtaaactttcaggccgcgatcgagaagaaaatccatgccagccagcagcgctggcagcaactaaaagaggagattgagttattgcaagacctgaaacagaccttgtgttcctttcaggaaaaccgggaccttatgtcttcttccacctccattagttcccttagctactag

SEQ ID NO: 128300 - DNA, 624 bp, synthetic construct
  misc_feature 1..624: note = Description of Artificial Sequence: Synthetic coding sequence
  source 1..624: mol_type = other DNA
atggagaaccgcgcattagatcctggaacccgcgactcttacggggcaacttcccatctaccaaataagggagcactagccaaagtgaagaacaattttaaggacttgatgagtaagctgacagagggtcaatacgtgttgtgcagatggacggacggactgtactatttaggaaaaattaaacgggtctcctcttccaaacaaagttgtttagtgacctttgaggataacagcaaatattgggtcttgtggaaggatatccagcatgcaggcgtgcccggggaagaacctaaatgtaacatctgtcttggtaagacgagcgggcctcttaacgagatcctcatatgcggtaagtgcggcctggggtaccatcagcaatgccatatacccattgcgggaagcgctgatcagcccttattaacaccctggttctgccgtcgctgcatctttgcactagcagtgagagttagtctgcctagtagccccgtccccgcaagtcctgccagctcgtccggagcagaccagcgcctcccaagccaaagcctgtcttccaagcagaaggggcacacatgggctctcgagacagacagcgccagcgccacggtgttgggacaggatctttag

SEQ ID NO: 128301 - DNA, 1743 bp, synthetic construct
  misc_feature 1..1743: note = Description of Artificial Sequence: Synthetic coding sequence
  source 1..1743: mol_type = other DNA
atggaaaacagggccctggaccccggcactcgcgacagttacggggctacctctcatctgcctaacaagggggccctggccaaggtgaaaaataattttaaggatctgatgtctaagcttacggaagggcaatatgtgctctgccggtggacagacggactgtattacctgggaaagatcaagcgcgtcagcagttccaaacagagctgtttggtaacttttgaggacaactccaagtactgggttctatggaaggatatccagcatgctggggtaccaggggaggaacctaagtgcaatatctgtctcggcaaaacatctggacccctgaatgagattcttatttgcggaaagtgtgggttgggctatcaccaacagtgccatatcccaatagccggaagcgccgaccaacctttgctgactccttggttttgtcgcagatgcattttcgcactcgctgtcagaaagggaggggctcttaaaaagggcgctatcgcgaggacactgcaggctgtgaagatggtgttgtcctatcagccagaagagttagaatgggattctccccaccggacgaatcagcaacaatgctattgctattgcggtgggcctggggagtggtacctgcgaatgttgcagtgctacagatgccgacagtggttccacgaggcatgcacacaatgtctgaacgagcctatgatgttcggcgaccgattctatctgttcttctgttctgtttgcaatcaaggacctgagtacattgagagactgccactccgctgggtggatgtggtgcacctggccctttacaatctgggcgtgcagagtaaaaagaagtacttcgacttcgaagagatactggcgtttgtaaatcaccattgggaactgcttcaactcggaaagctgacatccactcctgtcactgacaggggtccacacttattgaatgcccttaatagctataaaagcaggtttttgtgcggcaaggagattaaaaagaaaaagtgcatctttcgcctccgcattcgagtgcctcctaatccccctggcaaactcctccctgacaagggtttgctgcccaacgagaactccgcttcatcagaattgcggaagagaggaaaaagtaagccgggccttctaccccatgaatttcagcagcagaaaagacgcgtttacagaagaaagcggtcgaagtttctgctagaggatgccattcctagttctgatttcacttctgcctggtccaccaaccaccacctggcatccatttttgattttactcttgacgagatacagtcattgaagtccgcttcatctggacagactttcttttccgacgtcgacagcaccgacgccgcatctacgagcggcagcgcaagtaccagtttgtcctatgatagccgctggacagtcggatcacgcaagaggaaactggctgctaaggcttatatgccactgcgcgccaaaaggtgggccgccgaactcgacggccgctgcccttccgacagctccgctgagggggcctccgtgcccgagaggccagacgagggcattgattcacacacctttgaatcaatctctgaggatgactcgtcactgagccacctcaaaagcagcataaccaattacttcggtgcagccggccgacttgcctgtggcgagaagtatcaagtgctggccagacgagtgacacctgaggggaaggtgcagtatctcgtagaatgggaaggtactacaccctattag

SEQ ID NO: 128302 - DNA, 1116 bp, synthetic construct
  misc_feature 1..1116: note = Description of Artificial Sequence: Synthetic coding sequence
  source 1..1116: mol_type = other DNA
atgctgcagtgctaccgctgcaggcaatggttccatgaagcttgtactcagtgtctgaatgagcccatgatgttcggcgataggttctatctatttttctgctcagtgtgtaaccaagggccggagtatattgagcgcctgccactccgttgggttgatgtcgtgcacctggcactgtacaatctgggtgtccagagtaaaaagaaatactttgactttgaggagatcttagccttcgtgaatcatcactgggagctgctacagcttggaaagctgacatcaacccctgtaacagatagaggcccacatcttctgaatgctcttaacagctataagtctagatttctctgtgggaaagagattaagaaaaagaaatgtatctttaggctgcggatcagagtccctcccaacccaccaggcaaacttctcccagataagggcctgttaccgaatgagaactcggcgagttcggagctccgtaagagagggaaatctaaacccggactacttccccatgagtttcaacagcaaaaaaggagagtgtatcggagaaagcggtctaagttcctgctcgaggacgccataccaagcagcgactttacctcagcctggtccaccaaccatcatctggcctccattttcgatttcacccttgacgagatccagagcctcaagagcgcctcttctggccagaccttcttcagcgacgtagactcaactgacgcagctagcacgagtggtagtgccagcacctctctatcatacgatagccgttggaccgtgggctctaggaagcggaagctggccgccaaggcctatatgcctttgcgcgcaaaaaggtgggccgctgaactggacggaagatgtccaagtgactcctcagccgagggtgctagcgtgccagagaggccggatgagggaattgacagccatacgtttgagtctatatccgaggacgacagcagcttatcccatctcaagtctagcatcaccaattatttcggagccgcgggcaggctcgcctgcggggagaagtatcaagttctggccaggcgagtgacaccggagggaaaagtccagtacctggttgagtgggaggggacgaccccttactag

SEQ ID NO: 128303 - DNA, 501 bp, synthetic construct
  misc_feature 1..501: note = Description of Artificial Sequence: Synthetic coding sequence
  source 1..501: mol_type = other DNA
atggaaaatagagcccttgatcccggcacacgcgattcttatggcgcaactagccaccttcctaacaaaggagcacttgcaaaggttaaaaataatttcaaggacctgatgtccaagctcaccgaaggtcagtatgtgctgtgcaggtggaccgatgggctctattatcttggtaagattaagagggtctcctctagcaaacagagttgcctcgttacctttgaagataatagtaaatactgggtactgtggaaagacatccagcacgctggtgtccccggtgaggagcctaagtgtaacatttgtctggggaaaacgtcaggacccttaaacgaaatcctcatctgcggaaaatgcggtctcggctatcatcagcaatgccacattcccatcgccggcagcgctgatcagcccctgctgacaccctggttttgtcggcgttgtatctttgccctcgctgtcagaaaaggcggcgccttgaagaaaggcgcaattgcgtag

SEQ ID NO: 128304 - DNA, 324 bp, synthetic construct
  misc_feature 1..324: note = Description of Artificial Sequence: Synthetic coding sequence
  source 1..324: mol_type = other DNA
atggaaaaccgggctctggatccaggcacgcgggattcatatggagctacgagccatctgcctaacaagggtgctctcgctaaagtgaagaacaacttcaaggacttaatgtctaaactgacagaaggccaatatgtcctatgtagatggactgatggtctttactacctcgggaagattaagcgggtttcctcaagcaagcaaagctgtctggtgactttcgaggataacagtaaatactgggtcttatggaaggatatccagcacgccggggtgcctggtgaagaacccaaatgtaatatttgcttaggaaagacaagctag

SEQ ID NO: 128305 - DNA, 1692 bp, synthetic construct
  misc_feature 1..1692: note = Description of Artificial Sequence: Synthetic coding sequence
  source 1..1692: mol_type = other DNA
atggagaatcgagcactggatcctggtactcgcgacagttacggcgcaactagtcatctgccgaataaaggcgcactggcaaaggtgaagaacaattttaaagatctgatgtcaaaactgaccgagggccaatatgtgctgtgtaggtggaccgacggcctctattacctaggcaaaatcaagcgggtttcctctagcaagcagagctgtctcgtgacatttgaggacaattcgaaatactgggtgttgtggaaggatatacaacacgcgggcgttcccggcgaggagcccaagtgcaacatttgccttggaaaaacatctggacctctaaacgagatattgatctgcgggaagtgcgggttgggatatcatcaacagtgtcatattcccatcgccgggtcagccgaccagcctctcctcacaccctggttctgccggaggtgcatttttgctcttgccgtgcggaaggggggagctctgaagaagggcgcaattgcccggactctccaagcagtgaaaatggtactgtcctaccagccagaggaactcgaatgggactctccccatcgcacaaaccagcagcagtgctattgctattgcggggggccaggtgagtggtacctgaggatgcttcagtgttacaggtgccgtcagtggttccatgaggcgtgcactcaatgcttaaacgagcccatgatgttcggcgaccggttttatctgtttttctgttcagtgtgcaatcaaggccccgagtatattgagcggctgccactgcgttgggtcgacgtggtccacctcgcgctgtacaacttaggtgttcagtctaaaaaaaagtactttgattttgaggaaatcttagccttcgttaatcaccattgggagctattacaactcggcaagctgacaagcacacccgtgacggaccgcggtccccaccttttgaatgccttgaacagttacaagtcccgattcctgtgtgggaaagaaatcaaaaagaagaagtgcatatttcgtctcagaatcagagtgccgcccaacccccctgggaagctgctgcctgataaaggattgctgccgaacgagaactctgcatcctctgagctgcgaaagcggggcaaaagcaaacccggactcctgccccacgaatttcagcaacagaaaaggagggtgtacaggagaaaacgcagcaagtttctgttagaagatgcaattcctagttctgactttacatccgcgtggtcaacaaaccaccatctggctagtatcttcgatttcacactagatgaaatccagtctcttaagtccgcttctagcgggcagacttttttcagcgacgtggactctaccgacgcggcctctacatcaggctctgccagcacgagcctctcttacgatagccggtggacggtgggttcccgcaagcgcaaattggccgccaaggcctacatgccgctccgtgcaaagcgatgggcggctgaactggacggacgctgcccttcggatagctcagctgaaggggcatcagttcctgaacgtccagacgaggggattgactcacataccttcgaatctatatcagaagacgatagttcgctatcccatctcaaaagctccatcacgaattactttggcgctgccgggagattagcatggggtgaagtgcccggcgtgggcagtgagggacacacctag

SEQ ID NO: 128306 - DNA, 3291 bp, synthetic construct
  misc_feature 1..3291: note = Description of Artificial Sequence: Synthetic coding sequence
  source 1..3291: mol_type = other DNA
atggccaccgttcctgtttactgtgtgtgcaggctgccttacgatgtaacacggttcatgatcgaatgcgacgcttgtaaagactggttccacgggtcttgcgtgggtgttgaggaggaagaggctcccgatatcgatatctatcactgccccaactgcgaaaagacccacggaaaaagcacattaaagaaaaagaggacctggcacaagcacggccccgggcaggcccctgatgtgaaacccgtccagaatggctcccagctgtttatcaaggagctaaggtcaagaacctttccatcagcagaggacgttgtggccagggtaccaggaagccagttgacactcggttacatggaagagcatggattcaccgaacccatactggtgccaaaaaaagacgggctgggtctcgcggtgccggcccccacattctacgttagcgacgtggaaaattacgtaggcccagaacggagcgtggatgtgaccgacgtaacgaagcaaaaggattgtaagatgaagctgaaagaattcgttgattactattactccactaacagaaagcgcgtactaaacgtgaccaaccttgagttcagtgacacccgaatgtcgtcctttgtggaacctccagatatcgtgaagaaactctcatgggtcgagaattattggcccgatgatgcacttctcgcgaagcccaaagtgaccaaatattgcctgatatgtgtgaaagacagttacactgatttccacattgacagtgggggtgcatccgcctggtatcacgtactgaaaggagaaaagactttctaccttattagacctgcttctgcaaatatttctctatatgaacgatggcgctccgcatccaatcactccgagatgttctttgctgatcaagtggataagtgctacaaatgcatcgtaaaacaaggtcaaaccctctttatcccctcagggtggatctatgccacactgactcctgttgattgcctcgcattcgccggacactttttacactctctcagtgtggagatgcagatgcgcgcttacgaggtggagcggcggctgaagctaggatccctaacacagttcccaaacttcgaaaccgcttgttggtacatgggaaagcatttgctggaggcctttaaggggtcccacaagtcaggcaagcaactccctccgcacctggtgcagggagccaaaatactgaacggggccttccgaagctggacaaagaaacaagctctggctgaacatgaggacgaactgcccgaacacttcaagccgtctcagctgattaaagatctcgctaaagaaattcgattatccgaaaatgcctcgaaagctgtgagacccgaggtgaacaccgtggcttccagtgacgaagtatgtgatggcgatagggagaaggaggagcctccctcacctattgaagccaccccaccgcagtcactgttggagaaagtcagcaaaaaaaagactcctaaaacagtgaaaatgccgaaaccctccaagatccccaagccacctaagccccccaagccgccccggccgcccaagacactcaagcttaaggatggaggcaagaagaagggaaaaaagagtagggagtccgctagccccacgatccccaatctggacctcttagaagctcacaccaaggaagcactaaccaagatggagccccccaaaaagggcaaggccaccaaaagcgttttatcagtgcctaataaggatgtcgtgcacatgcagaacgacgtagagaggttagaaattagggagcaaacaaaatccaagtctgaagcgaagtggaaatataaaaatagcaaacctgattcactgctgaaaatggaggaggagcagaaactcgagaagtcccctctggcgggtaacaaggataataagtttagtttctccttctccaacaaaaaactgctgggatcgaaggcactgagacctcccactagtcccggcgtttttggtgctctgcagaattttaaagaggacaagcctaagcctgttcgagacgagtacgaatacgtaagtgacgacggcgagttgaaaattgatgaatttcccatcagacgaaaaaaaaatgcgccaaaacgcgatctgtccttcttactggacaaaaaagctgtgttgcccacacccgtcactaaacccaagctagactccgcagcctacaagagcgacgactcctcagacgaaggctccttacatattgacacggatacgaagcccggacggaacgctcgcgtcaagaaggagtctggcagtagcgccgctggaatactagatcttcttcaggcctccgaggaggtgggtgcattggagtacaatccgtcatcccagcccccagccagtccatccactcaagaggcaattcaaggtatgctctctatggcaaacctgcaggcctcagattcatgcctgcagacaacttggggggcggggcaagctaaaggttctagcttggcagcgcacggggccaggaagaatgggggcggttcagggaaatcggcggggaagaggttgctgaaacgcgcagcaaagaactcagtggacttggatgactatgaagaggagcaggatcatctggatgcatgctttaaagattccgattatgtctacccgagcttggagtccgacgaggacaatcccatttttaagagccgttccaagaaaagaaaaggcagtgacgatgcgccatactcccccaccgcaagggtaggccccagcgtgccgcggcaggatcggccagtaagagagggcactcgggtggccagtatcgaaaccggccttgccgccgctgcagcgaagctgtcacagcaggaagagcaaaaatcaaaaaaaaaaaagagtgccaaaagaaagctgactcccaacacaactagccctagcacctcaacctcaatctcagccggcaccacctctacatccaccacacctgctagtaccaccccagccagtaccacccccgcaagcacgtctaccgcaagttctcaggcatcccaggagggcagctcacctgagccccctcctgagagccattccagctcgcttgcggaccatgaatacacggcagccggcacatttacgggcgctcaggcagggcgcacctctcaaccaatggcaccaggagtcttcttaacccagcgtcgacccagtgcctcatcaccgaacaataataccgccgccaaaggcaaacgcactaaaaaaggaatggccacagcaaagcagcgccttggaaagatcctcaagatccacaggaatgggaaactgctgctctag

SEQ ID NO: 128307 - DNA, 984 bp, synthetic construct
  misc_feature 1..984: note = Description of Artificial Sequence: Synthetic coding sequence
  source 1..984: mol_type = other DNA
atggcaactgtccccgtgtactgcgtttgcagactcccctacgacgttacccgttttatgattgaatgtgacgcttgtaaggactggttccatggctcctgtgtaggtgtagaggaggaggaagccccagacatcgacatttatcactgtccaaattgtgagaaaacacatggaaagtcgactctaaaaaaaaaacgtacctggcataagcacgggcccggccaagcgccagatgtgaagccgaagaactctgtggatctcgatgactatgaggaagaacaggaccacctggacgcctgctttaaggattcggattacgtgtaccccagcctggaatcagacgaagacaatcctatttttaaatccaggtccaaaaagcggaaaggctccgatgacgctccatattccccaacagcgagagtggggcctagcgtgcctcgccaagaccggccagttcgggaaggcacgcgcgtggcaagcatagaaacgggcctggctgccgccgccgccaaactctctcagcaggaggagcagaagagtaagaaaaaaaaatcagctaagcgtaagttgacacctaacacaacctccccctccacgtcaacttcaatttccgcggggacaacatctacctctactaccccagcttcaaccactccagcttccacaacacccgcatctacatcaacagcttccagtcaggcttcacaggagggtagcagccctgagcctccccctgagtcccactcatcgagccttgccgatcacgagtacacagcagcaggtacgtttactggtgcccaagccggccgcaccagtcaacccatggcgcccggcgtgtttctgacacaaagacggccatcagcgagttctcccaataacaataccgctgcaaaagggaagcgaactaaaaaaggaatggctacagcaaagcagcggctgggaaagattctcaagatccacaggaatgggaaactgctcctgtag

SEQ ID NO: 128308 - DNA, 2046 bp, synthetic construct
  misc_feature 1..2046: note = Description of Artificial Sequence: Synthetic coding sequence
  source 1..2046: mol_type = other DNA
atggaactccaaaccctgcaggaggcactgaaggtcgagattcaggtccatcagaaattggtggctcagatgaaacaggacccccagaacgccgacctgaagaagcagctacacgaactgcaggccaaaattaccgcactttctgagaaacagaagcgagtcgtggaacagctgcggaagaatctgatcgtgaagcaagaacagcccgacaagttccagatccagcctctccctcaaagcgagaacaagctccagacagcacagcagcaaccgttacagcagctgcaacagcaacagcagtaccaccatcatcatgcccaacagtctgctgccgcatcacccaacctcacagcaagccagaaaaccgtcacgaccgcttctatgatcaccacaaagactctgcctctggtgctgaaagcggccactgccaccatgcccgcctccgtggtgggccagcgcccaaccatagctatggtcaccgccatcaactctcagaaggctgttctttccacagacgtgcagaacacgcctgtcaatcttcaaacatcgtcaaaggtgactggtccaggggctgaggctgtgcagattgtcgccaagaacaccgttacgcttcaggttcaggctactccaccacagcccatcaaagttcctcaatttatcccccccccccggctgacgccccgcccaaactttctcccgcaggttagaccgaagcccgtcgctcagaacaatattcccatcgcgccggcccctcccccgatgctcgcggccccccagttgatccagcgtccagtgatgctgaccaagtttacacctacaaccctgcctacgtcgcagaattccatacacccagtgcgcgtggtaaacggccagaccgctacgatcgccaaaaccttcccaatggcacaacttacctcgatcgttattgctacacccggcaccagacttgctggaccccagacggtgcagctcagcaagcccagtttagagaagcaaaccgtcaaatcgcataccgaaacagacgaaaagcagaccgagtctaggacgattaccccaccagccgctcccaagcccaaacgagaagagaatccccagaagctagcctttatggtgtctctggggctggtgacccatgaccacctggaggaaatccagagcaaacgtcaggagagaaaaaggaggaccactgcaaaccccgtctattcaggagctgtgtttgaacccgagcggaaaaagagtgcagtgacctatctgaacagcactatgcatcccggcactagaaaacgcggaagaccccctaaatacaatgctgtactaggtttcggtgcactgacccctacttctcctcagtcatcccatccagattcccccgagaacgagaagacggagacaaccttcacattccctgctcctgtgcagcccgtgtctctcccatcccccacttccacggacggggatatacacgaggatttttgctctgtgtgtcggaagtcaggccaactgctgatgtgtgacacgtgcagtcgtgtgtatcatctggactgcctcgatcctccccttaaaacgatccccaaaggcatgtggatctgccctcgctgtcaggatcaaatgctaaagaaggaggaggcaatcccctggcctggtaccctcgctatcgtgcactcttacatcgcttataaggctgctaaggaagaggagaagcagaagcttctgaaatggagtagtgatttgaagcaggaacgagagcaactggagcagaaggttaaacaactgtccaactctatctccaaatgcatggagatgaagaacacaatcctggctcgtcagaaggagatgcactccagcctcgagaaagtaaagcagctcatccgtctgatccatggcattgatctgtccaagcctgtggattctgaagctacagtcggtgctattagtaacggaccggactgcactcctcctgccaacgcggccactagcacgccagctccctccccctcaagccagtcctgcactgctaattgtaaccaaggcgaagagactaagtag

SEQ ID NO: 128309 - DNA, 1905 bp, synthetic construct
  misc_feature 1..1905: note = Description of Artificial Sequence: Synthetic coding sequence
  source 1..1905: mol_type = other DNA
atggagctccagacgttgcaagaggccctcaaggtcgaaatacaggtgcaccaaaagttagttgcacagatgaaacaggacccacagaatgccgatctaaagaagcagctgcacgagctccaggccaaaattactgcactgtccgagaaacagaaacgagttgtcgagcagctaaggaagaacttaatcgtcaagcaggaacagcccgacaagttccagattcaacctctgcctcaaagcgagaataagctgcagacagcccaacagcaaccgctgcagcagcttcaacaacagcagcaataccaccaccatcatgcacagcaaagcgccgccgcgagtccaaacctgacagcaagccaaaagactgtgaccactgcatccatgattaccacgaaaacactgcccttagtgctgaaggcagccaccgccaccatgcccgcctcagttgtggggcagcgccctacaatcgctatggttactgcaatcaatagccagaaagcggtgctgtcgactgatgtgcaaaacactccagtgaacttgcagacctcctcaaaagtgacgggccctggggccgaagcagtccagatcgtcgccaagaatactgttacactccaagtccaggccactccacctcagccaataaaggttccacagtttataccacccccgaggctcacacctcgtccaaattttctgccccaggtccggcctaaacccgtcgctcagaacaacatcccaatagcccctgctccacctccaatgctggccgctcctcagctgatccagcgcccagtaatgttgactaagttcacccctaccactctccctacgtctcagaattctatccatcctgtgcgggtggtgaatggccagaccgccactattgcaaaaacttttccaatggctcaactgacctctatcgtaatcgcaacaccgggtaccaggcttgctggcccccagacggtacaactctctaagccatcacttgaaaagcaaacggtgaagagtcataccgagacggatgaaaagcaaacggaaagccgaacgatcacgccacccgccgcacccaagccaaaaagagaagagaacccccagaaacttgcatttatggtgtcactgggcctagtaactcatgatcatctggaagaaatccagtccaaaaggcaggaacgcaagcgacggacaactgccaatccggtttacagcggcgccgtcttcgaacccgaaagaaaaaagagtgccgtcacctacctaaactccaccatgcaccctggcacaaggaagcgcgctaacgaggagcactggcccaaaggggatatccacgaggacttctgtagcgtgtgcagaaaatccggccagctcctgatgtgcgatacatgtagccgggtgtaccacctggactgcctggaccctcccttgaagacaattcctaaaggaatgtggatctgtcccaggtgccaggatcagatgttgaagaaagaggaagccatcccatggcccgggactctagctatcgtgcacagctacatcgcatataaggccgccaaagaagaggagaaacagaagctactcaaatggagcagtgacttaaaacaggagagagagcagctcgagcaaaaagtgaagcagttatccaacagcatttctaagtgcatggagatgaagaacactatcctcgctcgacaaaaggagatgcacagttctcttgagaaggtgaagcaacttatcaggctcattcacggtatcgatttgtcaaagcccgtggattctgaggcaaccgtcggggccatcagcaacggtccagattgtacacctcctgctaatgcagcaactagcacacccgctccttcgccttctagccagtcttgcacagccaattgtaatcagggggaagagactaagtag

SEQ ID NO: 128310 - DNA, 2043 bp, synthetic construct
  misc_feature 1..2043: note = Description of Artificial Sequence: Synthetic coding sequence
  source 1..2043: mol_type = other DNA
atggagctgcagactctccaggaggctctcaaagtggagatccaggtccatcaaaagctcgtcgctcagatgaaacaggaccctcagaacgccgatcttaaaaaacaacttcatgaacttcaggctaagatcaccgctttgagcgaaaaacaaaaacgagtggtggagcaattgcggaagaaccttattgtgaagcaggagcagcccgataaatttcaaattcaacccttgccccagagtgagaataagctccagacagcgcagcagcagcctctccagcaactgcagcagcaacaacagtaccaccatcaccacgcccaacagtccgcggccgcttctccgaaccttacagcatctcagaagacagtaaccactgccagtatgataacaacgaagacccttcctctcgttctgaaggccgccacagcaactatgcctgctagtgtggttgggcaacggcctaccattgccatggtgacggccattaacagtcaaaaggccgtgctgagtactgatgtgcagaacaccccagtgaacctgcagacaagttctaaggtcacggggccaggagcggaggccgtgcagatcgttgcaaagaatactgtgactctagtgcaggccactcccccccagcctataaaggttcctcaatttatccccccacctaggctgacacctcgacccaattttctgccccaagtgcggcctaaacctgtggcacagaataacatacctatagccccagccccacccccaatgctggccgccccacagctaattcagagacctgttatgctcaccaaatttacacctaccactctgccgacatcacagaactctatacacccagtgagagtggtgaacgggcagaccgcgaccatcgctaagaccttccctatggcccagttaacatctattgtgattgccacccccggaaccaggttggccggcccccagacagtgcagttgtcaaagccctccctggaaaaacagacagtcaagagtcatacggaaaccgatgagaagcagactgagagtaggactatcacccctcctgcggctcccaagcctaagagggaagagaacccacaaaagctagccttcatggtttcgctcggtcttgttacacacgaccacttagaggagatacagtcaaagaggcaggagcgcaagcgtcgaactaccgccaatccggtctattccggggcagtgttcgagcctgagagaaagaagtccgcagtgacctacctgaattccactatgcaccctgggacccgtaagcggggaaggcccccaaaatacaatgcagttctcggatttggcgctctgacccctacttcacctcagagcagccatccagacagcccagagaacgaaaaaactgagacaaccttcacttttcctgcccctgtgcagccagtgagcctgccctctcctacaagcacagacggcgacatccacgaggatttctgtagcgtgtgccgcaagagcggccaactactgatgtgtgacacctgcagtagagtgtaccacctggactgcctggaccctcctctcaagacaattcctaagggaatgtggatctgcccaaggtgtcaggaccagatgcttaagaaggaggaggcgattccgtggcctgggactcttgcaatcgtccacagctacattgcctataaggccgccaaagaggaggaaaagcagaaactattaaaatggtcatccgatctcaagcaagagagagaacagctggaacagaaagtgaaacagctgtcaaattccatatctaagtgcatggagatgaagaataccattctggcgcggcaaaaggagatgcacagttcattggagaaggtcaagcagctgatacgcctgattcatgggattgacctcagtaaacctgtggactctgaagccaccgtcggcgccattagcaacggtcccgactgcacgccccccgccaatgcagccacctcaactcccgcgccaagcccttcctcccagtcttgcacagctaattgtaaccagggcgaggaaactaagtag

SEQ ID NO: 128311 - DNA, 81 bp, synthetic construct
  misc_feature 1..81: note = Description of Artificial Sequence: Synthetic coding sequence
  source 1..81: mol_type = other DNA
atggaacttcagaccctgcaggaagccttgaaggttgaaatccaggttcatcagaaacttgtggcacagatgaaacagtag

SEQ ID NO: 128312 - DNA, 36 bp, synthetic construct
  misc_feature 1..36: note = Description of Artificial Sequence: Synthetic coding sequence
  source 1..36: mol_type = other DNA
atggagctgcagacactccaggaggccctaaaatag

SEQ ID NO: 128313 - DNA, 306 bp, synthetic construct
  misc_feature 1..306: note = Description of Artificial Sequence: Synthetic coding sequence
  source 1..306: mol_type = other DNA
atggagctccagacactccaagaagcgctgaaagtggaaatccaggtccaccagaagctcgtcgcccaaatgaagcaagatccacagaacgctgatctgaaaaaacagctccatgaactacaggctaagatcactgccttaagcgaaaagcagaaacgcgtggtggaacaattaagaaaaaacttaattgttaagcaggaacagcctgataagttccagatacaaccactgccccagtccgagaacaaacttcagaccgcccagcagcagcctcttcaacagctacagcagcagcagcagtattag

SEQ ID NO: 128314 - DNA, 30 bp, synthetic construct
  misc_feature 1..30: note = Description of Artificial Sequence: Synthetic coding sequence
  source 1..30: mol_type = other DNA
atggaactgcaaaccttacaagaggcctag

SEQ ID NO: 128315 - DNA, 156 bp, synthetic construct
  misc_feature 1..156: note = Description of Artificial Sequence: Synthetic coding sequence
  source 1..156: mol_type = other DNA
atggagctccagaccttgcaagaggcgctcaaagtggagatccaagtgcaccagaaactggttgcacagatgaagcaggatccgcagaatgccgacctgaaaaagcagctgcacgagcttcaggctaaaataaccgcattaagtgagaagcagtag

SEQ ID NO: 128316 - DNA, 477 bp, synthetic construct
  misc_feature 1..477: note = Description of Artificial Sequence: Synthetic coding sequence
  source 1..477: mol_type = other DNA
atgcttgaggctatggcggagccaagccctgaagatccaccgcctacattaaaaccggaaacccaaccgcccgaaaagcggcggcgaaccatcgaagacttcaacaagttttgcagttttgtgttggcctatgcaggatacatcccaccatctaaggaagagtctgactggcccgccagcggctcttcttctcccctcagaggcgagagcgccgctgactctgatggttgggactctgcaccatccgatctgcggaccatccagacattcgtgaaaaaggcaaagtcctccaagcgcagggctgctcaagcaggaccaacccagccgggccctccccgctcaacattcagtcgtcttcaggcgcccgatagcgctactctgctggagaagatgaaattaaaggattcgttgttcgatttagacggccccaaggttgcatcccccctcagtccaccttgcgcagccaacactccatag

SEQ ID NO: 128317 - DNA, 1212 bp, synthetic construct
  misc_feature 1..1212: note = Description of Artificial Sequence: Synthetic coding sequence
  source 1..1212: mol_type = other DNA
atgctggaggctatggctgagccatccccagaggacccaccccccactctgaagccagagacacagcctccagagaagcgcagacggactatcgaagattttaacaaattctgtagctttgtgctggcctacgccggttatatcccaccctctaaagaggagtccgattggcctgcttctggttcctcttctccactgaggggagagtcggctgccgattcagacggatgggactccgcaccctcagatctcagaacgattcaaacctttgttaaaaaggcaaagagttcaaaaagacgcgcggcgcaggctgggccaacccagccaggccctcctaggagtacattctctagactccaggctcccgacagtgctacattattggagaagatgaaactcaaagattccctctttgatttggatggacccaaggtggcttctcccttatcaccaacgagccttacccatacctcccggccacccgctgctcttacacccgtacctttgtcgcaaggggatctgtcccatccaccacgcaagaaggatagaaagaatagaaagctcgggcctggcgctggcgccgggtttggcgttttgcgcagacccaggccaacgccaggcgacggagaaaaaaggtcacggatcaaaaaatcaaagaagaggaaattaaagaaggcagagcgcggcgaccggctgccccccccgggccctccacaggcgccaccatcagacaccgattccgaggaggaggaagaggaagaagaggaagaagaagaggaggagatggcaaccgtcgtgggcggagaagcacccgtgccagttttgccaactccaccggaggctccaagaccacctgctacggttcaccctgaaggggtgcccccagctgactctgagtccaaagaggtggggtctacagagacctcgcaggacggagatgcctcatccagcgagggcgagatgcgcgtcatggacgaggatatcatggttgagagcggtgatgacagttgggatttgatcacctgctactgtaggaagccttttgctgggcgtcccatgatcgaatgtagtctgtgtggcacctggatccatctctcatgtgctaaaattaagaagaccaatgtgcctgacttcttttattgtcaaaagtgcaaggaactcaggccagaggcaagaagactaggagggccacccaagtccggagagccctag

SEQ ID NO: 128318 - DNA, 1200 bp, synthetic construct
  misc_feature 1..1200: note = Description of Artificial Sequence: Synthetic coding sequence
  source 1..1200: mol_type = other DNA
atgcctggggactgtcgccgtgatccaccacctaccctcaaaccagagacgcagccccctgagaaacgaaggaggactatagaagacttcaataaattttgcagcttcgtcctggcttatgcaggctacattcctccctccaaagaggagagcgattggcctgcatctggcagctctagcccacttcgcggagaatccgctgccgactccgatggttgggactcagcgccgtcggaccttcgaacgattcaaaccttcgtgaaaaaggctaaatcttccaaacgccgagctgcgcaggcggggcccactcagcctgggcctccgaggtctacatttagccgtttgcaggccccggattccgccacgttgttggagaagatgaagctcaaggattccctgttcgatctagatgggccgaaggtcgcctcccctttgtcacccacttcacttacccatacttccaggccccctgccgccctcacacctgtgcctctatcccagggagatctctcacaccctcctaggaagaaagatagaaaaaacagaaagctgggtccaggtgccggagcaggctttggagtgctgaggcgaccgcgcccgacaccgggggatggggagaaaagatctagaatcaaaaagagtaagaaaagaaagcttaagaaagcagaaaggggtgacagactgccccctccaggcccgcctcaggcccctccaagtgatacagattctgaggaagaggaggaggaagaggaagaagaggaagaggaagagatggccacagtcgtaggcggcgaggcaccagttcctgttctcccaacccctcctgaggcacctcgacccccagcaacggttcaccccgaaggagtccctccggctgattccgagtctaaggaggtggggtccaccgaaaccagccaggacggagacgcttcaagttccgagggggaaatgagggtcatggatgaggatatcatggtggagtcaggtgacgatagttgggacctcattacgtgttactgtcgcaagccctttgcgggccggcctatgattgagtgttcattgtgtggcacatggatccacctgtcctgcgctaagattaagaagaccaatgtgcctgactttttctactgtcagaagtgtaaagagctgcggcccgaagcccggagactcgggggccccccaaagagtggggagccttag

SEQ ID NO: 128319 - DNA, 6120 bp, synthetic construct
  misc_feature 1..6120: note = Description of Artificial Sequence: Synthetic coding sequence
  source 1..6120: mol_type = other DNA
atggacattgtggacaccttcaaccatctgattccaactgaacacctcgatgatgctctattcctgggctccaatctggagaatgaggtctgtgaggatttcagcgcatcccaaaatgtgctggaggactctttgaaaaatatgttgtccgataaagacccaatgttggggtctgctagcaaccagttctgtctgcctgtgctggattctaacgaccccaattttcagatgccttgctcaaccgttgttggcttagacgacataatggatgaaggggtggtgaaggaatctggaaatgacaccatcgatgaggaggaactcattttgcccaatcgtaacctgcgcgacaaagtggaggaaaactccgtgcggagccctcggaaaagcccaaggctcatggcgcaggaacaggtgcgttccctgagacagtctacgattgccaagcggtcaaatgcggcacctcttagcaacaccaaaaaagcttctggaaaaactgttagcacggcgaaagctggagtgaagcagccggaaagatcacaggtgaaggaggaggtgtgcatgtccctgaagccagaataccataaagagaataggcgatgctctcgtaatagtggccaaatcgaggtcgttcccgaagtcagcgtctccagtagccactcatctgtgtcctcttgcctcgaaatgaaggatgaggatggtctggactccaagcacaaatgcaacaatcctggggagatcgatgtgccttcccacgaattgaattgctctctcctgtctgagacctgtgtgaccataggagaaaaaaagaacgaggctcttatggagtgcaaagctaaacccgttggaagtccattattcaagttctccgacaaagaagagcatgaacaaaatgacagtatatcaggcaagaccggtgagacagtggttgaggagatgattgccacacgtaaggtcgaacaagactctaaggaaacagtgaagttgtcgcatgaggacgatcatatcctggaagatgccggatctagtgatatatcttcagatgccgcatgcacaaatccaaataagactgaaaatagcttggtgggtttgccaagctgtgtcgacgaggtgacagagtgtaacttggaactcaaggacaccatgggcattgcagacaagaccgaaaacactcttgagcgcaataagatcgagccactcggctattgcgaggacgccgaatctaaccggcagcttgagtctaccgagttcaacaagtcaaatctggaagtagttgatacctctacctttggacccgagagtaacatcttggaaaatgctatctgtgatgtgccagatcagaatagcaaacagctgaacgctatcgagtcaaccaagattgagtcccacgagacagctaatctgcaggacgaccggaattcccagagctctagtgtgtcttatctggaatctaagtccgtgaagtccaagcatactaaacccgtaattcacagcaaacagaacatgactactgacgccccaaagaagatcgtagccgccaaatatgaggtgatccactccaagaccaaggtgaacgttaaatccgtgaaacggaacaccgatgtcccagagtcccagcaaaacttccatagacccgtgaaggtacgaaaaaagcagattgacaaggaacccaaaattcagtcctgcaattccggggttaaatccgtaaaaaaccaggcgcacagcgtcctcaagaaaacactgcaggaccagacactagtacaaatatttaaaccgctgacacattccttgtcagacaagtcacatgctcacccgggatgtctgaaagagccacatcacccagcacagactggccacgtcagccatagctcacagaagcaatgtcataagccccagcagcaggcgccagcgatgaagactaacagtcatgtgaaggaggaattggaacatccaggggtagaacactttaaggaagaggacaaacttaagttgaagaaacctgagaagaaccttcagcctagacagcgcaggtcctctaagtccttttcactggatgaaccaccgctgtttatccctgacaacatagccacaatccgacgtgaaggctcagaccactcctcttcattcgagtccaaatatatgtggacaccaagtaagcagtgcggtttctgtaaaaagccgcacggtaacaggtttatggtgggctgtggtcgatgtgacgactggttccacggcgactgtgtgggcctctccttatcccaggcgcagcagatgggagaggaggataaggaatacgtgtgcgtcaagtgctgcgcagaagaagacaaaaaaacagagatactcgacccggataccctagaaaatcaggctactgtcgagttccactctggcgacaagaccatggaatgtgagaagttgggtctctccaagcatactacaaacgatcgtaccaagtacatcgacgacacagttaagcataaagttaagattttaaagagggagtccggtgaagggcgcaactcaagcgactgtagagacaatgaaatcaaaaaatggcagttggctcctctcaggaagatggggcagccagtactgcctagacgaagctcggaagagaagagcgaaaaaattcccaaggagtctaccacagtgacttgcacaggagagaaggcaagcaaacctggtacgcacgaaaaacaagagatgaagaagaaaaaggtcgaaaaaggagtgttgaacgttcaccctgcagccagtgcttcgaagcccagcgcggaccagatcaggcaaagcgtgcgacactccctgaaagatatactcatgaagaggctcacagatagcaatctgaaggtgcctgaggaaaaagctgcaaaagtcgccacaaagatcgagaaagagctgttctctttttttcgcgatacagatgccaaatacaagaacaagtatcgtagcctcatgttcaatctcaaagatccaaagaacaacatcctgttcaaaaaggtgctgaaaggggaggtgacacccgaccacctcatcagaatgtccccagaggagctggcgtcaaaagagttagctgcatggcggcggagagaaaacaggcataccatcgaaatgattgagaaagagcaacgcgaagtagaaaggcgccccataaccaaaattacccacaagggcgagattgaaatagagagcgatgcacctatgaaggagcaagaagccgccatggagatacaagagcccgctgccaacaagtccttggagaaacctgaaggatccgagaagcaaaaggaagaggtggactctatgtctaaggacacaacgagtcagcataggcagcatctttttgacttgaactgtaagatctgtatcgggcggatggcccctcccgtggatgacctcagtccaaagaaagtcaaggtcgtggtgggtgtagctcgaaagcatagcgataacgaggccgaatcaatcgctgacgcattgtcttccacctcaaacatcctggcttcggagttctttgaggaagagaaacaggagagcccgaaaagtactttttcacctgccccacgcccggaaatgccaggaacggttgaggttgagtcaacattcctggcgcgtctgaatttcatctggaaaggctttatcaacatgcccagcgtcgctaagtttgttacaaaggcatatcccgtatcaggatcccctgaatatctaacagaagacctccctgatagcatccaggttggagggaggattagtccccagactgtctgggactacgtagagaaaattaaagcctctgggaccaaagaaatctgcgttgttaggtttaccccagtgactgaggaagaccagatttcttataccctactgtttgcctattttagttcccggaagcggtatggcgtagccgcaaacaatatgaagcaagtgaaagacatgtacctcattccgttaggagccacagacaaaatcccccaccccctcgtcccgtttgacggacccggcctggagctccataggccaaacctgttgttagggttgattatacgccaaaaactgaagcggcaacacagcgcgtgtgccagtacttctcacattgctgaaaccccagagtctgccccaccgattgccctccctcccgataagaaaagcaagatcgaagtgtctacggaagaggcccctgaagaggagaatgattttttcaatagcttcacaactgttttacacaagcagcgtaacaagccgcagcaaaatctccaagaagacctgcctactgctgtagaacccctgatggaagttaccaaacaggaaccgccgaagcccttgcgatttctgcctggtgtgcttataggttgggagaaccagccgaccactctagagctcgcaaataaacccctgccagttgacgatattctccagtccttgctaggtacgactggacaggtgtacgaccaggcccagagtgttatggagcagaatacggttaaagaaattccgttcctgaacgaacagaccaattccaaaattgagaaaactgataacgtagaggttaccgacggcgagaataaagagattaaagtaaaggttgacaatatctccgaatcaaccgacaaatcggctgagatagaaacttccgtggtagggtctagtagcatcagcgccggcagccttacttcactgtcactgagaggtaagccgcctgacgtgtcaacagaggcatttctaaccaatctgtccattcagtccaagcaggaagaaacggtggaaagcaaagaaaagacgctgaagcggcagctgcaggaggaccaggagaacaatcttcaggataatcaaacctccaattcctcaccatgtcggtccaatgtggggaaaggcaatatcgatggcaatgtgtcttgttctgaaaacctggtcgcgaataccgctaggtctccacagttcataaatttgaagagggacccgcgacaggcagcagggagatcacagccagtgaccacttccgagtcaaaggacggcgactcttgcagaaacggagaaaagcatatgctgcccggcttaagccacaataaggagcacttgacagaacagataaatgtcgaggagaagctctgtagtgccgaaaagaactcgtgcgtgcaacagagtgacaatctgaaggtggcccaaaattctccttcagtggagaacattcagacgtcccaggccgaacaggcaaaaccactgcaggaagacatattgatgcaaaatattgagactgtgcatccgtttagaagagggtcggctgtggcaacctctcatttcgaggtagggaacacatgtccttccgaatttccatcaaagtccatcacatttacttctagatctacgtcccctcgcacatctacaaacttcagtcccatgcgcccccagcaaccaaatctgcagcatctgaagtccagcccacctggatttccctttcctggacctcccaactttccccctcagtctatgtttggattccctcctcatctaccacctccactgctaccccccccgggcttcggctttgctcagaaccccatggttccctggccccctgtcgtgcacttgccaggccagccccagagaatgatggggcccctgtctcaggcaagtagatatattggaccccagaatttttaccaggtgaaagatattcggaggccggagagaaggcactctgacccgtggggcagacaggaccagcagcagttggacaggccatttaatcgcgggaaaggtgaccgccagcgattctactctgactctcatcaccttaagcgggagaggcatgaaaaggagtgggagcaggaatccgagagacatagacggcgcgaccgaagtcaggacaaagaccgcgatagaaagtctcgggaagaagggcataaagacaaggaaagagcgcgcttgtcacatggggaccggggaaccgacggcaaagccagtcgcgatagtcggaacgtggacaagaaacctgataagccaaaaagcgaagattatgagaaggacaaggagcgggagaaatcaaagcatcgagaaggggaaaaagaccgtgatagatatcataaagatcgtgatcatacggatagaaccaagtccaaaaggtag

SEQ ID NO: 128320 - DNA, 6120 bp, synthetic construct
  misc_feature 1..6120: note = Description of Artificial Sequence: Synthetic coding sequence
  source 1..6120: mol_type = other DNA
atggatatcgtcgacaccttcaaccatcttatccccaccgaacacctagatgatgccctcttcctgggaagtaacctcgaaaacgaggtttgcgaggacttctccgcctcacagaacgtgctggaagattctctcaaaaacatgctgtcagacaaagacccaatgctgggcagcgccagcaatcaattctgtctgccagtcttagacagcaacgatccaaattttcagatgccttgcagcactgtggtaggcctggacgacattatggacgagggcgtcgtgaaagaatctggtaatgacacaattgacgaggaggagctcattctgccgaataggaacctcagggataaggtggaggaaaattccgtgagaagcccacgcaagagtcctagactgatggcccaagaacaggttcgatcgctgcgccagagtacaatcgcgaaacggtctaatgcagcccctttgtcaaacacaaagaaggcttccgggaaaaccgtgtctactgcaaaagcgggtgtgaaacagcccgaaaggagccaggtcaaagaggaggtgtgcatgtccctaaaaccagaataccacaaggagaatcggcgttgtagccgcaactccggccagatcgaggtggtgcctgaggtgagtgtgagcagctcgcactcctccgtgagctcatgcctggagatgaaggatgaggatggactggattctaagcacaaatgcaataaccccggcgaaatagatgtgccaagtcatgagctcaactgctcattattgtccgagacttgtgtgacaatcggtgagaagaaaaatgaggccttgatggaatgtaaagctaaacccgtcggctctcccctgttcaaattctccgataaggaagagcacgagcagaacgacagtataagcggaaagactggcgagactgtcgtggaggaaatgattgctacacgcaaggttgagcaagacagcaaggaaaccgtgaaactctcacacgaggacgaccacatcctggaggatgcaggaagctctgatatctcctctgacgctgcctgcacaaaccccaacaaaactgagaacagcttggtcggcctccccagctgtgtggatgaagtgacagagtgtaatcttgaactgaaggatacaatggggattgccgataagactgagaacaccctggagcgcaataagattgagccactaggatactgtgaggacgccgagtctaatagacagttggaatcgacggagttcaacaaatctaacctggaggtcgtggacacgtccacattcggacccgaatccaatatcctagagaatgctatctgcgacgtgcctgatcagaattcaaagcagcttaacgccatcgaatccactaaaattgagagtcatgaaacagctaacctgcaagatgatagaaattcacagtcctcatccgtgagctacttagagagcaagtctgtcaagtcaaaacatacaaaaccagtcatccactccaaacaaaacatgaccactgacgctcctaagaagatcgtggcagcgaaatacgaggtgatacactccaagactaaagtcaatgtcaaatcagtgaagagaaataccgatgttccggagagtcagcagaatttccaccggcctgtgaaagtgcggaaaaagcagatcgacaaggagcctaaaatccagtcatgtaattctggggtcaaatctgttaaaaaccaggcccacagtgtgttgaaaaagacacttcaagatcaaacactcgtacagatcttcaagccactgacccatagcctgtctgacaagagccacgcacacccagggtgtttgaaggagcctcaccacccagcccagactggccacgtgagccattcaagtcagaagcagtgccacaaaccgcagcagcaagcacccgcgatgaaaactaatagtcatgtgaaggaagaactcgaacacccaggcgtcgaacactttaaggaagaagataaattgaaactcaagaagccagagaaaaaccttcaacctcggcaacgccggtcatctaagtctttttccttagatgagccccctctatttatccctgacaatatagccactatcagacgggagggttccgaccattcatcttcttttgagagcaaatatatgtggactccgagcaagcagtgtgggttttgcaaaaagccccatgggaacagattcatggtgggctgcggcagatgcgacgactggttccacggagattgcgtgggcctctcactgtcccaggcccagcagatgggcgaggaagacaaggaatacgtatgtgtgaaatgttgtgccgaggaggataaaaagaccgagatcctggatcccgatacgttagagaaccaggctaccgtcgagttccattctggcgacaagaccatggaatgcgagaagctcggactgagcaagcacaccaccaacgaccgcaccaaatatattgacgatacggtgaagcacaaggtaaagatcttgaagcgggaatcaggtgagggtaggaactcttcagattgtcgtgacaatgaaatcaagaaatggcagctggccccgctgaggaagatgggtcagcctgtcttaccgaggagaagcagcgaagaaaaatcagagaaaattcctaaagaaagcaccacagtgacctgcactggggagaaagcatcaaagcctgggacacatgaaaaacaggaaatgaaaaagaagaaggtcgagaagggcgtgcttaatgtgcaccccgctgcaagcgcttctaagccatctgccgatcagatacggcaaagtgtgcgccatagcctgaaagatattctgatgaagagacttaccgatagcaatcttaaggtccccgaggagaaggccgctaaagtagccacaaaaatcgagaaggaactgttttcttttttccgagacactgatgcaaagtacaaaaacaaataccgaagtctgatgttcaatctcaaggaccccaagaacaatatcttgtttaagaaggttcttaagggcgaggtgaccccagatcatctgattagaatgtcacctgaggaactggcatctaaggagttggctgcatggagacgccgggagaatcgccacaccatagaaatgattgagaaggagcaacgtgaggtggaacgccggcccataaccaaaataactcacaaaggggaaattgaaattgagtccgacgctcctatgaaagagcaggaggcggccatggagatccaggagccagccgcgaataagtcgttagaaaagcccgagggcagtgagaaacagaaagaggaagtggattccatgtccaaggatactacatcccagcacaggcagcacttattcgatctgaactgcaaaatttgcatcggccgcatggcgccccccgtggatgatctctctccaaaaaaggtgaaggtggtggtgggagtcgctcgcaagcacagcgataacgaggccgagagtattgccgacgccctgtcttccacctcgaatattctcgctagcgaatttttcgaggaggagaaacaagaatctcctaagtctacgttttcaccagcccccagacccgaaatgcccggcaccgtggaagtggagtcaacatttctggcccgcctgaacttcatatggaagggttttatcaacatgccttcagtggcaaaatttgtgaccaaggcctaccctgtgtctggcagtcctgaatatcttaccgaagatttgcccgactcaattcaagtcgggggtcgcatcagcccacaaaccgtatgggattacgttgagaaaatcaaggcgtctggaacaaaagagatttgtgttgtgcggtttactccagtcacagaggaggatcagatttcctatacgttgctctttgcctacttctcaagcagaaagagatatggagtcgctgctaataatatgaagcaggtaaaggacatgtacctgatccctctgggtgcaactgacaagattccccatcctctggtgccgtttgacggcccaggactcgaactgcaccgacctaatcttctcctgggcctgatcatcagacagaaactgaagagacagcatagcgcatgcgcttccacttcacacattgccgagactcccgagagcgcaccacctatcgcgctccccccggacaagaagtccaaaatcgaagtaagcactgaggaagctcccgaggaagagaacgacttttttaattccttcaccacggtactccataaacagaggaacaagcctcagcagaacctccaggaggacctgcccacggccgtagagcctttgatggaggtcacgaaacaggagccccctaagcctctcaggttcctccctggagttcttattggatgggaaaatcagcccaccacactggagcttgccaataagccactgcctgttgacgacatcctgcagtcgcttctcggaaccactggccaggtctacgatcaagcacagtcggttatggagcagaacaccgtaaaagaaatacctttcctgaacgagcaaacgaattctaaaatagagaagacggataacgtggaggtgacagatggagagaataaagaaatcaaggttaaggttgacaatataagcgagtccacagataagtcagcagagatagaaacttccgtggtaggctcctccagtatctccgcgggttcacttacgtccctctccctgcgcggaaaaccaccagacgtgagcacagaagctttcctgaccaacctctctatccagtcaaagcaagaggaaacagtggagtcaaaggaaaaaacgctcaagagacagctgcaggaagatcaggaaaataatctccaagataaccagaccagcaatagcagtccctgcaggtccaatgtgggcaagggtaatattgacgggaacgtctcctgtagcgagaacttggtcgccaatacagctcggtcaccacagtttatcaacctgaagcgagaccctcgccaggcagcggggcggagtcagcctgtgactacatctgaatcgaaggatggtgactcttgcaggaacggagagaaacacatgctaccaggccttagtcacaataaggagcacttaacggagcagataaacgtggaagaaaaactatgttcagctgagaagaactcctgcgtccagcaatctgacaatcttaaggtcgcgcagaactctccctcagtcgaaaatatccagaccagtcaagccgagcaggcaaagccactgcaggaggatatcctgatgcaaaacattgaaaccgtgcacccattccggagaggaagtgcggttgccacctctcactttgaagtaggcaacacctgcccgtccgagtttccatctaaatctattacattcacttcccggagcacctcgccccgaacctctactaacttttctcccatgcgcccccagcagcctaatttgcagcatttaaaatcaagcccaccaggattcccttttccagggccccctaattttcctccccagtctatgtttgggtttcccccccacctgcccccccccctgctcccgcctcccggatttggctttgcccaaaatcccatggttccttggccacctgtcgttcacctgccaggccaacctcagagaatgatgggtccactgtcccaggcaagcaggtacatcggtccccagaacttttatcaggtcaaggatattaggagacctgaacgccggcattccgacccttgggggagacaagatcagcagcagctcgacagaccattcaaccgtgggaaaggagaccgtcagcggttttattccgactcacatcacctcaagcgagagcggcacgaaaaagagtgggaacaggagagcgagaggcacagacggcgagacagaagtcaagacaaggaccgggatcggaaatcacgcgaagaaggtcataaggacaaagagcgtgccagattgtcccacggagaccgaggcaccgatggcaaagccagtcgggatagcaggaacgttgacaagaaacccgataaacccaagtccgaagattatgagaaggacaaagaacgagaaaagagcaaacaccgcgagggcgaaaaggatcgagatagatatcacaaagacagagaccatactgaccgcactaagagcaagagatag

SEQ ID NO: 128321 - DNA, 1098 bp, synthetic construct
  misc_feature 1..1098: note = Description of Artificial Sequence: Synthetic coding sequence
  source 1..1098: mol_type = other DNA
atgtcgagtagtgtcgagcaaaaaaagggccctactcggcagcggaagtgcggattttgcaagtccaatagggataaagagtgcgggcagctgctcataagcgagaaccaaaaggtcgctgcccaccacaaatgcatgctgttcagtagtgctctggttagctcccacagtgacaacgaatctctcggtggctttagtatcgaggatgtgcagaaggaaattaagcgcggcactaaactcatgtgttcattgtgtcactgccctggtgccactattgggtgcgacgtgaagacgtgccaccggacataccactaccattgcgctctgcatgataaagcccagattcgagaaaaaccctcgcaaggcatatatatggtttattgccgcaagcacaagaaaaccgctcataactcagaggcagatctggaagaaagcttcaacgagcacgagctggaaccttcctcacccaagagtaagaaaaagtcccgcaaaggcagacccaggaaaaccaatttcaagggcttgtctgaagatacccgttccacaagcagtcacggcacagatgagatggaatcctcctcctacagggataggtcccctcaccgcagcagccctagcgacaccagaccaaagtgtgggttctgccatgtgggggaggaggaaaacgaggccagagggaagctgcacatttttaacgccaagaaagccgcggcgcactacaagtgtatgctgttctcctctgggacagtccaactgacaaccacgtctcgggccgagttcggtgatttcgatatcaaaaccgtcctccaggagattaaacgtgggaaaagaatgaagtgcactctctgctcccagccaggggcgactattggctgcgaaataaaggcctgtgtaaagacgtaccactaccactgtggtgtgcaggacaaggccaaatacatcgaaaatatgtcgcgcgggatttataaactttactgtaaaaaccattcaggcaacgatgagcgtgacgaagaggacgaggaacgtgagagtaagagtagagggaaagtggagattgatcagcagcagttaactcagcagcagcttaacgggaattag

SEQ ID NO: 128322 - DNA, 975 bp, synthetic construct
  misc_feature 1..975: note = Description of Artificial Sequence: Synthetic coding sequence
  source 1..975: mol_type = other DNA
atgtcttcctctgttgagcagaagaaaggacccactaggcaacgaaagtgcggcttttgcaagagtaacagagacaaagaatgtggacagctgctaatttcagagaaccagaaggtggctgcccatcacaagtgcatgttgttctcctccgccctggtgagttcacatagtgataatgaaagcctgggggggttctccattgaagacgtgcaaaaagagattaaaagaggtaccaaactgatgtgttccttgtgccactgtccaggtgcaacgattggctgcgacgttaagacttgtcatcgcacataccattatcactgcgccctacacgacaaagcccaaatccgcgaaaaaccgagccaggggatttacatggtatattgcaggaagcataagaaaactgctcacaatagcgaggcggctgatctcgaggaatccttcaatgaacatgagttggaacccagctcccctaagagtaaaaagaaatccagaaaaggccgccctagaaagactaactttaagggactgtctgaggataccaggtccacctcctcccacggtaccgatgagatggagtctagcagttacagagataggtcgcctcatagatcctcgccctccgacactaggcccaaatgcggcttctgccatgtcggtgaggaggagaacgaggctagaggtaaacttcacatctttaacgccaagaaggccgccgctcattataagtgcatgctctttagcagcgggactgtacagttgacaactacttcccgtgcggaattcggcgacttcgatatcaagactgtgctccaggagatcaaacgcggtaagaggatgaaatgcactctttgctcacagcctggagcgacgatagggtgcgagatcaaggcatgcgtgaagacctaccattatcactgtggcgtgcaggataaggcaaagtacatcgagaacatgtcaagagggatctataaatag

SEQ ID NO: 128323 - DNA, 939 bp, synthetic construct
  misc_feature 1..939: note = Description of Artificial Sequence: Synthetic coding sequence
  source 1..939: mol_type = other DNA
atgtcttctagcgtggagcaaaagaaaggacctaccagacagaggaagtgcggattctgcaagtccaaccgcgacaaagagtgtggacagcttctgatatccgaaaaccagaaagttgccgcccaccacaagtgcatgctgtttagttccgccctagtttctagccacagcgacaatgaatctctgggtgggttttctatagaggatgtgcagaaggagattaagcgcggcactaagctgatgtgtagtttatgtcattgtccaggcgctacaatcggttgtgatgtgaagacctgtcataggacgtatcactaccactgtgcactgcatgacaaagctcagatacgggagaaacccagccagggcatctatatggtttattgtcgtaaacacaagaaaaccgctcacaactcagaagcagcagaccttgaggagagcttcaacgagcatgaactcgaaccctcatcacccaagtctaagaagaagtcccggaaaggacgccccagaaaaaccaacttcaagggcctgagtgaggatactcggagcactagcagccatggaacagatgagatggaatcaagtagctatcgcgatcggagcccccacagaagttccccttccgacactcgtccgaaatgtggcttctgccatgtcggggaggaagaaaacgaagcgcgaggaaaactgcatatctttaatgccaaaaaggctgcagcacattataagtgtatgctgttcagctccggcactgtgcaattgaccaccacctcacgcgctgagttcggggattttgatattaagaccgttttacaggagataaaaagagggaagagaatggtctgtagtttctacatctgttacgcaaccctgcacctgatttgctgctttaaatttcgcgttcacccaaagttcatccagtcttcggaaaacctcaagtag

SEQ ID NO: 128324 - DNA, 1098 bp, synthetic construct
  misc_feature 1..1098: note = Description of Artificial Sequence: Synthetic coding sequence
  source 1..1098: mol_type = other DNA
atgagctcaagcgtcgagcaaaaaaaggggcccacacggcaaaggaagtgtggcttctgcaagtctaaccgagacaaggagtgtgggcagcttcttatctcagagaaccagaaagtcgcagctcaccacaagtgcatgctgttcagttctgctctggtctcttctcattccgacaacgagagtctcggaggcttttccattgaagacgttcagaaggaaattaaaagaggaacaaagctgatgtgctcgctctgtcattgccccggcgcaacaattggctgtgatgtgaagacatgccatcggacctaccactatcattgcgcgcttcacgacaaggcacagattagagagaaaccatctcaggggatctacatggtgtactgtagaaaacacaaaaaaactgctcataactctgaagctgacctggaggagtctttcaacgagcacgaattggaaccgtcttcgcccaaaagcaaaaagaaatcaaggaaggggaggccacgcaaaaccaacttcaaggggttatcagaggacacaagaagcacttcgtcacatggcacggacgaaatggaatcctcgtcctacagagacaggtctcctcataggtcatccccttccgacacacgcccgaaatgcggattttgccacgttggggaggaggagaatgaggctagaggcaaattacacatcttcaacgctaaaaaagcggccgcccactataagtgtatgctgttttccagtggtacggtgcagctgacaactacttcacgggcagaatttggagacttcgatatcaagactgtcctgcaagaaattaaacggggtaagagaatgaaatgcaccctttgcagccaaccgggcgctacgatagggtgcgaaattaaagcctgcgttaagacctatcactaccattgtggagttcaagacaaggctaagtatatcgagaacatgtccaggggaatttataagctttattgcaaaaaccactccggaaacgacgagcgggacgaagaggacgaggaacgcgaatcaaaaagcagaggaaaggttgagattgaccaacaacagctgacccagcaacagctgaacgggaactag

SEQ ID NO: 128325 - DNA, 1101 bp, synthetic construct
  misc_feature 1..1101: note = Description of Artificial Sequence: Synthetic coding sequence
  source 1..1101: mol_type = other DNA
atgtcctcgtccgtggaacaaaaaaaaggcccgactcgacagaggaaatgcggcttttgtaaatcaaatagggataaggaatgcgggcagctgctcatctcagagaaccagaaggttgcagcccaccacaaatgcatgctgttctcctctgcattggtcagcagtcatagtgacaacgagtctctcggcggcttcagcatagaggacgtgcagaaggaaatcaagcgggggaccaagttgatgtgcagcctgtgccattgccccggagccactattggatgcgatgtgaagacttgtcaccggacttaccactaccactgtgccttgcatgataaggcccagattagagagaagcccagtcagggtatatacatggtctactgtcgtaaacacaaaaagaccgcacacaattccgaggccgccgatctcgaagagagcttcaatgagcacgagcttgagccgtcaagcccgaaaagcaagaagaaatccaggaaggggagaccgaggaagactaactttaaaggcctgtccgaggacactcgctctaccagctctcacggaacagatgaaatggaaagctcatcgtatagagatcgttcaccccacaggagcagccccagcgacacccgccctaaatgtgggttctgccacgtgggtgaagaggaaaatgaggctcgaggcaagttgcacatattcaacgctaagaaggctgctgcgcactacaaatgcatgctgttttcatccggaaccgtgcagctgacaactacctccagggcagagttcggggactttgacatcaaaaccgtgcttcaggaaatcaagcgcggcaaacgcatgaaatgcacactgtgcagtcaaccaggggccacaatcggctgcgaaataaaagcctgtgtcaagacatatcactatcactgcggcgtgcaggacaaggccaaatatatagagaatatgagccggggcatatacaaattgtactgcaagaatcattccggaaatgacgaaagagacgaagaggatgaggagcgcgagtctaagagtcgtgggaaagttgaaattgaccaacaacagctgacgcagcaacaattaaacggaaactag

SEQ ID NO: 128326 - DNA, 996 bp, synthetic construct
  misc_feature 1..996: note = Description of Artificial Sequence: Synthetic coding sequence
  source 1..996: mol_type = other DNA
atgtcctcttcagtagaacaaaagaagggcccgacgcggcagcgaaagtgtgggttttgcaaaagcaaccgcgacaaggagtgcggccagctccttatcagcgagaaccagaaagtggcggcccaccacaagtgtatgatgtgcagtctgtgccactgccccggggccacaattggatgcgacgtaaaaacgtgccacaggacgtatcattaccattgcgccctgcacgataaggcacagatccgtgagaaaccctctcagggcatttatatggtgtactgccgaaagcataaaaagacagctcacaactctgaagcggacctagaagagtcattcaatgaacatgagctcgagccatcatctcctaagtcgaaaaagaagtcccgtaagggacggccccgcaaaactaattttaagggcctctctgaagacactcgctccaccagtagtcatggaaccgacgaaatggaatcctcttcatacagagacagaagtccccacaggtcctctccaagtgatacaaggcccaagtgcgggttttgccatgttggagaggaagaaaatgaagctcgcggaaagctccacattttcaacgctaaaaaagcagcagctcactataagtgcatgctgtttagttccggcaccgtgcagctcaccacaacatcccgagcagaattcggcgactttgacatcaaaacagtgcttcaggagattaagaggggcaagagaatgaaatgcacgctgtgttcacagcccggagcaactattggctgcgagattaaggcatgtgttaaaacttaccattaccactgcggggttcaagacaaagctaagtacatcgaaaatatgtccagaggaatctataagttatactgtaagaatcacagcgggaatgacgagcgcgatgaagaggatgaggaaagagaatccaagagtcgcggcaaggttgagatcgaccagcagcagctcactcagcaacaattaaatggaaattag

SEQ ID NO: 128327 - DNA, 3075 bp, synthetic construct
  misc_feature 1..3075: note = Description of Artificial Sequence: Synthetic coding sequence
  source 1..3075: mol_type = other DNA
atggcctcagtcccggtttactgcctgtgccgcttgccatacgatgtcacaaggttcatgatcgagtgcgacatgtgccaggactggttccatggttcctgtgtcggggttgaggaagagaaggccgctgatatcgatctctaccattgtcccaattgtgaagtcctgcatggccctagtatcatgaagaaaaggcgcggaagctctaagggacacgacacccacaagggcaagcccgtcaagactggatcccccaccttcgtgagggagctcaggtcgaggacttttgactcctctgacgaggttatcctgaagcctaccgggaaccagctgacggtcgagttcctggaggagaattctttctcagtgcctatcttggttctgaagaaagacggattggggatgactcttcccagtccatcctttaccgtcagagatgttgagcactacgttgggagtgacaaggaaatcgacgtgatcgatgtcacccggcaggccgattgcaagatgaagttaggggatttcgtgaagtattactactctggaaaaagggaaaaagtattgaatgtgatttctctcgagttcagtgacacacgtctgtcaaacctagtcgaaacccctaaaattgtgcggaaactgagttgggtggaaaacctgtggcccgaagagtgcgtcttcgagaggccaaacgtccagaaatattgtttgatgtccgttcgggattcttatacggacttccatatcgactttgggggtacctcggtgtggtatcatgtgcttaaaggagagaagatcttctaccttataaggcctaccaatgcaaacctcacactgtttgagtgctggtcatcatccagcaaccagaatgagatgttttttggcgaccaggttgacaagtgttataaatgctcagtgaagcaaggacagactctgttcattcccacgggttggattcacgccgtgctgacgcctgttgattgcctggcctttggaggtaactttctgcacagcttgaatattgagatgcagttgaaagcctacgagatcgagaagcggctctcgacagcagatctgttccgcttcccaaacttcgaaactatctgctggtacgttggcaaacatatcctggatattttccgcgggttgagggaaaatcggcgccatcctgcatcgtatctggtgcatggtggcaaggccctgaacctggcttttagagcctggactcgcaaagaggccctccccgatcacgaagacgaaatcccagagacagtgagaacggtacagctgatcaaggacttggcgcgggaaatccgcctggttgaggacatattccagcagaatgtcgggaagactagcaacatttttgggcttcaaaggatctttcctgccggttctattccgctaacaaggcctgcccactcaacctcggtcagcatgtcaagactttcattgcccagtaagaatgggtccaaaaagaaaggactgaaacccaaggagttatttaagaaagccgagcggaaaggcaaagaatccagcgccctcgggcctgccgggcagctgagctataatttgatggacacctacagccatcaagcgctgaagacaggcagcttccaaaaagctaaattcaacattaccggtgcctgcttgaacgactcagacgatgacagtcccgacttagatttggatgggaatgagtctcccctagcactgctgatgtcaaacggatcaaccaagcgggtaaaaagtctatccaagtccaggaggactaagattgccaaaaaggtagacaaggctagattgatggccgagcaggtaatggaagatgaatttgatcttgatagtgacgatgagttacagattgacgagcgactcggcaaagaaaaggcgacgctgataatacgccccaaattcccaaggaaattaccaagagcaaaaccctgttcagatcctaatcgcgtgcgagagcccggcgaagtcgagttcgacatcgaggaggactatactacagatgaagacatggtcgagggcgtggaaggcaaactcggcaatggatctggagctgggggcatccttgacctgctcaaagcatcaagacaagtgggcggccccgattatgcagccctgacagaagcacctgcctctccgagcactcaggaggctatccagggcatgttgtgcatggcgaatctccagagctcaagttctagtccggctacaagttccttgcaggcctggtggacaggtggacaggaccgatcctccggaagttcctcttctggcctgggaactgtgagcaactcccccgccagccaaagaactcccggaaagagacctataaaacgcccggcgtattggcggacagaaagcgaagaggaagaagagaatgcgagtctggatgaacaagactcactgggggcctgctttaaggatgctgaatacatatatccctccctggagagtgatgacgacgaccccgcccttaaatcccgtccgaaaaaaaagaagaactctgatgatgcaccgtggtccccaaaggcacgagtaactcccactctgccgaaacaggatagacctgttcgtgagggaactagggttgcctctattgaaaccgggctggcagctgctgctgcaaagctcgcccagcaggaactccaaaaggcccaaaagaaaaaatatattaagaaaaagcccctcctgaaagaggtcgaacaacccaggccccaagactcaaatctgagcctgacagtgcccgcgcctacagttgccgctacgcctcagctggtcacgagctccagtccactgcctccgccagaaccgaaacaggaagcactgtccgggagcctggcagaccatgaatacactgccaggcctaatgcgttcggcatggcccaagcaaacaggagtacaacccccatggccccgggcgtctttcttacgcaacgaagaccatccgtaggatcccagtcaaatcaggccggccagggaaaacgtccaaagaaaggtttagcaactgcgaaacaacggttgggccgcattctgaaaatccacaggaatggtaaactactcttgtag

SEQ ID NO: 128328 - DNA, 2847 bp, synthetic construct
  misc_feature 1..2847: note = Description of Artificial Sequence: Synthetic coding sequence
  source 1..2847: mol_type = other DNA
atggcctccgtccccgtgtactgcctatgccgactcccatatgacgttactaggtttatgatcgaatgtgacatgtgtcaggattggttccacggaagctgcgttggagtggaggaagagaaagctgcagacattgacctctaccattgtccaaattgtgaggttttacatgggccgagtatcatgaagaagcgaagggggtcgtctaaaggtcacgatacgcataaaggaaagccggtcaaaacagggtcccctacttttgtgagggagctccgctcccggacctttgactcctctgacgaggtaatcttgaagccaaccggcaatcagctgacagtggagttcctagaggagaattcattttctgtcccaattcttgtccttaagaaggacggactcggcatgactttaccatctccctctttcacggtgagagacgtggagcattacgtgggcagcgacaaggaaattgacgtcatcgacgtcaccaggcaagcagattgcaagatgaagcttggggattttgtcaagtactactactccggaaaacgggagaaagtgctcaacgtgataagcctggagttcagcgatacaagattgagcaacttagtagagactccaaagatcgttcgcaaactgagttgggtagaaaacctatggccagaagaatgtgtgttcgagcggcccaacgtgcaaaagtactgcctaatgtcagtacgcgattcatacactgatttccatattgatttcgggggcactagcgtttggtatcatgtcttgaagggagagaagattttttacctgataagacccacaaacgccaatctgactctgtttgaatgctggtcttcatcaagcaaccaaaatgagatgtttttcggggaccaagtggacaagtgctacaaatgctccgtaaaacaaggccagacgctcttcatccccaccggctggatccacgccgttctaactccagtcgactgcctggccttcggcggcaattttttacactcactgaacattgagatgcagctgaaggcttatgagattgaaaagcgcctctcaaccgctgacctgtttcgattccctaacttcgagacgatttgttggtacgtggggaagcacattctagacatattccgaggactacgggagaatagacggcatcctgcaagttacttggtccatggagggaaagctctgaatctagcgttcagagcgtggacacgaaaggaggccttgcctgatcacgaagatgaaattcccgagacagttaggacagtgcagctcattaaggacctcgcccgggaaatcagactggttgagtttaatatcaccggagcttgtctgaatgattctgatgatgactcccccgatcttgacctcgatgggaacgagtccccattggctcttctcatgagcaatgggtccaccaagcgagtcaagtctcttagcaaatctaggaggactaagatcgccaaaaaggtggacaaggcgaggctcatggccgagcaggtcatggaagacgaattcgacctcgatagtgacgatgagctccaaatagacgagcgacttggcaaggagaaagccacactgatcataaggcctaaatttcctcggaagctgcccagggccaagccatgctccgaccctaaccgggtaagggaacctggtgaggtcgaatttgacattgaagaagactacacaacagacgaggacatggtcgaaggagtagaaggcaagttagggaacggaagtggcgctggcggcattttggatcttctcaaggccagtagacaggtggggggcccagattacgctgctctcaccgaagcacccgcttctcccagtacccaagaggccatccagggcatgttgtgtatggcaaacttacaaagttcctctagcagccctgccacgagttcattgcaggcatggtggacaggaggccaggaccgctcttcaggctcaagctccagcgggcttggtacggtctctaatagccccgcatcacagcggaccccgggcaagcggcccatcaaacggcctgcttattggcgaacggaaagcgaagaggaggaagaaaatgcgtcccttgatgagcaagactccctcggtgcatgtttcaaggatgcagagtatatctatccctctttagagtccgacgatgacgacccagccctgaagagcaggcccaagaagaaaaaaaactcagatgacgccccatggtcacctaaggccagagtcacccctactcttccaaaacaagacaggcccgtgcgggaggggacccgagtcgccagcattgaaacagggctggcagccgccgcggctaagcttgcccagcaggaactgcagaaagctcagaagaaaaagtatattaaaaaaaaaccactgctgaaagaagtggaacaacccagaccacaggactccaacctgtcactcacagtgcccgcccccacagtggctgcgacccctcagctggtaacctctagtagtcctctgcctcctcctgaaccgaaacaggaagcactgtcaggaagtttggccgaccacgagtacacagctcgacctaacgctttcggaatggcacaggctaaccggtccacgacgcctatggctccgggcgtcttcctgacccagcgccgtccctctgtcgggagccagtctaatcaggcagggcagggcaaacgtcccaagaagggattggccacggccaaacagcgtttgggccggatcctaaaaattcacagaaatggtaaactcttgttgcggcaggtaattgtgcaggccgaatgtaggcaggccatccatgaacccaagttgaagagacgtgacgcacacccttag

SEQ ID NO: 128329 - DNA, 3183 bp, synthetic construct
  misc_feature 1..3183: note = Description of Artificial Sequence: Synthetic coding sequence
  source 1..3183: mol_type = other DNA
atgaataggtcacgagcgattgtgcaacggggccgggtactgccccctcccgccccccttgacactaccaaccttgcaggcagaaggactttgcagggtagggccaagatggcgtcagtccccgtgtactgcctctgcaggctcccttatgatgtcactcgctttatgatcgaatgcgacatgtgccaagattggtttcacggctcctgcgtgggtgtggaagaggagaaggcggcggacatcgacctgtatcactgcccaaattgcgaggtccttcacgggcccagcattatgaagaaacgccgaggctcctcaaagggacacgatacccataaaggaaagccagtcaagactggttcccccacctttgtacgagagctcaggtctcgaaccttcgactcgagcgatgaggtcattctgaagcccactggcaaccagcttacagttgagttcctagaggagaattcattcagcgtgcccattctggtgctcaagaaggacggcttaggtatgaccctgccaagtccctcattcactgttcgcgatgtggagcactacgtgggatccgataaggagatcgatgtaatcgatgtcacacgccaagccgattgcaaaatgaagttgggcgactttgtgaagtactactatagtggaaagcgagagaaggtactgaatgtgatctcgctggagttctctgacacacgcctgtctaatctggttgaaacacccaagatcgttaggaaacttagttgggtggaaaatctgtggcctgaagagtgcgtattcgagcggcccaacgtccagaagtattgtctcatgagtgtgagagacagttacaccgacttccacattgattttgggggaacgagcgtttggtaccacgtactgaaaggagagaagatcttctacctaataagacctaccaacgctaacctgactctatttgagtgctggtcttcttctagcaatcagaacgagatgtttttcggggaccaggttgacaagtgttataagtgcagcgtgaagcagggtcagacccttttcatcccaacgggctggatacatgctgtgctgactccggtcgattgtctggctttcggggggaatttcctgcattctcttaacatcgagatgcagctgaaagcatacgagattgagaagaggctctcaacggccgacctgttccgcttccctaactttgaaaccatctgctggtacgtgggcaaacacattttggatatctttcggggcctgcgggaaaatcgccgacatccagcctcgtacctggtgcacgggggcaaggcactgaacctggcctttagagcttggacaagaaaagaggccctgcccgatcatgaggacgaaatacccgaaaccgtacgcaccgtgcagttgataaaggacctcgcccgagaaatccgcctcgtcgaagatattttccaacaaaacgttggaaagacatctaatatttttgggttacagcgcattttcccagctggcagcatcccactcaccaggcctgctcattcgacaagtgttagcatgtctcgactctctctgccatcaaagaatggcagcaaaaaaaagggcctaaagccaaaagaactgtttaaaaaagctgagaggaagggtaaagagagcagtgcactcgggcccgccggtcaacttagctacaacctgatggatacctacagccaccaggctctcaagaccgggtctttccagaaggcgaagtttaacattaccggcgcatgtttaaatgattccgatgatgacagccccgacttggacctcgatggtaacgaaagtccactggcgctgttgatgagtaacggctctactaagagggtaaaatctctttcgaaaagccgacgaactaaaatcgctaagaaagtcgataaagctagactgatggcggaacaggtgatggaagatgagttcgacctggattcagatgatgaattacaaattgacgagcggctggggaaggagaaagctaccctgattattaggccaaaattcccccgcaagctgcccagggcaaaaccttgcagtgacccgaacagggtgcgggagcctggagaagtggagttcgacattgaagaagactacaccacagacgaagacatggtggagggagtggaaggtaaactcgggaacggaagtggtgcgggtggcatcttggatctgctaaaggccagtcgacaggtcggcggccctgactacgcggccctgactgaagccccagcctcccctagtacccaggaggctatccagggcatgctctgcatggctaacctccagtcaagtagtagttctcccgcaacttcgtctcttcaggcttggtggacaggcgggcaagaccgtagcagcggctcttcctcatccggcttgggcactgtgagtaactctcctgccagccaacggacccctggcaaaaggcccatcaaaaggcccgcatactggcgaactgaatctgaggaggaggaagagaatgcctccctggatgaacaggattctttgggcgcatgttttaaagatgctgagtatatctacccttccctggagtcagatgacgacgatcccgccttaaagagtcggccaaaaaagaagaaaaattccgatgatgcaccatggtcgcctaaagctagagtcactccgaccctgcccaaacaggaccgtcctgtacgggaggggactagagtggccagtatagagactggactggcagctgcagccgccaaactggctcagcaagagctgcagaaagcccagaagaaaaagtatattaagaagaagccacttctgaaggaagtcgaacagcccagaccccaggacagcaatttgtctctgacagtgcccgcccctacggttgctgctacccctcaactcgttacctccagcagtcctttgcctccgcccgaacctaagcaagaggccttatctgggagtttggctgatcacgaatacacagctagacccaacgcctttggcatggcgcaagctaatcgctcaacaacacctatggcgcccggggtctttttaacacagcggcggcctagtgtcggctcgcaaagcaaccaggctgggcagggcaagcgcccaaaaaaagggctcgccaccgctaagcagcggctcgggcgaatcttaaagatacaccggaacggtaagctcctgctgtag

SEQ ID NO: 128330 - DNA, 912 bp, synthetic construct
  misc_feature 1..912: note = Description of Artificial Sequence: Synthetic coding sequence
  source 1..912: mol_type = other DNA
atggatacctatagccatcaggcactcaaaacaggttccttccagaaagccaaattcaacatcaccggggcatgcctgaatgattccgacgacgattctcctgacctcgacttagacgggaatgagagccctctggcactcctgatgagcaacggaagtaccaagcgtgttaagtcactgagcaaatccaggaggactaagatcgctaaaaaggttgataaggcgagattgatggctgaacaggtaatggaggacgagttcgacttggacagcgacgatgaactccaaatcgacgaacgtctagggaaagaaaaagctacattaattatccgaccaaagtttcccaggaagctcccgagggccagtctggctctcacacctactgaatttgttaaccaggagaagctgtcccttacgcttaggcgcacaattcagcaaatgagaacttggtggaaaggactgaaggcgtctctgggcatggtggtggccctggttgcattcctcatttgctcccggcctgctggacggtggggcgatttaaccatgctgccttctccccgcccccagctgctgccggcccttcgaaggccgagtcgcgcctgttgtgcttggcctacctgctcaccccacaggccgcacagattacccctggcatgtcgacccggcggtctgggagacaggattgaagcagtaggtgccccggcggtgggctgggctcagtgcctcaccgtcctgctcccatcagctcctcagggtagcggacctagttctgggcaacacaccggtgaaccaagggcccgtcgaaggcgccgaacacctgtttggatgaaccggacagcgtgggaacgggcatctcgaatgcaatccatttctattctccattggtccctgatgatgatgaccctgctctag

SEQ ID NO: 128331 - DNA, 2862 bp, synthetic construct
  misc_feature 1..2862: note = Description of Artificial Sequence: Synthetic coding sequence
  source 1..2862: mol_type = other DNA
atagtgcagagaggccgggtgttacctccacccgcccccctcgatactactaacctggcaggccgcaggactctgcaaggccgagcaaaaatggcttccgtgcccgtgtactgtctgtgccggctcccgtatgacgtcacaagatttatgatagagtgcgatatgtgccaggattggttccacggctcgtgtgttggtgtggaggaggagaaagctgctgatatagacctgtaccattgccctaattgcgaagttctgcacgggccatcgattatgaagaagcggcgaggatcgtccaaaggacacgacactcataagggcaagcctgtgaagacaggtagtccaaccttcgtccgcgaattaagatcgagaacgttcgactcttctgatgaggtaatactgaagcccaccgggaaccagctcacggtggagtttctggaggagaactcttttagcgtccccatcttggtacttaagaaagacggcctgggcatgaccctgccaagtccctccttcaccgtccgcgacgttgagcactacgttggttcagacaaagagatcgatgtgatcgatgtcacacgacaggctgactgcaaaatgaaactcggcgacttcgtgaagtattactactcaggcaagagggaaaaggtgctcaatgtgattagcctggaattttctgatactcgcctatcaaaccttgtagagaccccgaagattgtccgcaaactttcctgggtcgagaacctctggccagaagagtgtgtgtttgagcgtccaaacgtgcaaaaatattgccttatgtccgtgcgggacagctacacagacttccatatcgatttcggaggaacttcagtctggtaccacgtgctaaagggggaaaagattttttatctgatccgaccaaccaacgcaaacctgacgttattcgagtgctggtccagctcatcaaatcagaatgagatgttttttggggaccaggtggataaatgttacaaatgctcagttaagcaggggcaaactctctttattccaactggctggatccatgccgtattgacgcccgtcgattgcttggcctttggaggcaatttcctgcatagtcttaacatagaaatgcagctcaaggcttacgagattgaaaagcgtctgagtactgcagacctgttccgcttccccaatttcgaaaccatatgctggtatgtcggtaaacacatcctagatatctttagggggctgcgggaaaacaggcgccatccggctagctacctggtccatggagggaaagcccttaacttggcctttcgggcctggactagaaaggaggccctgccagatcacgaggacgaaatccccgagacagtaaggactgtacaattgataaaagacctggcaagagagattagactggtggaattcaacattaccggagcatgcctcaatgattccgatgacgacagtccagacttagacttggacggcaacgagagtccgctcgctctactaatgtctaacggctccacaaagcgggttaagtccctgtcgaaatcacgtagaacaaagattgctaaaaaagtggacaaggccaggctgatggccgagcaagtcatggaagacgagttcgacttggactctgatgacgaactacagatcgacgaaaggctaggcaaggagaaggccacccttatcatccgccccaagtttccgaggaaactcccgagagccaaaccttgttcagatccgaaccgagtacgcgagccaggggaggtggagtttgatatcgaggaggattacaccacagatgaggacatggttgagggagttgagggtaagctcgggaacgggtctggagccggtggcattctggacctgctgaaagcgagcaggcaggtcggaggacctgactacgctgctctgacagaagctcctgcctctccttcgacccaggaagcaatccaaggcatgctgtgtatggcaaacctgcagtcatctagcagctcgcctgcaacctcctcgctgcaggcttggtggaccggtggacaggatcgctcctctgggtcatctagttctggattgggcaccgtttccaactcacccgcctcccaacgcacacctggcaagcgaccaataaagcgccctgcctactggcggaccgaatctgaggaagaagaggagaacgcttccctggacgagcaggactccctgggtgcttgtttcaaggacgcggaatatatttatccctctctagagtccgatgatgacgaccctgcactcaagagcaggcccaaaaaaaagaagaattctgacgatgctccgtggagccccaaggctagagtgacccccacactgccaaaacaggatcgcccggtgcgagagggaacgagggtggcgtcgattgaaacaggcttggctgcagcagcagccaagctggcccaacaggagctgcagaaagcccaaaagaagaaatacatcaagaagaagcccctgcttaaggaagtggagcagcccaggccacaggattccaacctatctctcacagtccccgcccccaccgtggcggctacccctcagctggtaacctccagcagcccgctgccccctcctgaaccgaaacaggaagcactgagtggaagtttagccgaccatgagtatacggcccggccgaatgcgttcggcatggcgcaagcaaatcgtagcactaccccaatggctcccggagttttcctcacccagcgtcgtccttccgttggcagtcagtctaatcaggcaggtcagggaaagcgccctaaaaagggcctggctaccgccaaacaacggttagggcggattctcaagatccatcggaacgggaagctgttactgtag

SEQ ID NO: 128332 - DNA, 345 bp, synthetic construct
  misc_feature 1..345: note = Description of Artificial Sequence: Synthetic coding sequence
  source 1..345: mol_type = other DNA
atggcctcagttcccgtttactgcctttgcagacttccctatgacgtgactaggtttatgatcgaatgcgacatgtgtcaggactggtttcacggaagctgcgtaggcgtggaggaggagaaagcggctgatatcgatctgtatcattgcccaaattgtgaagtgctgcacggtcctagtattatgaaaaaacgaagaggcagttctaaaggacacgacactcacaaaggcaaaccagtgaagacaggctctccaacctttgttagggagctgaggtcaaggacgttcgatagcagtgatgaggtgattctgaaaccaaccgggaatcagctcacagtagagtag

SEQ ID NO: 128333 - DNA, 381 bp, synthetic construct
  misc_feature 1..381: note = Description of Artificial Sequence: Synthetic coding sequence
  source 1..381: mol_type = other DNA
atggcctccgttccagtgtattgcctgtgtcgactcccctatgacgtgacacgtttcatgatcgagtgtgacatgtgtcaggactggttccatggatcttgcgtgggagttgaggaggagaaggcagccgatatcgatctctatcactgtcccaactgcgaagttttgcacggcccttcaatcatgaaaaagagacgcggcagcagcaagggtcacgacactcacaaaggcaagcctgtgaagactgggtcaccaaccttcgtgcgggaactccgctctagaactttcgattccagcgacgaagtcattctaaagcccaccgggaatcaactgacagtggagttcctggaagagaactcttttagcgtgcctatcctgtag

SEQ ID NO: 128334 - DNA, 294 bp, synthetic construct
  misc_feature 1..294: note = Description of Artificial Sequence: Synthetic coding sequence
  source 1..294: mol_type = other DNA
atggcttcggttcccgtgtattgtttgtgtagactaccctacgatgtcacgaggttcatgattgaatgtgatatgtgtcaggattggtttcacggctcatgcgtcggcgtagaggaagaaaaggccgccgacatcgatttgtatcattgtcccaattgcgaggttctgcacggcccctctatcatgaagaagaggagaggctcctctaaggggcatgacacccataagggtaagcctgtgaagaccggctcgcccacattcgtgagagagctgagaagccgcacttttgattag

SEQ ID NO: 128335 - DNA, 348 bp, synthetic construct
  misc_feature 1..348: note = Description of Artificial Sequence: Synthetic coding sequence
  source 1..348: mol_type = other DNA
atggcatctgtacccgtttattgtttatgcaggctgccctacgacgtcacaagattcatgattgagtgcgacatgtgccaggattggttccacggctcttgtgtgggcgtggaagaggagaaggctgctgacatagatctctatcactgcccaaattgcgaggtcctgcatggcccaagtatcatgaagaaacgcagaggtagctccaaagggcacgacacccacaaaggtaagcctgtcaagaccggctccccaacttttgtgcgcgagctcagatcccgtacctttgactcatctgacgaagttattctcaagccaactggcaatcagctaacggtggaattctag

SEQ ID NO: 128336 - DNA, 294 bp, synthetic construct
  misc_feature 1..294: note = Description of Artificial Sequence: Synthetic coding sequence
  source 1..294: mol_type = other DNA
atggccagtgtgcccgtatactgcctctgtaggttaccgtacgatgttacccgatttatgattgaatgcgatatgtgtcaggattggttccacggctcctgtgtcggagtggaagaagagaaggcagccgacattgatctgtaccactgtccaaattgcgaggttctccatggcccctccataatgaaaaaaaggcgcggaagcagcaagggacacgacacacacaaagggaagccggttaagactggaagccctactttcgtgagggagttgagatctcggaccttcgactag

SEQ ID NO: 128337 - DNA, 447 bp, synthetic construct
  misc_feature 1..447: note = Description of Artificial Sequence: Synthetic coding sequence
  source 1..447: mol_type = other DNA
atgaacaggtccagagcaattgtgcagcgagggcgggtgctgcccccacccgcaccacttgacactactaacttagcaggcaggcggacactgcaagggagggcaaagatggcctccgtgcccgtctactgcctctgtaggctgccatatgatgtcacgcgcttcatgatagaatgcgatatgtgtcaagattggtttcacggaagctgtgtgggagtcgaagaagagaaggcagctgatatcgacttgtatcactgccctaactgcgaggtcctgcacggaccatctattatgaagaaaaggcggggctccagtaaaggacacgatacccacaagggcaaacctgtaaagaccggctctcccaccttcgttcgggagctgcgttcaaggacattcgattcctctgacgaggtcatcctgaaaccgacaggaaaccaactcacgtag

SEQ ID NO: 128338 - DNA, 2637 bp, synthetic construct
  misc_feature 1..2637: note = Description of Artificial Sequence: Synthetic coding sequence
  source 1..2637: mol_type = other DNA
atggccagcgtccccgtttactgcctgtgtcggttgccatacgacgtaacccgattcatgatcgagtgcgatatgtgccaggattggttccacgggtcctgcgttggtgtcgaggaggaaaaggcggccgatatcgatctgtaccactgtcccaattgcgaggtattgcacggtccaagtatcatgaagaaaaggaggggaagttcaaaagggcatgacacccataagggaaagccagtgaaaacagggtctcccacatttgtaagagagctgagatcccgtacctttgacagttctgatgaagtcatcctgaaacccaccggcaatcagctgaccgtcgaattcttagaagaaaactcattttcggtgcccattttggtgctgaaaaaagacgggcttggaatgacgttgccctccccaagcttcaccgtgcgggatgtggagcattacgttggatctgacaaggaaattgacgtaattgatgtcactcgacaggcagactgcaagatgaagcttggcgacttcgtgaaatattattactcagggaagcgcgaaaaggtcctgaatgttatctctctggagttctcagataccaggttgagcaatctcgtcgagacaccaaagatcgttcgaaagttgtcatgggtagagaacctatggcctgaggagtgcgtctttgaacggccaaacgtgcagaaatactgcctgatgagcgtgcgggacagctacacagatttccatatagatttcggggggactagtgtgtggtaccacgttttgaaaggggaaaagattttctacctgatacgccccacaaacgcgaacctgacactgttcgagtgttggtcctctagctcaaatcagaacgagatgttctttggagatcaagtcgataagtgctacaagtgcagcgtcaagcaggggcaaaccctctttatcccaactgggtggatccatgcggtgcttactcctgttgattgtctcgcctttgggggtaatttcctgcactctcttaacatcgagatgcagctgaaggcatacgagattgaaaagcgtctgtccacagctgacctctttaggtttcctaatttcgagaccatttgctggtacgtcggaaaacatattctggatatcttcagggggctcagagaaaacagaagacaccccgcaagctaccttgttcatgggggcaaagctctaaatcttgcatttcgggcctggacacgtaaggaggcactgcccgaccatgaggacgagatccctgaaacggtgcggaccgttcagttgataaaagacttggcacgtgaaatcagactcgtcgaggacatatttcagcaaaacgttggcaagactagcaacattttcggccttcagaggatattcccagctggatcaattcccctgacccgacccgcccatagcacgtccgtgagtatgtcccgtctctccttgccgagtaaaaacgggagcaagaagaagggcctgaagccgaaggagctgtttaagaaggctgagcggaagggtaaagaatcgtctgctctcggccccgcaggacagcttagctataacctgatggatacctacagccaccaggcactgaagactggatcgttccagaaggcaaaattcaacatcaccggggcatgtctgaatgattcggatgatgatagccctgacctagatctcgacggcaacgaatcaccacttgctctcttgatgtctaacgggagcacaaagcgggtcaaaagcctcagtaagtcccggcggacaaagatagctaaaaaagttgataaggcaagactcatggccgaacaagtgatggaagatgagtttgacttggactccgacgacgagctccaaatagacgaaaggcttggaaaggagaaggccactctgatcatccgaccaaagtttccacgcaaactccctagggctaaaccctgctcagaccccaatcgagtccgagagcctggcgaggtggaattcgatatcgaagaagattatacaactgacgaagatatggtggaaggggtggagggttatcagacagctacacccgcccccgcccaaggcgcttccgaagcccctgcgtctcccagcacgcaggaagcgattcagggtatgctgtgtatggccaatctacagagctccagcagtagccctgccaccagcagcctgcaggcctggtggaccggcgggcaagatagatcaagcggctccagcagctccgggctcgggaccgtatccaacagtccagcatctcagcgaacaccgggcaaaagacccataaagcgccccgcctactggcggaccgagagtgaggaggaggaagagaacgccagtctggatgaacaggactccctcggggcatgcttcaaagacgccgagtacatctatccctcactggagtctgatgatgatgatccggccctcaaaagccgacccaagaagaaaaagaatagcgatgacgccccgtggagcccaaaggcgcgggttactccgaccctccccaaacaggatcgccctgtccgagagggtacgcgcgtagcatcaatagagacaggtctggctgcagcagctgctaaactggcccagcaggtgaagaagatgaagctgagcctaactgacagcggatag

SEQ ID NO: 128339 - DNA, 417 bp, synthetic construct
  misc_feature 1..417: note = Description of Artificial Sequence: Synthetic coding sequence
  source 1..417: mol_type = other DNA
atgaaactccccatttttatcgctgacgccttcactgctagggctttccgcgggaaccccgccgccgtgtgcctactggaaaatgagctggatgaggacatgcatcagaaaattgcgcgcgagatgaatctaagcgaaacagcttttattcgaaagctccatcccaccgataattttgctcaaaagaatatgaatagtactctcacctttgtgacgctgtccggcgagcttcgggcgcgccgagcggaggacgggattgtccttgacctgcccttatacccggcccacccccaggattttcatgaagtcgaggacctgattaagacagcaatcgggaacacactggtgcaggacatttgctactctcccgatacccagaaactcctggtgaggttgagcgatgtgtacaaccgctag

SEQ ID NO: 128340 - DNA, 867 bp, synthetic construct
  misc_feature 1..867: note = Description of Artificial Sequence: Synthetic coding sequence
  source 1..867: mol_type = other DNA
atgaagctgccaatttttatcgccgatgcttttacagcaagagctttcagagggaaccccgctgccgtctgcctgctcgaaaatgaattggatgaggacatgcaccagaagatcgcaagagaaatgaatctgtccgaaaccgccttcatcagaaagctacatccaactgataatttcgctcagtcctcctgcttcggcctccgttggttcactccggcgtctgaggtgcctctgtgcgggcacgcaacactggccagcgccgccgtcctttttcataaaatcaaaaacatgaacagcacacttacattcgtcacactctcaggcgagctcagagccaggcgggctgaggacgggatcgtgttggacttgccgctctatccagctcaccctcaggatttccatgaagtcgaggatctgattaagacagcaatcggtaataccctcgttcaggatatctgctattctcctgatacgcagaaattgcttgtcaggctgtccgatgtttacaataggtccttcctggagaacctgaaagtgaataccgagaatcttctccaagtcgagaatactggaaaggtgaaggggttgatcctgaccctcaaaggagagccaggtgggcagacccaggcttttgacttctactctcgatacttcgcaccctgggtcggtgtggcagaggacccggtaactggatcagctcacgcagtgcttagcagttattggagtcaacacttaggcaagaaagaaatgcacgcctttcagtgtagtcataggggaggagaactgggaatttccctgcggcctgatggaagagtcgatattcggggcggcgcagccgtcgtactcgagggcaccctgaccgcttag

SEQ ID NO: 128341 - DNA, 768 bp, synthetic construct
  misc_feature 1..768: note = Description of Artificial Sequence: Synthetic coding sequence
  source 1..768: mol_type = other DNA
atgcatcagaaaatcgcgcgagaaatgaacctcagcgaaactgcctttatccgcaagctccaccccaccgataatttcgcccaaagcagctgttttgggctgagatggttcacaccagcctcggaggtcccactctgtgggcacgccacactcgctagcgcggctgtgttattccacaagattaaaaatatgaattctactctgacttttgttaccctgtcgggcgagctcagggcccgccgcgccgaggacggcatcgtcctggatctgcctttataccccgcacaccctcaagactttcacgaggtcgaggaccttattaaaaccgctataggtaacaccctcgtgcaggacatttgttattcaccagacactcagaagttgctggtgagactgtccgatgtgtacaataggtctttcctcgaaaacctgaaggtcaacacagagaacctgctgcaggtcgagaatacgggtaaagtgaagggcctgattctgactctcaaaggcgaaccaggaggacagacacaagccttcgacttctacagtaggtactttgccccatgggtgggggtcgccgaggaccctgtgacaggatcagcccacgctgttctgagctcttactggagccagcacctcggcaaaaaagaaatgcacgcattccaatgtagccaccgcggcggggaattggggattagcctccgccccgacggcagagtggatatcagagggggtgccgcagtcgtactcgagggcacattgaccgcctag

SEQ ID NO: 128342 - DNA, 867 bp, synthetic construct
  misc_feature 1..867: note = Description of Artificial Sequence: Synthetic coding sequence
  source 1..867: mol_type = other DNA
atgaagttgccaatctttatcgccgacgccttcaccgctcgcgctttccgcgggaatccagctgctgtgtgcctgttggagaacgaactggatgaagatatgcaccagaagatagcccgagagatgaacctgtcagagaccgccttcattcgaaagttacatccaaccgataactttgcccagtccagttgttttggcctcaggtggttcacccccgcaagcgaagtgcctttgtgtggccacgcgacactggcctcggccgcggttctgtttcataagatcaagaacatgaactccactctgacctttgtcacattgtcaggcgaactcagagcacgtagagcagaggacggaatcgtcctcgatctcccactgtaccctgcccatcctcaggactttcacgaagtcgaggacctcatcaaaactgccatcggtaatacactggtgcaagacatctgctattcccctgatacccagaagcttttagtgcgtctgagcgacgtctataatagatccttcttggagaacctgaaggtcaacacagagaacttgttgcaggtggaaaatacaggaaaggtaaagggactaatcctgactctcaagggggagcctggcggccagacccaagccttcgatttctacagtcgctactttgctccgtgggtgggggtggcggaagatccagttacaggaagtgcccacgccgttctgtctagctactggtcccaacatctgggcaagaaggaaatgcatgccttccagtgctcccaccggggcggagaactcggaattagccttagacctgatggccgcgtggacattcgtggcggggccgctgtggtgcttgagggaaccctcacagcatag

SEQ ID NO: 128343 - DNA, 843 bp, synthetic construct
  misc_feature 1..843: note = Description of Artificial Sequence: Synthetic coding sequence
  source 1..843: mol_type = other DNA
atgaagctgcctatctttatcgctgacgcatttacagctagggcatttcgggggaaccctgccgctgtgtgcttgttagagaacgagctggatgaggatatgcatcagaagatcgcccgtgagatgaatcttagtgaaacagctttcattcgaaagcttcaccctacggacaatttcgcccagtccagttgctttggtctaagatggtttacccctgcaagtgaagtccctttatgtgggcatgccacacttgcctcagccgccgtgctgtttcataagatcaagaacatgaacagcactctgaccttcgtgacattgagtggcgagctccgtgctcggagagcagaggacggtatcgtgctggatctgcccctctacccggcacaccctcaagacttccacgaagtcgaggacctgataaagaccgcaattggaaataccctggttcaggatatttgctactccccagacacacagaagctcctggtcaggctgagtgacgtgtataataggtccttcctagagaacctcaaagtcaacaccgagaacctcctacaggtcgaaaatacgggcaaggttaagggactcatcctcacactaaaaggcgagcccggaggtcaaacccaggcctttgatttttacagcagatatttcgctccctgggtcggggtggccgaggaccccgtcaccggcagtgcgcacgctgtcttgtcatcgtactggtcgcaacacctgggtaagaaggagatgcacggccgaacagcgctgtaccagtttttgttctatctgccaaactcaaaactggtgtttctcctgatatgtactatccctttgaagatgtag

SEQ ID NO: 128344 - DNA, 1356 bp, synthetic construct
  misc_feature 1..1356: note = Description of Artificial Sequence: Synthetic coding sequence
  source 1..1356: mol_type = other DNA
atggtaggcagcgccctgcgacggggcgcccatgcctacgtgtatctcgtgagtaaggcctctcatatctcccgcggccaccaacaccaagcctgggggtccaggccacctgctgccgagtgcgctacacaacgggctcccggctccgtcgtggagctgctggggaaatcgtacccacaagacgatcactctaatctaacacggaaggtgctgacacgcgtcggtcggaacctgcacaatcaacagcatcatccactatggctgattaaggagagggtgaaggagcatttttacaagcaatacgtggggcggttcggtactccactgttcagcgtgtatgacaatctcagccccgtggtgacgacatggcagaatttcgattcgcttctgatccccgccgaccatccctcccgcaagaaaggcgataattactacctcaataggacacacatgctgcgggcccatactagtgcccaccagtgggatctgttgcacgcggggcttgatgcatttctggtcgtcggtgatgtataccggagagatcagatagatagtcagcactacccaatatttcatcagctggaggccgtgcggctgttcagtaaacatgagctgttcgccggtatcaaggatggggagagcttgcaactgttcgagcaaagctcccgctcagctcataaacaggaaacgcacacaatggaggctgtcaagttggtcgaattcgatctaaagcaaactctgacacgcctcatggcacacctgttcggagacgaactggagatccgctgggtagactgttattttccgtttacccaccctagctttgagatggagatcaacttccacggcgaatggctggaggttttagggtgtggggtgatggaacaacagctcgttaactccgcaggcgcgcaagatagaatcgggtgggcctttgggctgggactcgagcgcctcgcaatgatcctgtacgatatcccggacatacggcttttttggtgtgaggatgagcgctttttgaaacaattttgcgtgagtaacattaatcaaaaagtgaagtttcagcctctgagcaagtatcccgccgttatcaatgatataagcttctggctgccgagtgaaaactatgccgagaacgatttttacgatctcgtgcggaccatcggcggcgacctggttgagaaggtggatctgattgacaaattcgttcacccgaagacccataaaacttctcattgttaccggataacttatcggcacatggagcggacattaagtcagagagaggtgagacatatccaccaagctttacaggaggccgccgtgcagttgctgggagtggaaggaaggttttag

SEQ ID NO: 128345 - DNA, 1356 bp, synthetic construct
  misc_feature 1..1356: note = Description of Artificial Sequence: Synthetic coding sequence
  source 1..1356: mol_type = other DNA
atggtggggtccgcccttcgaagaggcgctcacgcttacgtgtaccttgttagcaaagcttcacacatctctcgcggccaccaacaccaggcctgggggtcacggcctcctgcagcggaatgtgccacccaaagggcccccgggagtgtggtggagctgctgggtaagagctatccacaggacgaccatagcaacctgacacgcaaagtcctgactcgggtgggtaggaacctgcataaccagcaacatcacccactatggcttatcaaggaaagggtaaaagagcacttctataagcagtacgtcggccgcttcggcacgcccctgttttccgtgtatgacaacctatcacctgttgtgaccacgtggcaaaacttcgattccctgctgatcccagcagaccacccttcaagaaaaaaaggggacaactactatctgaacagaactcatatgctgagagctcacaccagcgcacatcaatgggatctgctgcacgccggcctggacgccttcctggtcgtgggcgacgtatatcggcgtgaccagatcgacagccaacactacccgatcttccatcagctggaggcagttagattattcagtaagcacgaactttttgcgggcatcaaggacggggaatcgctgcagctctttgaacaatcttctagatctgcacacaaacaggagactcacacaatggaagcagtgaagctcgtagagttcgatcttaagcagactctcaccaggctaatggctcatctcttcggcgacgagttggaaatcagatgggttgattgttattttccttttacacaccctagttttgaaatggaaatcaattttcacggcgagtggctcgaagtcttgggctgcggagttatggagcaacaattagttaactctgccggtgcccaagatcggattggctgggcatttgggctgggtctcgagaggcttgctatgatactgtatgatattcctgacatccggctgttctggtgcgaggatgaacggtttctaaagcagttttgcgtgagcaacatcaatcagaaagtgaaattccagccactgagtaaataccccgctgtcataaacgatatatctttctggttgcctagtgagaattacgctgaaaacgatttctatgatctggtccgaacaataggcggcgacctggtggaaaaggttgacttgattgacaagtttgtgcatcccaagacccacaagacatcccattgctaccgcataacgtatcggcatatggagagaacactcagccagcgagaggtccgccatatccaccaagccctccaagaggccgcagtacaactactgggcgtcgaagggagattttag

SEQ ID NO: 128346 - DNA, 468 bp, synthetic construct
  misc_feature 1..468: note = Description of Artificial Sequence: Synthetic coding sequence
  source 1..468: mol_type = other DNA
atgctcagagcccacacttccgcacatcagtgggatctactccacgctggcctcgacgcctttctcgtagtcggtgacgtgtaccggcgtgaccagatcgattcccagcattatccaatctttcatcaacttgaggccgttaggctctttagtaaacatgagttattcgcggggattaaggacggagaatcccttcagttattcgaacaatcctcaagatccgctcataaacaggaaactcacacgatggaggcggtgaagctggtcgagtttgatcttaaacaaaccttgacccgtctgatggcccacctgttcggcgatgagctcgagatcagatgggtcgactgctactttccctttactcacccttcattcgagatggaaataaatttccacggtgaatggttggaggtgttgggctgcggtgtgatggagcagcagctagtgaattccggcggtgccacctag

SEQ ID NO: 128347 - DNA, 306 bp, synthetic construct
  misc_feature 1..306: note = Description of Artificial Sequence: Synthetic coding sequence
  source 1..306: mol_type = other DNA
ttgttcgctggaatcaaggacggggagagtctccaattgttcgaacagtcttcccgatcagctcacaagcaagaaactcacacaatggaggcagtcaagctggtcgagttcgatttgaagcagaccctcacgcggttgatggcacacctgtttggagacgaactcgagattcgatgggtcgactgctactttcctttcacacatccaagcttcgaaatggagatcaattttcacggtgaatggctggaggtgctaggctgtggtgtgatggagcagcagctcgtcaactctggcggcgccacttag

SEQ ID NO: 128348 - DNA, 849 bp, synthetic construct
  misc_feature 1..849: note = Description of Artificial Sequence: Synthetic coding sequence
  source 1..849: mol_type = other DNA
atgagtggcgctgatcgttcaccaaacgctggggccgctcctgactctgctccagggcaggccgccgtcgcgtcggcctaccagcgctttgaaccccgcgcttacctgcgaaacaattacgcacctccacggggcgacctttgcaatccgaacggggtagggccatggaagctgcgatgtctcgcacaaacctttgccaccggcgaggtctcagggaggactctaattgacattggcagcggcccgacagtataccagctgctttcagcctgtagccacttcgaagacattacaatgaccgactttctcgaggtaaacaggcaagagctgggacgctggctccaagaagaacccggagccttcaattggtccatgtactcacagcacgcctgtcttatcgaggggaaaggcgagtgctggcaggataaagagcgacagcttagggctagggtgaaaagagtcctgcccatcgatgtgcaccagccccaaccattaggcgcaggaagtcctgctcccttaccagcggatgcattggtttctgcattttgcttggaggccgtctcgccggatctggctagctttcagagggctctcgaccatattactactctactgcgacctgggggacatttgctgctcatcggcgccttggaggagtcctggtatctcgcaggtgaagccaggctaaccgttgtgcctgtctcggaggaggaggtgagagaagcacttgtgcggagtgggtacaaagtgcgcgacctgaggacgtacataatgcccgcacacctgcagaccggcgtagatgatgtcaagggagttttcttcgcatgggcccagaaagtcggtctgtag

SEQ ID NO: 128349 - DNA, 555 bp, synthetic construct
  misc_feature 1..555: note = Description of Artificial Sequence: Synthetic coding sequence
  source 1..555: mol_type = other DNA
atgactgatttcctggaagtcaacagacaggagctcggcagatggcttcaggaggagccaggagcctttaactggtcaatgtactcccaacacgcatgtcttatcgagggcaagggggagtgttggcaggataaagagaggcaactccgtgcacgcgttaaaagagtgctgcctatcgacgttcaccagcctcagcccctgggcgcagggagccctgcccccctgcctgcggatgctctagtcagtgccttttgcctggaggccgtctcccccgacctcgccagctttcagcgtgctttggatcatataacaactttactgagacccggaggacacctactccttataggcgctctcgaggaaagctggtacctggcgggtgaggcccgcctgacagtcgtgccagtctctgaggaagaagtgcgagaggccctggtgagaagcggctacaaagttcgggaccttcgaacatatattatgcccgctcatctccagaccggcgtggacgacgtcaagggggtgttttttgcttgggcacagaaggtaggactgtag

SEQ ID NO: 128350 - DNA, 741 bp, synthetic construct
  misc_feature 1..741: note = Description of Artificial Sequence: Synthetic coding sequence
  source 1..741: mol_type = other DNA
atggaagaggcgaaatcacagagtctggaagaggactttgaaggtcaagctacgcataccgggcccaaaggggtcattaatgattggagaaagtttaagttagagagccaagactctgactctatccctccctccaaaaaggagattctccggcagatgtcctctcctcaatcccggaacggtaaggattcgaaggagcgagtcagccggaaaatgagcattcaggagtatgagctgattcataaggagaaggaggatgaaaactgtctgaggaaataccggcgccagtgcatgcaagacatgcaccaaaaactgtcttttggccctcgctacggctttgtatacgaactcgagactggaaagcagtttctagaaacgattgaaaaggaactgaaaattacaactatagtggtacacatctatgaagacgggatcaagggatgtgacgctttgaacagttctcttacttgtctcgccgctgagtatccgattgttaagttctgcaagatcaaggccagcaacaccggggccggtgatagattcagtctggatgtcctgcccactcttttgatttataaagggggtgagctgatatctaacttcataagcgttgccgaacagtttgcggaggagttctttgcgggagatgttgagtccttcctcaacgaatacgggcttcttcctgagcgggaggtgcacgtcttggagcacacaaagatagaggaggaagacgtggaatag

SEQ ID NO: 128351 - DNA, 741 bp, synthetic construct
  misc_feature 1..741: note = Description of Artificial Sequence: Synthetic coding sequence
  source 1..741: mol_type = other DNA
atggaagaagcaaaatcgcaatccttagaggaggactttgagggacaggctacccacacagggcctaaaggggttattaatgattggcgcaaattcaagctggagtcccaggacagcgatagcataccgccctctaagaaagagatcttgcgacagatgagttcaccgcaaagcagaaatggcaaggattctaaagaaagagtgagccgaaagatgtctattcaggagtatgagctcattcacaaggagaaggaggacgaaaattgtctgaggaagtatcggcgacaatgtatgcaggatatgcaccagaaactctctttcgggccaagatatgggtttgtgtacgagctggagacggggaagcagttcctggaaactattgagaaagaactgaagattacaactatcgtggtgcatatttacgaagacggaattaaaggctgtgatgcactcaatagctccctgacatgcctcgccgcagaatacccaattgtcaaattttgcaagatcaaagcatccaatactggcgccggcgatcgattttctcttgatgtcctgccaaccctgctgatatacaaaggaggggagctgattagcaattttatttccgttgcagaacagttcgccgaggaattctttgcgggagatgtcgagtcattcctgaacgaatacggcctcctgccggaacgcgaggtgcacgtcctcgagcatactaagatagaagaagaggacgtagagtag

SEQ ID NO: 128352 - DNA, 585 bp, synthetic construct
  misc_feature 1..585: note = Description of Artificial Sequence: Synthetic coding sequence
  source 1..585: mol_type = other DNA
atgtccagccctcaatcccggaacggaaaggactccaaagaacgggtctctagaaagatgtccattcaagagtatgagttaatccacaaggagaaagaggacgaaaattgtctgaggaagtatagacggcagtgcatgcaggatatgcatcagaaattaagctttggtcctcggtatggatttgtctacgaactcgaaacaggcaagcagtttctggaaaccattgaaaaagagctgaagattaccaccatagtggtacacatttacgaggatgggatcaagggctgcgacgcccttaatagtagcttaacatgtctggctgccgagtacccgatcgtcaagttctgcaagatcaaagccagcaatacaggggccggcgatcgctttagtctcgatgtcctcccaactctgctcatttacaaagggggcgagctcatcagcaacttcatctcagtggccgagcaatttgcagaggagttttttgcaggcgatgtggaatctttccttaatgaatatggtctgcttccagaacgggaggtgcacgtacttgagcataccaagatagaggaagaggatgtcgaatag

SEQ ID NO: 128353 - DNA, 585 bp, synthetic construct
  misc_feature 1..585: note = Description of Artificial Sequence: Synthetic coding sequence
  source 1..585: mol_type = other DNA
atgagctcaccacagtctcgcaacggaaaagactcgaaggagcgcgtttctagaaaaatgtccattcaggagtacgagctgatccataaagagaaggaggacgagaattgccttcgtaaataccggcgacagtgcatgcaggacatgcatcaaaagctgagcttcggcccgagatacggctttgtgtatgaactggaaacgggaaaacagtttctcgagaccatcgagaaagagctcaagatcaccaccatagttgtgcacatttacgaagacgggattaaaggatgcgatgctctcaatagtagcttgacatgcctcgctgccgaatatccgatcgtaaagttctgtaagattaaggcctcaaataccggtgccggcgaccgattcagcctcgacgtgctgccaacactgctgatctataagggtggagaacttatctcgaattttatctccgtagccgagcagttcgccgaggaatttttcgcaggcgatgttgagtccttccttaacgagtatgggttgctccccgagcgcgaagttcatgtgctcgagcacaccaaaattgaggaggaggacgtggagtag

SEQ ID NO: 128354 - DNA, 906 bp, synthetic construct
  misc_feature 1..906: note = Description of Artificial Sequence: Synthetic coding sequence
  source 1..906: mol_type = other DNA
atgactaccttggacgataagttgctgggcgaaaagctgcaatactattactccagttcagaagacgaagactcagatcacgaggataaggacaggggccgctgcgcaccagcaagttcctctgtcccagctgaagccgagctcgctggtgagggaattagtgtgaacacgggcccaaaaggggttatcaacgactggagacgcttcaaacagcttgagaccgagcagcgggaagaacaatgccgcgagatggagaggttgattaagaagctgagcatgacatgcaggagtcatttagacgaggaggaggagcagcagaaacagaaagatctccaagaaaagatttccgggaaaatgacgcttaaagaattcgctattatgaacgaagaccaggatgatgaggagttcctgcaacagtacagaaagcagagaatggaagagatgaggcagcaacttcacaaagggccccaatttaaacaagtgtttgagatttcttctggcgagggttttctggacatgatcgacaaagagcagaagtctatcgtcatcatggtgcacatctatgaagacggtatccccggtaccgaagcaatgaacggatgtatgatctgcctagccgcagagtatcctgcggtgaagttctgtaaagtgaaaagcagtgttataggggccagctcccagttcacaagaaacgccctgcctgccttacttatctataagggaggtgagcttatcggaaacttcgtgcgcgtgactgatcaactgggggatgactttttcgccgtggaccttgaagcctttttacaggagttcggcctgctccctgaaaaagaggtcctggtgcttacctctgtgcgtaattcagcaacctgccactctgaagacagcgacttggaaatcgactag

SEQ ID NO: 128355 - DNA, 330 bp, synthetic construct
  misc_feature 1..330: note = Description of Artificial Sequence: Synthetic coding sequence
  source 1..330: mol_type = other DNA
tgattgcagtactactatagcagctctgaggatgaagacagtgatcacgaagacaaagacagagggcggtgtgccccagcctcaagcagcgtgcctgctgaagccgaactcgcaggagaaggcatctcagtaaacaccggacccaagggagtgattaacgactggaggagatttaaacagctggaaaccgaacagcgagaggaacaatgcagggaaatggaacggctgatcaagaaactctccatgacctgtcggtcgcatctggacgaggaggaggaacagcagaaacaaaaggacctgcaggaaaagatcagcggcaaggaacgctag

SEQ ID NO: 128356 - DNA, 276 bp, synthetic construct
  misc_feature 1..276: note = Description of Artificial Sequence: Synthetic coding sequence
  source 1..276: mol_type = other DNA
tagtgtgccccggcctctagctccgttccagctgaggctgagctcgcgggcgaaggcatttcagttaatactggacccaagggagtgattaatgactggcgaagattcaagcaactagagaccgagcaaagagaggaacagtgtcgcgaaatggagcgtctgatcaagaagctgagcatgacctgtagatctcaccttgacgaggaggaagaacagcagaaacagaaggaccttcaggagaagatctcaggtaagaaatcttgggccatcctgtag

SEQ ID NO: 128357 - DNA, 726 bp, synthetic construct
  misc_feature 1..726: note = Description of Artificial Sequence: Synthetic coding sequence
  source 1..726: mol_type = other DNA
atgcaggaccctaatgaggataccgagtggaacgacattctgcgggatttcggcatcctgccccctaaggaggaatcaaaggacgagatcgaggaaatggtcttgcgactccagaaagaggccatggttaaacccttcgaaaaaatgacattggcccagctcaaggaggccgaggatgaatttgacgaggaggacatgcaagcagtggagacatacagaaaaaaaagactccaggagtggaaagctctgaagaaaaaacagaaattcggggaacttcgggaaattagtggtaatcagtatgtgaatgaggtcacaaacgcggaagaagatgtgtgggtgataattcatttatatcgtagcagtattcccatgtgtctgctggtgaatcaacacctttccctgctcgctcgaaagttcccagagaccaaattcgttaaagcgatcgtgaatagctgtattcagcactaccacgataactgcctgccaactatcttcgtctataaaaatgggcaaatagaagccaagttcatcggtattatagaatgcggtggaatcaacttgaaactcgaggagctggagtggaagctggctgaagtcggcgccatccagaccgacctggaggagaaccccagaaaggacatggttgatatgatggttagttcaatacggaatactagtatccatgacgactccgactcttcaaactccgataacgatactaagtag

SEQ ID NO: 128358 - DNA, 720 bp, synthetic construct
  misc_feature 1..720: note = Description of Artificial Sequence: Synthetic coding sequence
  source 1..720: mol_type = other DNA
atgcaagatccaaacgcggacacagaatggaatgatatcctccgtaaaaaaggcatcctgcccccaaaagagagcctgaaagaattagaagaggaagctgaagaggagcagcgaattctgcagcagtccgtggtgaagacgtacgaggatatgacactcgaggagttagaagatcacgaagatgaattcaatgaagaagatgagagagccattgagatgtatcggagaagacggctagccgaatggaaagccactaagctgaagaacaagttcggagaagtgctcgagatctcggggaaagattacgttcaggaggtcacaaaggcgggtgagggcctttgggttatcctccacctctataagcaagggattcctctgtgcgctcttataaatcagcacctcagcggcctagcacgcaaattcccagatgttaagttcatcaaggccatttcaacgacctgtatccctaactaccccgaccgtaacctgcccacaatctttgtgtacttggaaggggatataaaagcacagtttattggcccgctcgttttcggcggtatgaacctgacacgcgatgaactggaatggaagctatctgaatctggcgcaattatgacggacctggaggaaaaccctaaaaagcccatcgaggacgtgttactcagttccgtgcgcaggagcgtcctgatgaagcgagactcagattctgaaggcgactag

SEQ ID NO: 128359 - DNA, 1104 bp, synthetic construct
  misc_feature 1..1104: note = Description of Artificial Sequence: Synthetic coding sequence
  source 1..1104: mol_type = other DNA
atggatgcccagtgttccgcaaaggttaatgcccgcaagcgcaggaaggaagcccctggtcctaatggtgcaaccgaggaagacggtgtgcccagcaaggtgcagagatgcgcagtgggactgcgccagcccgccccctttagcgatgagatagaggtggatttctctaaaccatatgtcagagtaacaatggaagaggcctcccgcggtaccccctgcgaacgaccggtccgcgtgtacgctgacggaatatttgacctctttcatagcggacacgccagagccctgatgcaggccaaaaacctgtttccaaatacctacctgatcgtaggtgtatgcagcgatgaactgacacacaatttcaaaggcttcactgtgatgaatgaaaacgagaggtacgacgcagtgcagcactgtcggtatgtcgacgaggtcgttagaaatgccccatggactctcacccccgaatttctggctgagcacaggatcgacttcgtcgcgcacgacgacattccttacagctctgctgggtcggatgacgtgtataagcacataaaggaggcgggaatgtttgccccaactcaaagaacggaggggatttctactagtgatattatcacccggatcgtaagagactacgatgtgtatgcccgcaggaatttgcagcgcgggtacaccgccaaggagctaaacgtaagctttattaacgagaaaaagtatcatcttcaggaacgcgtagacaaagtgaagaaaaaagtcaaggatgtcgaagagaagagtaaggagttcgtgcagaaagtggaggagaagagcattgacctgatccagaaatgggaggaaaaatctagagagttcattggaagttttctagaaatgtttgggccggagggcgccctgaagcacatgttgaaggagggtaaaggaaggatgctgcaagctatctcacctaaacagtcaccttcttcctcgccaacccgggagagatctccaagcccttcattccgatggccgttctccggcaaaacctctccgccttgtagtcccgcaaaccttagccgccataaggcggcagcctatgatatctctgaagacgaggaggactag

SEQ ID NO: 128360 - DNA, 882 bp, synthetic construct
  misc_feature 1..882: note = Description of Artificial Sequence: Synthetic coding sequence
  source 1..882: mol_type = other DNA
atggatgcccaatgttcagccaaggtgaacgccagaaagagacgcaaggaggcccctgggccgaatggagctactgaagaggacggtgtaccttcaaaggtacaaagatgcgccgtgggtttacgccagcccgctccgttttctgacgagattgaggtggacttttccaagccctatgtccgcgttacgatggaggaggcctcacggggtactccctgcgagcggccagtccgggtgtacgctgatggcatcttcgatcttttccactcaggccacgccagagccttgatgcaggcaaagaacttgtttccaaatacctacttgatcgtgggtgtgtgtagtgacgagctcacacataacttcaaaggctttaccgtgatgaacgagaatgagcgctacgacgctgtgcaacactgtaggtacgtggacgaggttgtgcgcaatgccccctggaccctaacgcccgagttcctcgcggaacaccgcatagacttcgtggcccacgacgacattccttattcctcagccggaagtgatgacgtctataaacacatcaaagaagcagggatgttcgcacccacacaacggactgagggaatcagcacttcagacataattacccgcattgtgagagactacgacgtgtacgccaggcgcaatttacagcggggatacacagcaaaagagttgaatgtttctttcatcaacgagaagaaatatcacctgcaagaaagggtcgataaggtaaagaaaaaagtgaaagacgtggaggagaagtcgaaggagtttgtgcagaaagtagaggaaaagtctattgacttaatacagaagtgggaagaaaaaagtcgcgagtttattgggtcattcctggagatgttctag

SEQ ID NO: 128361 - DNA, 402 bp, synthetic construct
  misc_feature 1..402: note = Description of Artificial Sequence: Synthetic coding sequence
  source 1..402: mol_type = other DNA
atggacgcccagtgttcagcgaaggtcaacgctagaaagcggcgtaaagaagcccctggcccaaacggcgcaacagaggaggatggcgtcccatctaaagtgcagagatgcgcagtgggactgagacagccggctcctttcagcgacgagattgaagtcgactttagcaagccatatgtgagagtcacgatggaggaggccagcagggggacaccgtgcgagcgccctgtccgggtgtacgccgatggaatctttgatcttttccacagcgggcacgctcgcgctttaatgcaagccaaaaacctgttccctaacacatatttgatcgtgggagtgtgttccgacgagctgacccacaattttaagggcttcaccgtgatgaatgaaaatgagcgttactag

SEQ ID NO: 128362 - DNA, 987 bp, synthetic construct
  misc_feature 1..987: note = Description of Artificial Sequence: Synthetic coding sequence
  source 1..987: mol_type = other DNA
atggatgctcagtgctctgccaaagtaaatgctcgtaaaagacggaaggaagcaccagggcccaacggcgctactgaggaagctagccgaggcacaccatgtgagaggccagtgcgggtctacgcagatgggattttcgatctgttccatagtggacatgcaagagccctcatgcaagccaagaacctcttcccaaatacctatttgattgtgggcgtgtgcagcgatgagcttacacataacttcaaaggatttacagtgatgaacgaaaacgagagatacgatgcggtacagcactgccgctatgttgatgaggtcgtgcgcaacgctccatggacgctcacccctgagtttctggcagaacacagaatagacttcgtagcacacgacgacattccatactcgtccgcgggttccgatgatgtctacaagcacatcaaagaggctggaatgttcgcgcccactcaacgaacagagggcatcagcacttctgacatcataaccagaattgtgagggactacgacgtgtacgcaagacgcaacctccagcgcgggtataccgccaaggagttgaatgtgagctttatcaacgagaaaaagtatcatttacaggagagggtcgacaaggtaaagaagaaggtgaaagacgttgaggaaaagtctaaagaatttgtgcagaaagtggaggaaaagagtattgatttaattcaaaagtgggaggagaaatccagagaattcatcggaagcttcttggagatgttcggccctgaaggagccctgaagcacatgctaaaggaagggaagggaaggatgttgcaggcaatttccccaaaacagtctcctagttcgagcccaactagggagcgctccccttcaccatcctttcgatggcccttctctgggaagacctcccctccttgttcacccgccaacctatctcgccacaaggccgccgcatacgacatctccgaggacgaagaagattag

SEQ ID NO: 128363 - DNA, 1104 bp, synthetic construct
  misc_feature 1..1104: note = Description of Artificial Sequence: Synthetic coding sequence
  source 1..1104: mol_type = other DNA
atggacgcccagtgctccgccaaggtaaatgcacgaaaacggagaaaagaagccccaggcccgaacggcgctaccgaagaagatggtgttccttctaaagtgcagaggtgcgcagtggggctcaggcagcccgcccctttctccgacgagattgaggttgacttcagtaaaccctacgttcgggtgaccatggaagaagccagccgcggaaccccgtgcgaaagaccggtgcgcgtgtacgcagatggaatcttcgacctgtttcactctggccatgccagagcattgatgcaagctaaaaacctgttcccgaacacctacctaatcgtcggagtgtgtagcgacgaactgactcacaacttcaaaggattcactgtgatgaacgagaatgaaagatacgatgcagtgcagcactgtcggtacgttgatgaggtcgtgagaaacgccccttggactctaacgccagaatttctggccgagcaccggatcgattttgtcgctcacgatgacattccatacagctccgccggctctgacgacgtgtacaaacacataaaagaggcaggaatgttcgcacccacacaacgaaccgagggcatctccacaagcgacataatcacccggatcgtccgtgattacgatgtatatgctagaagaaacctacagcggggctacaccgcgaaggagctgaacgtgagctttatcaacgagaagaagtaccacctgcaggagcgggtggacaaagtgaaaaagaaggtgaaggacgtggaggagaagtcgaaggagtttgtacagaaggtcgaagaaaaatcaatcgatctgatccagaagtgggaggagaagagccgtgagttcataggttctttcctggagatgttcgggcccgaaggagccctcaagcacatgcttaaggagggcaaaggtagaatgctccaggcaattagtccgaaacaatcaccgtcctcctctccaactcgggaaaggtctccaagtccgagttttcggtggcccttctctggcaagacttcgcctccatgctctccggcaaacctgagccgtcacaaggcggccgcttacgatatctctgaagatgaggaggactag

SEQ ID NO: 128364 - DNA, 348 bp, synthetic construct
  misc_feature 1..348: note = Description of Artificial Sequence: Synthetic coding sequence
  source 1..348: mol_type = other DNA
atggatgctcagtgctcagcaaaggtgaatgctagaaaacgtaggaaggaagcaccggggcctaacggcgctactgaagaagatggcgtgccgtctaaggtccagcgttgcgccgttggactgagacagccagctcctttcagcgatgagatcgaggttgatttcagcaagccctatgtacgagtcactatggaggaggcttctcgaggcaccccctgtgaaagaccagtgcgagtgtatgccgatggaatctttgatttgtttcacagtgggcatgcaagagccctgatgcaggccaaaaatctgtttcctaatacgtacctgattgtgggggtatgtagtgactag

SEQ ID NO: 128365 - DNA, 2250 bp, synthetic construct
  misc_feature 1..2250: note = Description of Artificial Sequence: Synthetic coding sequence
  source 1..2250: mol_type = other DNA
atggaggccgagaccggtagctccgtggaaactggtaagaaggccaatagggggaccaggatcgcgctggtcgtatttgtaggtggcacgctagttttagggacgatactctttctcgtaagccaggggctgttatcactgcaggctaaacaagaatactgtcttaagccggagtgcatcgaggcagcagccgccatcctcagcaaagtcaatctgagtgtagacccctgtgataacttctttcgattcgcatgcgatggctggatcagtaacaaccccattcccgaggacatgccaagttatggcgtgtatccatggctgagacacaacgtggacttgaaactgaaggagctgctcgaaaaatctatctcacggaggcgggacaccgaagcgatccagaaggcaaagattctgtactctagctgtatgaatgaaaaagcgattgaaaaggccgatgctaaacccctcctccacattctgcgccactccccattccggtggcccgtactagaaagcaacatcgggccagagggagtgtggtcagagcggaaattttccttgctgcaaacacttgctactttcaggggacagtattctaacagcgtcttcatccgactctacgtgtcccctgatgataaggcctctaatgagcacattctgaaactggaccaggcaactctgtccttagccgttcgggaagactacctggacaactctactgaagctaaatcctaccgcgacgccctctacaaattcatggtagatactgccgtcctgctaggagccaattcatcgagggctgagcacgatatgaaatcagttctccgcttagaaattaaaattgctgaaatcatgattcctcacgagaaccgcacctcagaggctatgtataacaagatgaacatttccgaactcagtgcaatgatcccccaattcgactggcttgggtatataaagaaagtgatcgataccagactgtacccgcatctgaaggatatcagcccctctgaaaatgtggtcgtccgagtaccccagtacttcaaggacctcttcaggatactaggttcggaaagaaagaagactattgccaactaccttgtatggcgcatggtctactctcgaatcccgaatttgtcacgacgttttcagtaccggtggctcgagttttcccgagttattcaggggacaacaactctgttgcctcagtgggataagtgtgttaacttcattgagtcagcccttccttatgttgttggcaagatgttcgtggacgtctattttcaagaagacaaaaaggagatgatggaagagctggtggagggtgtccgttgggccttcatagatatgttggaaaaagagaacgagtggatggatgctggcaccaagcgtaaagcaaaggagaaggctcgggctgtgctggcaaaagttggctaccccgagttcattatgaatgatactcatgtaaacgaggacctcaaagccatcaaatttagtgaggcagactactttggcaacgtgctgcagacaagaaaatatctggcacaaagcgacttcttttggttgcgcaaggcagttccaaaaaccgagtggttcacgaaccccaccacagtgaatgcattttattctgctagcactaatcagatccgattccccgccggtgaacttcagaaacccttcttctggggcacagaatacccgcggtctttgtcctacggggccattggggttatcgttggccatgagttcacacacggatttgacaataacggccgcaagtacgataagaatggcaacctcgatccatggtggagcacagagagtgaggaaaaattcaaagagaaaactaagtgtatgattaaccaatacagcaactactattggaaaaaggccggcctgaatgtgaaagggaagcgtacattgggagaaaacattgctgacaacgggggactgagggaggccttccgagcctacaggaaatggatcaatgatcgccgccaagggctggaggaacccctcctgcctggcatcacattcacgaataatcaactgttctttctcagctatgctcacgtgcgatgtaattcttatcggccagaggccgctcgagaacaggtccagatcggcgcacactcccctcctcaatttcgggttaacggagccatctccaacttcgaagaattccagaaggcgttcaattgcccgccaaatagtactatgaacagagggatggattcatgtcggttatggtag

SEQ ID NO: 128366 - DNA, 1359 bp, synthetic construct
  misc_feature 1..1359: note = Description of Artificial Sequence: Synthetic coding sequence
  source 1..1359: mol_type = other DNA
atgattcacttgcctcgaccgcccaaggtcctgggactccagtttgactggctcgggtatataaaaaaggtgatcgatacaagactttacccacaccttaaagacatttcgccttcagagaatgtggtagtgagggtgccacagtatttcaaagatttgttcagaatacttggctcagaacgcaaaaaaacaatcgctaactacctcgtctggagaatggtctatagcagaatccctaatctatcccggcggttccagtaccgttggctagagttttccagggtgatccagggcactacaaccctgctgccccagtgggacaagtgtgtgaacttcatcgaaagcgcactaccatacgtggtgggcaagatgtttgtcgacgtctactttcaggaggataaaaaggagatgatggaggagttagttgagggggtcaggtgggcgtttattgacatgctggagaaagagaatgaatggatggatgcagggactaagagaaaggccaaggaaaaggcaagagcagtgctggccaaagttggctatcccgagttcataatgaacgacacacacgtcaacgaggacctaaaagcgatcaagttcagtgaagctgattatttcggtaatgtgctacagaccaggaaatatctggctcagagtgattttttttggctgcgcaaggcagtgcctaagacagaatggttcacgaatccaaccaccgtgaatgccttttattctgcctctaccaatcaaattaggtttccagccggagaactccaaaaaccttttttctgggggacggagtaccctagatctctgagctatggggctatcggcgtgatagtgggtcatgagttcacccacggattcgacaataacgggaggaaatacgacaagaacggcaacctagacccttggtggtcaacagagagcgaggagaagtttaaagaaaagaccaagtgcatgattaaccagtatagtaactactactggaagaaggcaggccttaacgtcaagggcaagagaaccttgggagagaacattgccgacaatgggggtctccgggaagccttcagggcctatagaaagtggataaacgacagaagacagggtctagaagagcctttgctgcccggcattactttcacaaacaatcaactgtttttcctgtcatatgctcacgtccggtgtaattcctacaggccagaggccgctcgggaacaagttcagattggcgcccattcacctccccagttccgcgtgaacggagccatctctaatttcgaggagttccagaaggcattcaactgtcctcctaacagcaccatgaaccgggggatggactcttgtcggctgtggtag

SEQ ID NO: 128367 - DNA, 1959 bp, synthetic construct
  misc_feature 1..1959: note = Description of Artificial Sequence: Synthetic coding sequence
  source 1..1959: mol_type = other DNA
atgccttcgtatggcgtctatccgtggctccgacataatgtggatctaaagctcaaggagttgcttgagaaaagtatatcaaggagacgggataccgaagccatccagaaagccaagatcctgtattcatcttgcatgaatgagaaagctatcgagaaagcagacgctaaacctcttctgcatatcctccgccactctccatttcgctggcccgttcttgagtctaatattggacccgagggagtgtggtcagagcgcaaattttcgcttctgcagactctcgcgacatttagaggtcagtactcgaatagtgtcttcatccggttatatgttagtcccgatgataaagctagcaatgaacatatcttaaagctggaccaggctacactctctctcgctgtgagggaagattacctcgacaattctacagaggcaaaaagctaccgggacgccctttataagttcatggtggatacagccgttctgttgggggctaacagctcccgtgcagaacacgacatgaagtccgtgctgaggttagaaatcaaaattgcagagataatgataccccatgagaataggacctcagaggctatgtataataagatgaacatctctgaactttcagcaatgatcccacagtttgattggctgggctatattaaaaaagtaattgatactagactgtatcctcacttgaaggacatttccccttctgagaatgtcgtggtaagggttccccagtatttcaaggacctctttagaatactgggcagtgaaaggaaaaaaacgatagccaattacctggtgtggcgaatggtgtactcgcgtattccgaacctcagtcggagattccaatacagatggttagaattttcgcgcgtcatacaaggtaccacaacattgctgccacaatgggacaagtgcgtcaactttatcgaatctgcactaccatatgttgtcggcaaaatgttcgttgatgtgtattttcaggaggataagaaggaaatgatggaagaactagtcgaaggagtccgctgggcctttatagatatgctagagaaagaaaacgagtggatggatgccggaaccaaacgaaaggccaaggaaaaagcacgggctgtcctggccaaagtggggtacccagagttcatcatgaatgacacccacgtcaacgaggacctaaaggcgatcaaatttagtgaggccgactactttgggaacgtgcttcaaactagaaaatacttagcacagagcgacttcttctggttaaggaaggcagtgcccaagaccgagtggttcactaatcctacgactgtgaatgctttttactctgcgagtacaaaccagatccggtttcctgctggagagctgcagaaaccattcttctggggaaccgaatatccccggagcctcagctatggtgccattggagtgattgtgggacacgagttcactcacgggtttgataacaatggtagaaagtacgacaagaacggcaacttagacccttggtggtcaaccgaatccgaggagaagttcaaagagaagactaagtgcatgataaaccagtattctaattactattggaaaaaagccggcctgaatgttaaagggaagcgaacgctcggagagaacatcgctgataacggtggcttgcgcgaggccttccgagcttaccggaaatggattaatgacagacggcagggtttggaggaacccttgctgcctggcatcacgtttactaataaccagttattcttcctgtcctacgcccacgtaaggtgcaacagttaccgcccagaggcggccagggagcaggtgcagatcggagcgcattcacctccacagttcagagtgaatggcgccatatccaattttgaggagtttcagaaggcctttaactgcccccctaactccacaatgaatagaggcatggacagctgccgtctgtggtag

SEQ ID NO: 128368 - DNA, 2088 bp, synthetic construct
  misc_feature 1..2088: note = Description of Artificial Sequence: Synthetic coding sequence
  source 1..2088: mol_type = other DNA
atggaggctgagacggggtcttccgtggaaaccggcaaaaaggctaatagagggacgcggattgcacttgtggtctttgtcggcgggacattggtcctgggcaccatcctgttcttagtcagtcaaggcttgctcagcctacaggcgaaacaagaatactgcctgaagccagagtgtatcgaagctgctgccgccattctgagtaaggttaacctgtccgttgacccctgtgataacttcttccggttcgcatgcgatggctggatctcaaacaatcccatccctgaggatatgccctcatatggggtgtacccatggttaaggcataacgtcgatttgaagctcaaggagttgctcgaaaagagcattagtagaaggagggacaccgaggctatccagaaggctaagatcttatacagcagctgtatgaatgaaaaagccattgaaaaggctgatgccaaaccattattgcatatcctgaggcactccccgtttcgctggcctgtcctcgagtcgaacatcggtcccgagggggtctggtcagaaagaaagtttagcttactccaaaccctggctaccttcaggggtcaatactcaaatagtgtgttcatccgcttgtacgtgtcgcccgacgacaaggccagcaacgaacatattctgaaacttgaccaggcaaccttgtccttggccgttcgagaggactacctggataattcaactgaggccaaaagctaccgagatgccctctacaagttcatggtggacaccgcggtactgctcggtgccaacagcagcagagccgaacacgatatgaaaagcgttctaagactggagatcaagatcgccgagatcatgatcccgcacgaaaacaggacatccgaggctatgtacaataagatgaatatcagtgagctctctgcgatgatccctcaatttgactggctgggttacatcaaaaaagtcatcgacacgcgtctttacccccatctgaaagacatttccccgtcagagaatgtagttgtgcgagtgccgcagtattttaaggacttattccgcattttggggagcgaaagaaaaaagacaatcgcaaactacctggtgtggagaatggtgtactcccgcatcccaaatctcagtagacgtttccagtacaggtggttagagttttccagggtgatacaggggactaccaccctgctccctcagtgggataagtgtgtgaatttcatcgagagcgctctgccttacgtggtgggcaagatgtttgtggatgtgtattttcaggaggataaaaaggagatgatggaggagttagtcgagggagtaaggtgggcctttatagatatgctggaaaaagaaaacgaatggatggacgctggaaccaaacgaaaagccaaagagaaggcaagagccgtgctcgccaaggtggggtaccctgagttcatcatgaatgacacccacgtcaatgaggatctaaaggctatcaagtttagcgaggctgactatttcgggaacgtcttgcagaccagaaagtatctggctcagtcagacttcttctggctgcgtaaggctgtgcctaagaccgaatggtttaccaaccccaccacggtgaacgcattctactctgcatcaactaaccaaattaggtttccagccggtgagctgcagaaaccattcttctgggggaccgaatacccacggtcgttatcatatggagcgataggagtgatcgtgggccacgaatttacgcatgggtttgataacaatggccgcaaatatgacaagaatggaaacttggacccctggtggtcaactgagagtgaggagaaatttaaagagaaaacaaaatgcatgatcaatcagtacagtaactactactggaaaaaggccggactcaatgtcaaaggaaagcgtaccctgggcgagaacatcgccgataacggaggcctaagagaggctttccgcgcatacagaaaatggattaatgatagacgccaggggctggaagaaccgttgttaccaggtatcacctttaccaataaccaattgttcttcctaagttacgctcacggacagtggtgcaactag

SEQ ID NO: 128369 - DNA, 888 bp, synthetic construct
  misc_feature 1..888: note = Description of Artificial Sequence: Synthetic coding sequence
  source 1..888: mol_type = other DNA
atgccttctcctcgtcggtcaatggaggggcgaccccttggcgtaagtgcatccagcagcagcagctcgcctggatctcctgctcatggggggggtggtggcggaagccgttttgagtttcagtctcttctgagcagtcgagctacagcagtggacccaacatgtgctaggcttagagcctccgaatcacccgtacatcgccggggtagcttcccacttgccgctgccggaccctcccagagtcccgcaccgccactgccggaagaagaccgcatggacttaaacccttcatttctggggatagctctccgcagtctcctggccatcgatctgtggctgtcgaagaaattgggagtctgtgccggtgaatcaagttcatggggttcagtgcggcccttgatgaaactgctggagatctcaggccacggcataccatggttactgggcacactctactgcctctgccgcagtgatagctgggccggtcgcgaagtgcttatgaacctgctctttgccctcttgttggacctgcttctcgtggcattaatcaagggactggtgcggcgacggagacccgcacacaaccagatggacatgttcgttacactgtcagtggacaagtacagcttccccagcgggcatgcgacccgcgctgctttaatgagtagattcatcctgaaccacctcgtcttggccataccattgagggtgttggtggttctctgggcctttgtgctgggtctctcaagagttatgctgggccgccataacgtgacagacgttgcctttggattttttcttggatacatgcagtattccatcgtggactattgctggttgtccccccacaatgcccctgtgctctttctgctctggtctcagagatag

SEQ ID NO: 128370 - DNA, 615 bp, synthetic construct
  misc_feature 1..615: note = Description of Artificial Sequence: Synthetic coding sequence
  source 1..615: mol_type = other DNA
atggaccttaacccctctttcctgggcatcgctctgcgcagcctgctcgcaattgatctttggctcagtaagaaacttggggtgtgtgccggtgaatcatcttcctggggaagtgtgcgccccctgatgaaactactcgagatttccgggcacggcatcccttggctgctgggaacactttactgcttgtgtcggtccgattcttgggccgggcgggaggtcttaatgaacctcctgttcgcccttctgctggacttgctgttggtggcactcatcaaaggtctggtcagacgcagacggcctgcacataaccaaatggacatgttcgtgacattgtcggtggataaatacagttttccatcgggccacgcaaccagggccgccctcatgtccagatttatactgaatcatctagtcttggccatccccctgagagtgcttgtagtcctatgggcgtttgttctgggattatcgagggtgatgcttggacggcacaacgtcaccgatgtggccttcggatttttcctgggatatatgcagtactccatagtcgattattgctggttgagcccgcacaacgctcccgtgctcttcctgctgtggtctcaacgttag

SEQ ID NO: 128371 - DNA, 645 bp, synthetic construct
  misc_feature 1..645: note = Description of Artificial Sequence: Synthetic coding sequence
  source 1..645: mol_type = other DNA
atggaattggctgccgggtctttctcagaggagcagttttgggaagcatgtgctgaactacagcagcctgcattagccggcgctgactggcaattgctagtagaaaccagcggaatttctatctatcgactgctagacaaaaagactggtctgtatgagtataaagtgttcggagtcttagaggactgttccccaacactgcttgctgacatctatatggattcagactatcggaaacagtgggaccagtatgtgaaggaactgtacgagcaagagtgcaatggtgagacagtagtctattgggaggtgaaatacccatttcccatgtcaaaccgcgattatgtttatcttaggcagcgccgggacctcgatatggaaggccgcaaaatacatgtgatcttggctaggagcacaagcatgccacagctgggcgagagatctggtgtgatccgcgtcaagcagtataaacaatctctcgcgattgagagcgatgggaaaaaaggctcaaaggtcttcatgtactactttgataatccaggaggccagatcccctcttggcttatcaactgggccgctaaaaatggtgtgcctaatttcctgaaagatatggccagggcgtgccagaattaccttaaaaagacatag

SEQ ID NO: 128372 - DNA, 582 bp, synthetic construct
  misc_feature 1..582: note = Description of Artificial Sequence: Synthetic coding sequence
  source 1..582: mol_type = other DNA
ctcgcacagggccgatgtttgcaggttaccgcagtacaaattcaaggctcttggaaagtgactggagtacagcctcaaaaaacaggcctgtacgaatacaaggtatttggagtcctggaggactgctcccccacactcctggcagatatttatatggactccgattaccggaagcaatgggatcagtacgtgaaagaactgtacgagcaggagtgcaacggggaaacggttgtgtactgggaagtgaagtatccattccccatgtctaatagagattacgtgtacctacgccagcggcgggacctggatatggaaggcagaaagattcacgtgatcctggcgagatccacaagcatgcctcagttgggggaacgctctggagtcatcagggtcaaacaatacaagcagtctcttgcaattgagtccgatggaaaaaaaggctcaaaagttttcatgtattactttgacaaccccggcggacaaattccgtcttggttaatcaactgggccgcaaaaaacggagtgcccaatttcctcaaagatatggcaagggcctgtcagaactacctgaagaagacctag

SEQ ID NO: 128373 - DNA, 429 bp, synthetic construct
  misc_feature 1..429: note = Description of Artificial Sequence: Synthetic coding sequence
  source 1..429: mol_type = other DNA
atggattctgactataggaaacagtgggatcagtatgtcaaggagctttacgagcaggaatgcaatggagagacagtggtctactgggaggtcaaataccccttcccaatgtctaaccgagattatgtttacttgaggcaaagacgggatctggacatggagggacgtaaaatccacgttattctggccagaagcacctcgatgcctcagctgggggagcgtagtggcgtcatacgagttaagcaatacaagcagagtcttgccatcgaaagcgacggtaaaaaaggctctaaggtctttatgtactattttgataaccctggagggcagatccccagctggctaatcaactgggcggctaaaaacggcgtgccaaactttcttaaggacatggcgcgcgcttgtcagaactatctcaagaaaacttag

SEQ ID NO: 128374 - DNA, 564 bp, synthetic construct
  misc_feature 1..564: note = Description of Artificial Sequence: Synthetic coding sequence
  source 1..564: mol_type = other DNA
atgcctgtggatctttcaaaatggtctggccctctgtcactccaggaggtcgatgagcagccgcaacaccctctgcacgtgacctatgctggcgctgcagtcgacgagttagggaaggtcctgacgcccacccaggtgaagaatcgccccacatccataagttgggacggtctcgacagcggtaagctctacactttggtcctgaccgaccccgatgctccctctcgaaaggatccaaagtatcgagagtggcaccacttcctcgtcgtaaatatgaaaggcaacgacatcagctctggcaccgtgttatcagactacgtcgggtcagggccaccaaagggcaccggcttacacagatacgtatggcttgtttatgagcaggacaggccgctcaaatgtgacgaaccaatcctgagcaacaggtccggggaccaccgagggaagtttaaggtggcctccttccggaaaaagtacgaacttagagctcctgtggctggtacctgttaccaagccgaatgggatgactatgtgcccaaactgtacgagcagctatctggcaagtag

SEQ ID NO: 128375 - DNA, 468 bp, synthetic construct
  misc_feature 1..468: note = Description of Artificial Sequence: Synthetic coding sequence
  source 1..468: mol_type = other DNA
atgccagtggacctgagtaaatggtctgggcccttgagtcttcaggaggtcgacgagcaacctcagcaccctcttcacgttacttatgctggtgctgccgttgacgagctggggaaggttcttacccctacccaggttaagaatcgcccaaccagcattagttgggatggacttgactcaggcaagctgtatacactggtcctgacggatccagatgcaccaagccggaaggatcctaagtatcgggagtggcaccattttctcgtggtgaatatgaagggaaatgatatttcgagcggaaccgtgttgagtgattacgtcgggtcaggaccccctaaaggcaccgggctgcatcggtacgtatggttggtgtatgaacaagatagacccctaaagtgcgatttctcgtgttgtctcgcctttatcattttactaacccactccgatctatgtttcgatcagatctag

SEQ ID NO: 128376 - DNA, 6135 bp, synthetic construct
  misc_feature 1..6135: note = Description of Artificial Sequence: Synthetic coding sequence
  source 1..6135: mol_type = other DNA
atgtgtccagtggattttcacggtatcttccagctagacgagaggcgtcgggatgcagtgattgccctcggtatcttcctcatcgagtccgacctccagcataaggattgtgtggtcccatacttgttacggctcttgaaggggcttcccaaggtctactgggtggaagaatccaccgcacgcaaagggcggggcgctttaccggtagccgagtcattcagtttctgtctggtcaccctgctctctgatgttgcttatagagatccctctcttcgagacgaaattctagaagtgctcctccaggtgctccatgttctcctggggatgtgtcaggctttggaaatccaggacaaggagtacctttgcaaatatgctataccatgtctcattggcatcagtcgagcgttcgggaggtactccaacatggaagagtccctcctatctaagttattcccaaaaattcctccccatagcttaagggtgctggaggagctggaaggcgtccggaggcgctcatttaacgactttagaagcatcttgccctcaaatttgctcactgtctgccaagagggcaccctgaaaagaaagacgagttcggtgtccagtataagtcaggtttctccagagagaggcatgcctcctccctcttccccaggcgggagtgcctttcactactttgaagcttcttgtctacccgacggcaccgcgttagagccagagtattattttagtacaatctcatcctccttcagcgtgtctccattgttcaatggagtaacttataaggaattcaacatcccactagaaatgctgagagagctcctgaacctggtgaagaaaatcgtggaggaagcagttctgaagtccttagacgctatcgttgcatccgtcatggaggccaacccgtcagccgacttgtactatacatctttttcggatccgctgtatctcacaatgttcaaaatgttaagggacaccctctattacatgaaagacttaccgacttccttcgtgaaggaaatccatgactttgttctggaacagtttaatacgtcccagggcgagctacagaaaatcctgcacgacgctgaccgcatccataacgagttgagcccattgaagttgagatgtcaggccaacgctgcctgcgttgacttgatggtgtgggctgtgaaagatgaacagggggccgaaaatctgtgtatcaagttaagtgaaaagttacagtctaagacatcctccaaagttatcatagcacatctaccactgttaatatgctgcttacaagggttagggagattgtgtgagagattccctgtggtggtgcactccgtgactccttccctgagagacttcctcgtcatcccgtcacctgtgctggtgaagctctacaagtatcacagccagtatcatacggttgccgggaatgacattaaaattagcgtcactaacgagcacagcgagtctaccttgaatgttatgtcaggtaaaaagtcacagccctccatgtatgagcagctgcgcgatattgccatcgataatatctgtcgctgcctgaaggctggtctcactgtggaccccgttattgtggaagcattcctggcctcactctccaaccgcctgtatattagccaagagtctgataaagatgcacatcttataccagatcatacaattagggcacttggccatatagcagtggcactccgcgatacaccgaaagtgatggagcctatcctacaaatactgcagcagaagttctgtcagccccccagcccgctggacgtgctgataatcgaccaactcgggtgtcttgttattaccgggaatcaatatatctaccaggaagtgtggaatctgtttcagcagattagtgtcaaagccagcagcgtagtgtattcggccaccaaggattataaggatcatggctatcgacactgcagcttagctgtaattaatgctctggccaatattgcagccaacattcaggacgagcatttggttgatgaacttctcatgaaccttctggagctttttgtgcaactcggtctcgagggcaaaagggcctccgagcgggcctccgagaagggccccgcgctaaaggccagctcttcagctggcaacctaggcgtgctcatccccgtgattgctgttctaacccggaggttgccacctatcaaggaggctaaacctaggcttcagaagctctttagagatttttggctatactcagtcttgatgggcttcgcagtcgagggtagtgggctgtggcccgaggagtggtatgaaggagtctgcgagattgctaccaaaagccccctactcactttcccctctaaggagcctctccggtccgtcctccagtataatagcgccatgaaaaatgacacagtgacacccgcagagcttagcgagctgcggagtaccatcatcaatctactggatccacctccagaggtctcggcactaattaataagctcgatttcgccatgtccacttatctgctctccgtgtaccgtttggaatacatgcgggtcctccgctctaccgatcctgatcgcttccaggtcatgttctgctattttgaagacaaagcaatacagaaagataagtctggtatgatgcagtgcgtgatcgccgtcgccgacaaggtgtttgatgcctttctaaatatgatggctgacaaggctaagacaaaggagaacgaagaggaacttgagaggcacgcacagttccttcttgtcaatttcaaccacatccataaaagaatcagaagggtagccgataaatatctctccggactcgtagacaaattcccccacctgctctggtccggcaccgtgctgaagaccatgttagacatcctgcagactttgtcacttagcctaagcgctgacattcataaggaccaaccttattatgatattccagacgcaccctatagaattacagtccccgatacatacgaggcccgcgaaagcattgtgaaagactttgcagctcgatgtggaatgatcctgcaggaagctatgaaatgggctcccacagtcactaaatctcacctgcaggaatacctgaataaacaccagaattgggtgagtggcttgagtcaacacaccgggttagcaatggcaactgagtccatactccatttcgcaggatacaataagcaaaacacaaccctgggcgctacccagctgtctgagaggccagcctgtgtgaagaaagattattccaattttatggcgagcttgaatctgcgtaatcggtacgctggtgaggtttatggaatgatccgttttagtggcacaactgggcagatgtctgaccttaacaaaatgatggtccaagatcttcacagtgccctggatcgttcccacccccaacactatacacaagctatgttcaaactgaccgctatgctcatcagcagtaaagactgtgaccctcaactcctgcaccacctgtgctggggacccctgagaatgttcaatgagcacggcatggagacagccttggcttgctgggagtggcttctggcaggaaaggacggagtggaagtgccgttcatgcgggagatggctggcgcctggcatatgacggtggagcagaaattcggcctgttttccgcagaaataaaggaagccgaccccctggctgcctccgaggccagtcagcccaaaccatgcccacctgaagttacgccccactatatctggattgattttctggtgcagagatttgagatagccaagtactgtagcagcgaccaggtggaaatcttcagtagtctgctacagagaagcatgagccttaatatcggaggggctaaaggctcaatgaaccggcatgtggctgcaataggccccaggttcaaattgctaaccctagggctgagccttttgcacgccgatgtcgttcccaatgccaccattaggaatgtgcttagagagaagatctatagtacagcctttgactacttctcgtgtccaccaaagttccccacgcagggggaaaagagactccgcgaagacatcagtataatgattaaattctggaccgccatgttttccgataaaaagtatctcacggccagccagctggttcctccagacaatcaggataccagaagtaacctggatattactgtggggtccaggcagcaagccacccagggctggattaacacataccctctctcttcagggatgtctacaatatcgaagaagtctgggatgagcaaaaaaacaaacaggggctcgcagctccataagtattacatgaagaggcgcaccctgctattgtctctgctggccacagaaatcgagcgtctgattacctggtataatccgctgtccgcgcccgaactggaattggaccaggcaggcgaaaactccgtggccaattggcggtcgaaatatatctccttgtcagaaaagcagtggaaggacaacgtaaatctcgcgtggagtatttcaccatatctcgcggtgcaactgcccgcacggtttaagaacaccgaggccattggcaatgaagtgacaagactggtcagacttgaccctggcgctgtgagcgacgtgccagaggctatcaaattcttagtgacctggcacaccattgatgcggatgccccggagctgtcacacgtcctatgctgggccccgactgatccgcctaccggtctctcatacttttcctcaatgtaccccccccacccactcaccgcccagtacggcgtgaaagttctgcggagtttcccacctgatgctattcttttctatattccacagatcgtgcaggccttgaggtacgataagatgggatatgtccgtgagtatatcctgtgggccgcctcgaagtctcagttactggcgcatcagttcatctggaacatgaaaaccaatatttatctggacgaagagggccatcagaaggatcctgacatcggcgacttattggaccagctggttgaagaaatcacaggctccttatcaggtcccgcgaaagacttctatcagagagagttcgatttttttaacaagattaccaacgtgagtgccattattaaaccttaccccaagggtgatgagaggaagaaagcctgtctgtccgcactgtctgaggtcaaagtccagcccgggtgttatctgccaagcaaccccgaggccatcgttttggatattgattacaaaagcggcactcccatgcagagcgccgcaaaggctccatatctcgccaaattcaaagtgaagcgctgcggggtcagcgagcttgagaaagagggccttagatgtaggtcggacagcgaggatgagtgttccacgcaagaagctgacggccaaaagatctcctggcaggcggctatctttaaagtgggagatgattgcaggcaggatatgctggcactccagattattgacctttttaaaaatatttttcagttggtggggctggatctgttcgttttcccatatagagtggttgcgacagctcctggctgcggggtgatcgagtgcattccagattgcacttctagagatcagctcggtagacagacagatttcgggatgtacgactattttacccggcagtatggagacgaatcaacgctcgcgtttcaacaagccaggtataatttcattcgttctatggctgcgtattccttactcctgttcctgttacaaatcaaggatcgccataacggaaatatcatgctggacaagaagggccacataatccacatagatttcgggtttatgtttgaaagctcccccggtgggaacctcggctgggaaccagacattaagctgacagacgaaatggtgatgatcatgggcggcaagatggaagccactcccttcaaatggttcatggagatgtgcgtgcgcgggtatctggctgtccgaccgtacatggacgccgtggtctccttggtcactctcatgctggacacagggctgccatgcttcagaggtcagaccatcaagctgctaaagcacagattcagcccgaacatgaccgaaagagaggccgccaactttatcatgaaagtaattcaaagctgttttctgtccaaccgaagccgaacctacgatatgatccaatactaccagaacgatataccatattag

SEQ ID NO: 128377 - DNA, 1440 bp, synthetic construct
  misc_feature 1..1440: note = Description of Artificial Sequence: Synthetic coding sequence
  source 1..1440: mol_type = other DNA
atggacgaaacttctccactggttagccctgaaagagcacagcctcctgactacacatttcccagtggctcaggcgcccactttcctcaagtgccagggggtgccgtgagggtggccgctgcagctggatccgggccttcgccaccaggctcaccgggacacgatagggagcgccagcccctcctggaccgagctaggggcgccgcagcccagggccaaacccaaacagtagcggcccaggcccaagccctggccgcacaggcggcggccgctgcgcacgccgcccaagcgcaccgcgagagaaacgaatttcccgaagatcctgagtttgaagcagtggtgaggcaggccgagctggccatcgagagatgtatatttccagaacggatttaccaggggtcatctggatcctattttgtcaaggatccccaggggaggatcatcgctgtttttaagcccaagaacgaagagccgtacggccacttgaacccaaagtggacaaagtggctgcaaaagctctgctgtccatgctgcttcggcagggattgcctcgtgctcaaccaaggatatctgtcagaagctggagccagccttgtggaccaaaaactggagctgaatattgtgccccggaccaaagttgtttacctcgccagtgagacattcaactattcggctatcgatagggtgaaaagtcggggcaagcgcttggcactcgagaaggtgcccaaggttggacagcgcttcaataggatcggactgccgcctaaagtcggttccttccagttgtttgttgaaggatataaagacgcagactattggctacgccggtttgaggccgagcccttgcctgaaaacacaaaccggcaattactgttacagtttgaaagacttgtcgtgttggattatataatccgtaacacagacaggggaaatgacaattggctgatcaagtacgattgccccatggatagcagcagttcccgggacacggactgggttgtggtgaaggagcccgtcataaaagtcgcggcgatcgacaacggacttgcatttccattgaagcacccagattcctggagagcctaccctttctactgggcctggctgccacaagccaaggtccccttcagccaggagattaaagacctgattcttccgaaaatttcagaccccaactttgtgaaggacttggaagaagacttatacgaactgttcaagaaggacccgggattcgataggggccagttccacaaacagatcgcggtgatgagagggcagatactcaacctcactcaggctttaaaagacaacaagtcgccattgcatttagtccagatgccccctgtgatcgtggagacagccaggtcccaccaacgatcctctagcgagagctatacacagagtttccagagcaggaagcctttcttttcctggtggtag

SEQ ID NO: 128378 - DNA, 1350 bp, synthetic construct
  misc_feature 1..1350: note = Description of Artificial Sequence: Synthetic coding sequence
  source 1..1350: mol_type = other DNA
atgctgggcccccaggtgtggtccagcgtgcggcagggactcagccgaagtttgagccggaacgtgggagtctgggctagcggcgaagggaagaaggtagatattgctggaatctatccgccagtcaccaccccctttacagcaacggcagaagtcgactacggaaaactggaggaaaacctccacaaacttggtactttcccgttccgaggcgcagtaggtggggtgtgtgcactggcaaacgtgttgggggcacaggtatgtcaacttgagcggctctgttgcacagggcagtgggaagatgcccagaagctacagcatcgcctaatcgaacctaacgccgcacgaatcatcgccgtgtttaaaccgaagaacgaagagccctacggccacttgaaccccaaatggaccaagtggcttcagaagctttgctgcccctgttgttttgggcgggactgcttggttctcaaccaaggttacttgtccgaggccggggcatcactggtggatcagaaactcgagctgaacatcgtgcccagaactaaggtagtttatctggcctcggagacattcaattactccgcgattgatagagtaaagtcaaggggaaagcgcctcgctttagagaaggttcccaaagtcggacagcgatttaaccggattggtctgccaccaaaggttggctctttccaactgttcgtcgaagggtataaggacgctgattattggttaaggaggtttgaagctgagcccctccccgaaaacaccaatcgccagctgttacttcagtttgaacgcctggtggttctggattacattattcggaacactgaccgcgggaacgacaattggcttattaagtacgactgccccatggatagctcttctagtagggatacggactgggtggtcgtaaaagagcctgtgataaaagttgccgccattgataacggcctggccttcccgcttaagcatccagatagctggcgggcctatcccttctattgggcctggctccctcaggcgaaggtgcctttctctcaagaaattaaggatctgattctgcccaagatatcagaccccaatttcgtgaaggaccttgaggaggacctgtatgaactctttaaaaaagatcctgggttcgatcgcggccagttccataagcagattgccgttatgagaggacagatattgaatctcacacaggcgctcaaggacaataaatcccctcttcacttggtccagatgcccccagtgattgtcgaaaccgctaggagtcaccagcgatcaagctccgagtcctatacccagtcttttcaatctcgcaagccattcttctcctggtggtag

SEQ ID NO: 128379 - DNA, 1446 bp, synthetic construct
  misc_feature 1..1446: note = Description of Artificial Sequence: Synthetic coding sequence
  source 1..1446: mol_type = other DNA
atggaggatccgtcagaacctgatagacttgcttccgccgacggtggaagtccagaggaggaggaagacggcgagcgcgagccgttgcttcccagaatcgcatgggcccacccacggcgcggcgcccccggcagcgcagttcggttgttggacgccgcaggggaggaaggcgaagccggagacgaggagctgccactcccgcccggcgacgtgggtgtttctaggtcctctagcgccgaactggaccgctcacgcccagctgtgtcagtgactatcggcaccagcgaaatgaatgcatttctggacgaccctgagttcgctgatatcatgctgagggccgagcaggccatcgaggtgggcattttcccagagcgtatcagccagggcagttccggatcctactttgtgaaagaccccaagcggaagattattggagtgttcaagcccaagtcggaggagccatacgggcagttgaacccaaagtggacaaaatacgtccataaggtttgctgcccatgctgctttggacgaggatgcctgatccccaaccaggggtatcttagcgaagcaggggcctatttagtcgacaacaagctgcatctgagcattgtgcccaagaccaaggtggtgtggctggtgtccgaaacttttaactataacgcaatcgacagagcgaaaagcagggggaaaaaatacgccctggaaaaggtcccaaaagtgggtcgcaaatttcaccggatcgggctcccacccaagattggcagctttcaactcttcgtagagggatacaaggaggctgaatactggctgagaaagtttgaggccgatccactgcctgaaaatatcaggaaacagttccagtctcaattcgagcggctcgtgattttggactacatcattagaaacactgataggggaaatgacaattggctcgtccggtacgagaaacagaagtgcgaaaaggagattgaccacaaggagtcaaaatggatcgatgatgaagagtttcttataaagatcgccgcaattgataatggactcgccttccccttcaaacaccccgacgaatggagagcttatccatttcattgggcatggcttccccaggccaaggtgcctttttctgaggaaatacgcaatctcatcttgccatacatttctgatatgaatttcgttcaggatttgtgcgaggacctgtatgagttgttcaagaccgacaagggctttgacaaggctactttcgaatcccaaatgtccgtcatgcgcggacagatcctgaacctgactcaggcacttcgggacggaaagagcccatttcagctcgttcagataccatgtgtcatcgtggaaagaagccagggcggttctcaggggagaattgtgcacctgagcaattctttcacgcagactgtaaattgcagaaaacctttcttctcaagctggtag

SEQ ID NO: 128380 - DNA, 1353 bp, synthetic construct
  misc_feature 1..1353: note = Description of Artificial Sequence: Synthetic coding sequence
  source 1..1353: mol_type = other DNA
atggaggacccttccgagcctgaccggctggcttcagcggacggtggaagcccagaagaggaggaggatggcgagcgcgagcctctcctccccagaatagcctgggcccaccctcggcgaggcgccccgggttctgcagtgcgactcctggacagaagcagacccgccgtgtctgtgacaattggcacgtctgagatgaatgccttcctcgacgacccggaattcgctgatatcatgctgcgcgcggagcaagctatcgaggtggggatcttccctgagcgaattagtcaggggtctagcggctcatatttcgttaaagatcctaagcgcaaaattatcggggtgttcaagcctaaatcggaagaaccctatggccaactgaatcctaaatggacgaagtacgtgcacaaagtgtgttgtccctgctgctttggacggggttgcctcattccaaatcagggctatctttcagaagctggggcgtacctggtcgacaacaaactgcatttgtcaattgtgccaaaaaccaaggtcgtctggctcgtgagtgagacatttaattacaacgcaatcgatcgcgctaaatcccgcggaaagaagtacgcgcttgagaaggtccctaaagtggggaggaaatttcaccgtattggactgccacccaaaataggctcattccagctgtttgttgagggctacaaggaggccgaatactggctccggaaatttgaggccgatccacttcctgagaatataagaaaacaattccaatcacagtttgagcgcctcgtcattcttgactatatcatcaggaataccgacaggggtaacgataactggctggtaagatatgaaaagcagaagtgcgagaaagagattgaccataaggagagtaaatggatcgacgacgaggaattcctaattaaaatcgctgctatcgataacgggttggccttcccttttaaacatccagacgaatggcgcgcatacccattccactgggcctggctccctcaggccaaggtaccattctcggaagaaatacggaatctaatactgccctacatctccgatatgaacttcgtgcaagatctgtgtgaggatttgtatgagctctttaagaccgataagggatttgacaaggccacatttgagagccaaatgtccgtgatgcggggtcagattttgaatctaacacaggcgctgagagacggaaagtccccgtttcagctcgtgcagatcccgtgcgttatcgtggaaagaagtcagggtggcagccaggggaggattgtgcatctttcaaactcatttacacagacagtgaactgtcggaaaccatttttttcttcgtggtag

SEQ ID NO: 128381 - DNA, 6135 bp, synthetic construct
  misc_feature 1..6135: note = Description of Artificial Sequence: Synthetic coding sequence
  source 1..6135: mol_type = other DNA
atgtgtcctgtggacttccacggcattttccagctggacgagaggaggcgtgatgccgttatcgccctcggcatcttcttgatcgagtcggatttacaacataaagactgtgttgttccatatctgcttcgtctgctcaagggacttcccaaggtttattgggtcgaggagagtacggctcggaaaggtcggggcgcactcccggtggccgagagcttcagtttttgcctggtgaccctgctcagtgacgtggcctatagggacccctccctccgagatgagattctggaagtcctacttcaggtgcttcatgtgttacttgggatgtgccaggccctggagatccaagataaagaatatctttgcaagtatgccataccgtgcctgataggtatttcaagagcgttcggacggtattccaatatggaggaatcattactgtccaaactttttcctaaaatacccccacatagcctgcgcgtcctcgaagaacttgagggagttagaaggcggtccttcaatgatttcaggagcattctccccagcaacctccttacggtttgccaggagggaacgctcaaaagaaagacctctagtgtaagttcaatatcgcaggtgtcaccggaaaggggtatgccgcctccatcttctcctgggggcagcgctttccattattttgaggcttcgtgcctgccagatggaactgctctggagccagagtactatttctctacaatcagtagtagcttctccgtgagtccgttgtttaacggggtcacctacaaggagttcaatatccccctcgagatgctgagagagcttctgaatctggtcaagaagatcgtggaggaggctgtcctgaagtcactcgatgcaattgtcgcatcagttatggaagccaatccttcggcagatctgtattatacatcttttagcgatcctctgtacctgaccatgtttaagatgctgcgagacacactatactacatgaaagatctgcctacctccttcgtgaaggagatccatgactttgtgctcgagcaatttaataccagccagggagaactgcagaaaatcctgcacgatgcggatagaattcataacgagctcagccccctgaagttgagatgccaggccaatgccgcctgtgtagaccttatggtctgggcagtcaaggatgaacagggagccgagaacttgtgcatcaagctgagtgaaaaacttcagtccaaaacttccagcaaggtaatcattgctcacctcccactgctcatctgttgccttcagggactagggcgcctgtgcgagcgctttcctgtggtggtgcactccgtgacacctagcttacgtgatttcttagttatcccatcaccggttttagtcaaactgtataagtaccactcacagtaccacacggtagcggggaacgatataaagatctctgtgaccaacgaacattcagagagcacgctgaatgtgatgagtggcaagaagagtcaacctagcatgtacgagcagctaagagatatagcaatagataacatttgcaggtgtttaaaagcaggcttaactgtggaccccgtgatcgttgaggccttccttgccagtctttctaaccggctctatattagccaggaatccgacaaagacgcacacttgataccagatcataccatcagggctctaggtcacatcgccgtagcacttcgggatacacctaaggtgatggaacccatcctgcagattctccagcagaaattctgtcagcctcctagccctctggatgttttaatcatcgaccagttgggctgtctggtgataactgggaatcagtacatttatcaggaagtatggaatctgtttcagcagataagcgtgaaggcatccagcgtggtttactccgcaaccaaagattataaagaccatggctacaggcactgttctctcgccgtgataaatgctctggcaaacattgccgcaaacatccaagatgaacacctcgtagatgagctgctgatgaacctgcttgagctgtttgtgcagcttgggttagaaggtaagagagccagcgagcgggcctctgagaagggccccgcccttaaagcttcttccagtgctggcaacctcggagttttgatacccgttatcgctgttctgactcggagactaccgcctataaaggaggcgaagcctagactccaaaagctgttcagagatttctggctgtattcagtccttatgggcttcgctgtcgaagggtctgggctttggccagaggaatggtatgagggcgtctgtgagatcgccaccaagtctcctttgctgacctttcctagtaaagagcctctgcgctcggtcctgcagtataacagcgcaatgaagaacgacaccgtgacacccgcggagttgtcggagctgcggtctaccattattaatttattagaccccccacccgaggtctccgcacttatcaataaacttgactttgccatgagtacatatctcctgtcggtttaccgtttggagtacatgcgagtcctgagatccacagaccctgatcgctttcaggtgatgttttgctatttcgaagataaagcaatccagaaagataagtcaggcatgatgcagtgtgtgatcgccgtggccgacaaagtattcgacgccttcttaaacatgatggccgacaaagccaagaccaaagagaacgaggaagagttagaaaggcatgcccaatttttgctggtaaatttcaaccacatccacaagaggattcgtagagtggccgacaaatacctttctgggctcgtcgataagttccctcaccttctgtggagtggtaccgtgctgaaaaccatgctcgacatcctccaaacattgtcactgagtctctcggccgatatacataaagatcagccatactatgacattcccgacgcaccctatcgaatcacagtgcccgacacatatgaggcccgggaatcaatcgttaaggacttcgctgctaggtgcggcatgattttacaggaagcaatgaagtgggcaccaacggtgacaaagtcccatctccaggagtacctgaacaagcatcagaactgggtgtctggactgagccagcacacaggcctcgccatggcaaccgagagcatacttcacttcgctggctataacaaacagaacacaactctaggagccacccaattgtcggaacggcccgcctgtgtgaagaaagactatagcaactttatggcctccctgaacctccgcaaccggtacgcaggagaggtgtatggaatgatcagatttagtggcacaacggggcagatgtccgacctaaataaaatgatggtgcaggacctgcacagcgctttggatagatctcatccccagcattacacccaagcgatgtttaagttgacagccatgctgataagctctaaagattgtgatcctcagctgctgcatcatctctgctggggtcctctacgcatgtttaatgaacacgggatggaaaccgccttggcatgctgggagtggcttctagccgggaaggacggcgtggaagttccattcatgcgtgagatggcaggggcctggcatatgacagtggagcagaaatttggcttattttcggccgagattaaggaggccgatcccctggctgccagcgaggcaagtcagcccaagccctgtccacctgaagttacaccacattacatatggatcgacttcctggtacagcgtttcgaaattgccaagtactgctccagcgaccaggtagaaattttctccagtcttttacaacggtctatgtccttgaacataggcggcgcgaagggctcgatgaataggcacgtggccgccatcggccctagatttaagctattaaccctcggcctcagcctcctgcacgcagatgtggtccctaacgccaccattcggaacgtgctcagagagaagatctactccactgcatttgactactttagctgtccaccaaagttccccacccagggggaaaagagactaagagaagacatcagcattatgattaagttctggacggccatgttctcagacaagaagtacctgacggcctcccagctagttcctccggacaaccaggatacccgatcgaatcttgacattaccgtcggctctaggcagcaggctacccaggggtggattaacacataccctctgtcttcagggatgtcaacaatatccaaaaagtcaggaatgagcaagaagacaaaccggggctcacagttgcacaagtactatatgaagcgtcggaccctgctcttgagtctgctggccactgaaatcgagcgactaataacatggtataaccctctgtcagccccggagcttgagctggatcaagctggagaaaacagtgtagcaaattggcggtccaaatatatcagtttaagcgaaaagcaatggaaggataatgtgaacctcgcatggtctatcagcccgtatctggctgtccagttaccagcccggttcaagaacactgaggccattggcaatgaggtaacccgcctggtgcgtctggatcccggagccgtctccgacgtcccggaagccatcaaatttcttgtcacatggcacacaatagacgccgacgctccggaacttagtcatgtgctttgttgggccccaacggacccacccactggactttcgtacttctcgagcatgtatccacctcatcctctgacggctcagtatggcgtcaaagtgctcagaagctttcctccagacgccattttattctacataccacagatagtacaggcactcagatatgataaaatgggttatgtgcgcgagtatatcctgtgggctgcctctaaaagccaattgctggcacaccagtttatatggaacatgaagacgaacatttacctggatgaggagggccaccaaaaggaccccgatatcggtgatttactggatcagcttgtggaggagatcactggatctctgtctggccctgctaaagatttctatcagcgcgagtttgacttctttaacaaaataaccaatgtctccgctattatcaagccctatccgaagggagacgagcgcaaaaaagcctgtctatctgcactttcggaggtcaaggtccagccgggatgttacctgccatccaacccagaagcgatagtgctcgacattgattataagtccggcacacccatgcagtccgccgccaaggctccctacctcgcgaaatttaaagtgaagcggtgtggcgtgagtgaattggagaaagagggcctgagatgcagatctgattctgaagacgaatgtagtacccaggaggctgatgggcagaagatcagctggcaggctgccatcttcaaagttggtgacgactgcaggcaagacatgctcgctctgcagatcatcgatctctttaagaatatcttccagctggttggcctggacctgtttgttttcccctatcgcgtggttgcaactgcacctggctgcggggtgatagagtgtatccccgattgcacgagccgtgatcagctcggcagacagactgatttcggtatgtacgactacttcactcgccagtatggcgacgagagtaccctggcttttcaacaggccaggtataacttcattagatcaatggccgcttattcactactgctttttctgctgcagatcaaagataggcataatggaaatattatgttggataagaagggccatattatccacatcgattttggctttatgttcgaaagctctccaggtggaaatctgggttgggagccagacataaagcttacagatgagatggtgatgattatggggggcaaaatggaagctacccctttcaaatggtttatggaaatgtgcgttcgcggttatctcgcagtgcggccctatatggacgctgtggtgagcctcgttaccttgatgctggataccgggctgccatgctttcgcggacagacgattaagttactgaaacacaggttttcaccaaacatgaccgaaagggaggccgccaatttcatcatgaaggtcatccagagctgctttttaagtaatagatcgaggacttacgatatgatccagtactaccagaacgatatcccatattag

SEQ ID NO: 128382 - DNA, 2565 bp, synthetic construct
  misc_feature 1..2565: note = Description of Artificial Sequence: Synthetic coding sequence
  source 1..2565: mol_type = other DNA
atgcgtgagatggctggggcgtggcatatgacggtcgagcagaaatttgggctattctccgccgaaattaaagaggcagatcccctggctgcaagtgaagcgagccagcccaagccctgtcctcccgaggtaactccacactacatttggatcgacttcttggtgcaacgtttcgagatagccaagtactgtagttcagaccaggtggagatattcagcagcttgttgcaacgaagcatgtcattgaacatcggaggagccaaggggtccatgaacaggcacgtcgctgccatcgggccaaggtttaagctcctgacactcggcctgagtctgctccatgccgacgttgtgccaaacgctaccatccggaatgtactccgagagaagatttacagcacggcctttgactacttttcctgtccacccaaattccctacacaaggcgagaaaagactaagagaagatatcagcattatgattaaattctggacagccatgttttctgacaagaaatacttgacagcttcacagctcgtccctcctgacaaccaggatacgaggagtaacttggatatcacagtgggaagcaggcagcaggcaactcaggggtggatcaatacttaccccttgtccagtgggatgtcgaccatatccaaaaaatcaggcatgtccaagaagacaaatcgggggtctcaactccataagtactacatgaagcggcgtaccctcttgcttagccttctggccactgagattgagcgtttgataacttggtacaatcccctatctgctccagagttggaactggaccaagctggagaaaatagtgttgcaaactggcgctccaagtatatctcattgagcgagaaacaatggaaggacaacgtgaacctggcgtggtcaatctccccatacttggccgtccagctgcccgctcggtttaaaaataccgaagccatcggaaacgaagtaacccgcctggtgcgacttgatcctggagcggtgagcgatgtgccagaggccattaagttcttagtgacttggcataccatcgacgctgatgcgcccgaactttcccacgtcctatgttgggcccctactgatccccctacaggtctcagctatttttcatccatgtaccccccgcatcccctgaccgcacagtacggggtcaaggttctgcgctcatttccaccagacgccattctcttttacatcccccaaattgtccaggccctgcggtatgataaaatgggatacgttcgagagtacatcttgtgggccgcttccaaatcccaactgctggcccatcagttcatctggaatatgaagaccaatatttacctcgatgaagaggggcaccagaaggatccggatatcggcgatctgctcgaccagctagtcgaagaaatcacaggtagcctgtcaggaccagcgaaagatttctatcaacgagaattcgatttctttaacaaaatcaccaatgtgtcggcaataattaaaccatacccaaagggggacgagcgaaaaaaagcatgtctgtcagccctcagtgaggtgaaagtccagcccggctgttatcttcccagcaatcccgaggcaatagtgcttgatatcgactacaagagtgggaccccaatgcagagtgcagccaaggcgccatacctagcaaaatttaaggtgaagcgttgtggggtctccgaactggagaaggaaggtctgcggtgccgctccgactccgaagacgaatgtagtacccaggaagctgacggacagaagatatcatggcaggctgccatatttaaggtcggtgacgattgtcgtcaggacatgttagcgctccaaatcatagacctcttcaagaatatcttccagctggttggactggatctctttgtgtttccctaccgagtggtcgctacggcccctggctgcggcgtaattgagtgcattcccgactgtacaagccgcgaccagctgggaaggcagacagatttcggaatgtacgactacttcacacggcagtatggagacgagtccacgttggcctttcaacaagctcgatacaattttataagatcaatggcagcttactctctcttactattcttactgcagattaaggatcgacataacggtaatatcatgttggacaagaagggacacatcatccacatcgacttcggatttatgtttgaatcctctcctggagggaacttaggctgggagccggatatcaaactgactgatgagatggtgatgataatgggtggcaagatggaggctacaccttttaaatggttcatggagatgtgtgtgaggggctatctcgccgtgcggccctatatggacgctgttgtgtcactggtaacactgatgctggatactggactcccctgcttccgggggcagacaatcaaattacttaagcataggtttagccctaacatgaccgagcgcgaagcagccaacttcataatgaaggtgatccagtcatgctttctgtcgaaccggtctaggacctacgacatgatccagtattatcagaacgacatcccatactag

SEQ ID NO: 128383 - DNA, 264 bp, synthetic construct
  misc_feature 1..264: note = Description of Artificial Sequence: Synthetic coding sequence
  source 1..264: mol_type = other DNA
atgtgccccgtggattttcacggcatcttccaattggatgaacgcagacgggatgcagtgattgctctcggcatatttttgatagagtccgatttgcagcacaaagactgcgtggtgccttatctcctgaggctgcttaaggggctgcccaaagtctactgggtagaggaatcaacagcacgaaagggccggggtgccctccccgtggcagagagttttagcttctgcctcgtcacgctcctttccgatgtggcatacagatag

SEQ ID NO: 128384 - DNA, 1959 bp, synthetic construct
  misc_feature 1..1959: note = Description of Artificial Sequence: Synthetic coding sequence
  source 1..1959: mol_type = other DNA
atgagcggccagtctttgaccgatcgcatcaccgcggcccagcattcagtaacaggctcagctgtctctaagacagtctgtaaggcaaccacacatgaaatcatgggcccaaagaagaaacacctggactacctcatacagtgcacaaatgagatgaatgtgaacattccccagctcgcggactctctgtttgagcgcacgaccaatagtagctgggtagtcgtgttcaaatccctgattaccacccaccacctgatggtttatggcaacgagagatttattcagtatctcgcgagcagaaacacgctgttcaacctctcaaatttcttggataagtcaggactgcagggctatgatatgagcacttttattagaagatattcccggtacctcaatgagaaggcagtgtcctaccggcaagtggcctttgacttcactaaagtaaagaggggggccgacggagtgatgcggacaatgaacactgagaagctcttgaagacagtgccaattatacagaaccagatggacgcgctccttgactttaacgtgaatagtaatgagctgactaacggtgttattaacgcagcctttatgctgctgtttaaagacgctatacggcttttcgcagcctacaacgaaggaatcattaacctgctcgaaaaatacttcgatatgaagaagaatcagtgtaaagaggggttggacatatacaagaagttcctgactcggatgactcgcatctctgagttcctcaaggtggccgaacaagttggcatagatcggggagacatccccgatcttagccaagccccgtcaagcttgctcgacgccttagagcaacatctggcttctctggaaggcaaaaaaattaaggactctacggcggctagtcgcgctactactctgagcaacgcagtgtcttctctcgcgtccaccggccttagccttacgaaggtggacgaacgcgagaagcaagccgcattggaagaggaacaggctcgactgaaggcactaaaggagcagagactaaaagagttggctaagaaaccacacacaagtcttacgacagctgcatctcccgttagcacatcagcaggtgggatcatgactgcccccgctatcgacatcttttctactcctagcagttcaaattctacatctaaactccccaatgacctccttgatctgcagcagccgaccttccatccctctgtccaccccatgagcacggcatcccaggtggcaagtacctggggtgatcccttcagcgctacagtggatgctgtagatgacgcgatccccagcttaaacccattcttgaccaagtcgtctggggatgtgcatctgtcaatttcaagcgacgtgagtacatttacaaccaggactcctacacacgaaatgttcgtaggatttacccccagccctgtggcccagccacatccgtccgctggccttaatgtggatttcgagagtgtatttgggaacaagtcaaccaacgtgatagttgattccggtggcttcgacgagttaggcgggctgctcaaaccaacagtagctagccagaaccagaacttaccggtggccaaacttccgccctcgaagctggtgagcgatgacctcgattctagcttggcaaatcttgttggaaacttaggcatcggaaacggaacaacgaaaaatgatgtgaactggtcccagcccggcgaaaaaaagcttaccggcggcagcaactggcaacccaaggtcgcgcctactaccgcctggaacgctgccactatggctcctccggtgatggcctatcccgcgacaaccccaacgggtatgattggctacggcatacccccgcagatgggctctgtaccggtcatgacccagccaaccctcatctacagccaaccagtgatgcgtcccccaaatccctttggaccggtttctggggcacaaatccagtttatgtag

SEQ ID NO: 128385 - DNA, 1959 bp, synthetic construct
  misc_feature 1..1959: note = Description of Artificial Sequence: Synthetic coding sequence
  source 1..1959: mol_type = other DNA
atgtcaggccagagcttaactgacagaatcacagcggcccagcactccgtgaccgggtccgctgtgagtaaaactgtctgtaaagcgacaacacacgagatcatgggcccaaagaagaaacacctggattacctgattcagtgcacaaacgaaatgaacgtcaacattccacaactcgctgactctctattcgagcggaccacgaacagctcatgggttgttgtttttaagtcactcatcaccacccatcatctgatggtgtacggaaatgagagatttatccaatacttggcctcccgcaacactctctttaatctgagtaattttttagacaagagtggtctgcagggctatgatatgtcaacttttatcagacggtacagtaggtatctgaacgagaaggcggtatcataccgtcaggttgcttttgacttcactaaagtcaaaagaggagcagacggggtgatgagaaccatgaacaccgagaaactactgaagacagtaccgatcatccaaaatcagatggacgcgctgttagactttaacgtgaattccaacgagctcactaatggtgtgattaatgcggcgtttatgctgctgttcaaagatgctattagactgtttgctgcctataacgaagggatcattaacctgctcgagaaatactttgacatgaaaaaaaaccagtgcaaggaaggtctcgatatatataagaaatttctcacccggatgacacgcatctccgaattcttgaaggtggcggagcaggttggcatcgatcgcggggacattccggatctcagccaggcccccagctcactgctggatgcactggagcagcacctggccagcctggaagggaagaaaatcaaggactcaacggccgcttcgagggcaacaaccctaagtaatgccgtttccagtctggcaagcaccgggctgtccctgaccaaggtggatgagagagagaagcaggcagcgctggaggaagagcaagcccgcctgaaggcgctaaaagagcagcgcctgaaggagctggctaaaaaaccccacaccagccttaccaccgccgcttctccagtctccactagcgctggggggatcatgacagcacccgcgatcgatattttctccacaccctcttcttccaattcaacctctaaattacctaacgatctgcttgacctgcagcagcctaccttccaccccagtgtccatccgatgagtaccgctagtcaagtcgcttccacatggggcgatccatttagtgccacagtcgacgccgttgatgacgccataccctcactgaaccccttcttgacaaagtctagcggcgacgtgcacctgtccattagctcggatgtctcgaccttcaccactcgtacgcccacgcacgagatgttcgtcggttttacaccaagccctgtggcgcagccacacccatcagccggcttgaacgtggatttcgaatctgtctttggaaacaagagtaccaatgtgatcgtggactccggcggttttgatgagctgggaggcctgttgaagcccactgtagcctctcagaaccagaacctgccagttgcgaaattgcctcccagcaagttggtttccgatgacctcgactcatcactggcaaatctggtcggaaacctgggcattgggaatggaactaccaagaatgacgtgaactggtctcaacccggagaaaaaaagctgaccggaggctcgaactggcagcccaaggtagctccaaccactgcgtggaacgccgccaccatggctcctccggtgatggcatatcctgcaaccacaccaacaggcatgatcggctacggaatcccaccacaaatggggtcagtgccagtgatgacacagcccacattgatatattcccagccagtaatgcgacctcccaacccttttgggcccgtttccggcgctcagattcagtttatgtag

SEQ ID NO: 128386 - DNA, 1938 bp, synthetic construct
  misc_feature 1..1938: note = Description of Artificial Sequence: Synthetic coding sequence
  source 1..1938: mol_type = other DNA
atgtccggacagtccttaacggaccgcatcacggccgcacaacattctgtcaccggttctgccgtgtcaaaaaccgtgtgcaaagccaccacccatgaaataatgggacctaaaaagaaacacctagattacctgatccagtgcaccaacgagatgaatgtaaacattcctcagctcgccgattctctttttgaaaggaccaccaacagctcttgggtggtggtcttcaagagcctcatcactactcaccatttgatggtttatggaaatgagcgttttatacaatacctagccagtaggaacaccttattcaatcttagcaactttctggacaagtctggcctgcagggctatgatatgtccacatttataaggcgttactcaaggtatctcaatgagaaggccgtgagctatcgccaggtagcctttgactttaccaaggtaaagcgtggagcagacggggttatgcggacaatgaacacagagaaactactgaaaaccgtccccatcattcaaaatcagatggatgcactacttgattttaatgtcaactcgaacgagttgactaatggggtgattaatgccgcatttatgctgctcttcaaagacgctatccgcctttttgcagcttacaatgaaggtattattaatttgctggaaaaatactttgacatgaaaaaaaatcaatgcaaagaaggtctagacatttataagaagttcctaacccgcatgactaggatctctgaatttcttaaggttgccgaacaggtgggcatcgatagaggggacattccggatctgagccaggccccatcctccctgcttgatgcactagagcaacaccttgcaagtctggaaggcaaaaaaatcaaggactctactgccgcttccagggctacgacactgagcaacgcagtaagttccctcgcatctaccggcctaagcctgactaaggtggacgaaagagagaagcaagctgccctcgaagaagaacaggccagactgaaagcattgaaggagcagaggctgaaggagctggctaagaagccccatacatctctcactacagctgcttctccagtctctacatcggccggcggaattatgaccgctccagcaatagatattttcagtaccccttcgagctctaattctacgtcaaaattacctaatgatctcctggatctgcaacaacctacattccaccctagtgtgcaccccatgtccactgcaagtcaggttgcaagtacctggggtgacgcagtggacgatgcgattccttccttgaacccatttctaactaagagcagcggcgatgttcacctgtccattagtagcgacgtctctactttcactacacggacacccacccacgagatgttcgtgggtttcacaccctctcctgttgcgcaacctcatcccagcgcgggtttgaatgtggatttcgaaagcgtgttcggcaacaagtctacgaacgtgatagttgactcaggcggattcgacgagctgggagggctcctcaaaccaactgtggcctctcagaatcagaatctgcctgttgccaagctgccaccgtccaagctcgtatccgacgacctggatagcagcctggctaacctggtgggaaacctggggattggaaacggaacaacgaagaacgacgttaactggagtcagccaggggaaaaaaagctcactggggggagcaattggcagccaaaagttgctcctacgactgcttggaatgctgccaccatggcgccgcccgtcatggcctaccccgcaaccacacctacaggcatgatcgggtatgggattcctccccaaatgggaagcgtacccgtgatgacccaacccactcttatttattctcagcccgtgatgcgaccccccaacccctttggccctgtctctggtgctcaaattcaatttatgtag

SEQ ID NO: 128387 - DNA, 1833 bp, synthetic construct
  misc_feature 1..1833: note = Description of Artificial Sequence: Synthetic coding sequence
  source 1..1833: mol_type = other DNA
atgtccggccagagtcttacagaccgcataactgcagcccaacacagcgtaacaggtagtgctgtgtcaaaaacagtatgcaaggcaaccacacacgagatcatgggacctaaaaaaaaacacctagattacttgatccagtgcactaatgaaatgaatgtgaatatccctcagttagccgacagcctgttcgagcgaacgaccaactcttcttgggtggtggtattcaagtcccttattaccacccaccatcttatggtctacggtaatgagcgatttatacagtacttggctagcaggaacaccctttttaaccttagcaactttttggacaagtccgggttgcagggctacgacatgagtacattcatcaggcggtatagtagatatctcaacgaaaaagctgtgtcgtaccgccaggtcgccttcgatttcactaaggtgaaacgaggggctgatggcgtaatgagaacaatgaataccgaaaaactccttaagaccgtgccaatcatccagaatcagatggatgctctactggactttaatgtgaactctaatgagttaaccaatggagtaattaacgctgccttcatgctgctctttaaggatgctattagactgtttgcggcctataatgagggaatcatcaatctgctcgagaagtacttcgacatgaagaaaaatcaatgcaaagagggcctcgacatatacaagaaattcctcacgcgaatgacgagaatttctgagttcttgaaagtcgccgaacaagtgggtatcgaccgcggcgatatacctgatctctcccaggccccttccagcctgcttgacgcactggaacagcacctcgcctctctggaggggaaaaagatcaaggactctaccgcagcttcccgggctacaaccctgtcgaacgcagtgagttctctggcctcaactgggctgagcttgacaaaagtggatgaacgcgagaaacaggccgcactggaggaggagcaagctaggcttaaagccttaaaggagcagaggctcaaagagctggccaaaaaacctcacacgtctctgaccaccgccgcctcccctgtttcgacctccgccggaggaatcatgaccgctcccgctatcgatatcttttccactccgtcctccagcaatagtacttccaaactgcccaatgatctgctggacctgcagcaacctacattccacccaagcgtccaccccatgtccactgcctctcaggtagcatcaacctggggagggttcacgccttcaccggtggctcagccccatccatcggctggcctgaatgtagactttgagtctgtattcggcaacaaatctacaaacgtgatcgtggatagtggcgggttcgacgagctcggggggctgctgaagcccaccgtggccagtcaaaaccagaacttaccagtggccaaattgcctcccagcaagctggtgtctgatgacttagattccagcctggctaacttggttggaaatcttgggattgggaatggcaccactaaaaatgatgtaaactggagtcagcctggagaaaagaagctgacaggcggcagcaattggcagcccaaggtcgcccctacaactgcttggaacgcagccaccatgaatgggatgcactttccacaatacgcccctcccgtaatggcctacccagcgacaaccccgaccggcatgatcggctatgggatcccccctcagatgggcagcgtgcccgtcatgacccagcctactctgatttattctcaacccgtgatgaggcctcctaacccatttggccccgtgtcaggcgctcaaatacagtttatgtag

SEQ ID NO: 128388 - DNA, 1656 bp, synthetic construct
  misc_feature 1..1656: note = Description of Artificial Sequence: Synthetic coding sequence
  source 1..1656: mol_type = other DNA
atgaacgtcaacatcccgcagctggcagacagcctgtttgagaggaccaccaactctagctgggtcgttgtgtttaagtctctgatcaccacccaccacttgatggtctacggcaacgagagatttatccagtacttggcgtcgcggaatactttgtttaatctgtccaactttcttgacaagagtggccttcagggctacgacatgagcacttttatccggcgttacagcagatacctgaatgagaaggccgtttcctacaggcaggttgcatttgatttcacgaaagtgaagcggggtgcagacggcgtcatgcggactatgaacactgagaagcttctcaagactgtaccaatcatccaaaatcagatggacgccctactggatttcaacgtcaattctaatgagctaactaacggtgtaattaatgccgcatttatgttgttgttcaaagatgccattagacttttcgccgcttacaatgaaggaattatcaacttgctcgagaaatactttgatatgaagaagaaccagtgcaaggagggcctagacatttataaaaagtttctaaccaggatgacacgtatatctgagttcctgaaggtcgctgaacaggtcggtatcgaccgaggagacataccagacctcagccaggctccaagcagcctgctggatgcactcgagcagcacctggcttcactggaaggaaagaaaatcaaagactcaacggctgctagccgtgccacgaccctgtcgaacgccgttagctccctggcctccacaggtctctcccttaccaaagtcgacgagagagagaagcaagccgcccttgaagaagagcaggccaggcttaaggccttgaaggagcagcgtttaaaggagcttgcaaagaagccccatacaagtttgaccacggccgcgagtcctgtttccacttcagcgggcggaataatgacagcccccgccatcgacattttcagcaccccctcttctagtaactccacttcaaaactgcccaatgacctgctggacttgcagcagcccacgtttcacccctctgtccatcctatgtctactgcttctcaggtcgcctctacttggggaggcttcaccccatcccccgtggcacaaccacatccttcagccggacttaatgtggacttcgaaagtgtcttcggtaacaagtctactaatgtgattgtggactcaggtggattcgatgaattggggggactgctgaaacctaccgttgctagtcagaatcagaacctccccgttgccaaattgccccctagtaagcttgtgagcgacgacttggattcgagcctggctaatcttgtggggaatctgggcatcggcaatggcactaccaaaaatgacgtgaattggtcacagcctggtgaaaagaaacttacgggaggcagtaattggcagcctaaggtagctcctaccacagcatggaacgctgctacaatggctccgcccgtgatggcttatccggccaccactcccaccggcatgatcggctacggaatcccaccacagatgggctcagtgcctgtcatgacccagccaaccttgatctactcccagcctgtgatgcggcctccaaacccatttgggcccgtctcaggagctcaaattcagttcatgtag

SEQ ID NO: 128389 - DNA, 1455 bp, synthetic construct
  misc_feature 1..1455: note = Description of Artificial Sequence: Synthetic coding sequence
  source 1..1455: mol_type = other DNA
atggcctgccggggtggcgcaggcaatgggcaccgtgctagcgcaaccctctcacgggtgtcacccgggagcttgtatacctgccgaactcggacccacaacatatgtatggtgtcagatttcttctatcctaatatgggaggagtggaatctcatatttaccagctttcccagtgcctcatcgagcgcggtcataaggtcatcatcgtaacccacgcctacggcaataggaaggggattagataccttacttcaggcctcaaagtatactacttacctctgaaagtcatgtacaaccagagcacagccaccaccttgttccattctcttccattattgcgttacatcttcgtaagggagagggtcaccatcatccactcccatagcagcttcagcgcaatggcccacgatgctctgttccacgccaagactatggggctgcagaccgtgttcacagaccattcactttttggctttgccgatgtgagtagtgttctcaccaataagctgctgacagttagcctctgcgataccaaccatattatttgcgtgagttacacaagcaaagagaatacagtcctgcgcgctgcattaaacccagagattgtgtccgtgattcccaacgcggtagaccccactgatttcacaccagatcccttccgccgacacgattctatcacaattgtggtcgtctctagactcgtatatcgcaaaggaatagacctcttatctggaatcatcccagaactgtgtcagaagtaccccgacttgaactttataatcgggggagagggccccaagcggataattcttgaggaggtccgagaacggtaccagcttcatgaccgcgtccggttgctcggagctctggaacacaaagacgtccggaatgttctggtacagggtcacattttccttaatacatcattgacggaggctttttgcatggccattgtggaagccgcttcctgcggcctgcaggtggtttcaacccgcgtggggggaatcccagaggttttgcctgaaaatctgatcatcctctgtgaacctagcgtcaagtccctgtgcgaaggtctggaaaaggctatctttcagctgaagtcggggacactcccagcgcctgagaacatacataatatagtgaagaccttctacacatggcggaacgtcgccgagaggaccgaaaaggtttacgaccgtgtttctgtggaggctgtgctccccatggataagagactggaccggttgatctcgcactgcgggcctgttaccgggtacatcttcgctttgctcgctgtgttcaacttcctgttcctcatattcctgcggtggatgactcccgatagtattatagatgtcgccatcgacgcaacaggccccaggggcgcatggacgaataactattctcactcaaaacgtggaggggaaaataatgagatttccgagaccaggtag

SEQ ID NO: 128390 - DNA, 510 bp, synthetic construct
  misc_feature 1..510: note = Description of Artificial Sequence: Synthetic coding sequence
  source 1..510: mol_type = other DNA
atggccattgtggaggcagcttcctgcggactgcaggttgtttccacgagggtgggtgggattccggaagtgctccccgaaaacttgataattctttgtgaaccttccgtcaagtccctctgtgaaggcttagaaaaggctatttttcagcttaagagcggcacattgcctgcccccgagaatatccacaacatcgtgaaaacattctacacttggaggaacgtggccgagcggacagaaaaagtttatgatcgggtatctgtcgaggctgtgctgcctatggataagcggctggatcgcctcatcagtcactgcggacctgtgacaggctacatcttcgccctgctcgcagtctttaacttcctgtttctcatcttcctgagatggatgaccccagacagcatcattgatgtcgccatcgatgctacagggccaaggggcgcttggacgaataattatagccactctaaacgcggcggcgagaataacgaaatttccgaaacgcgctag

SEQ ID NO: 128391 - DNA, 753 bp, synthetic construct
  misc_feature 1..753: note = Description of Artificial Sequence: Synthetic coding sequence
  source 1..753: mol_type = other DNA
atggagctcacggggatcgacttactgagtggcattatccccgaactttgtcagaagtatcccgacctcaactttattataggaggcgagggtccgaagcggattatcctagaagaggtgagggaacggtaccagctgcacgatcgggtgcgacttctgggagcgctggagcacaaggatgtgcgaaacgtccttgtgcagggccatattttcctgaacacttcactcaccgaagcattttgcatggcgatcgttgaagcggcctcctgtgggctgcaggtcgtgtcaacccgtgtgggtggtatacccgaggtgcttcccgaaaacttgattatcctttgtgagcccagtgtcaaatccttgtgcgaggggctcgagaaggcaatcttccagctgaagtcgggcaccctgccggcgccagagaacatccacaacatcgtgaaaacattctacacttggcgcaatgtggccgagcggactgagaaggtgtacgacagagtctcggttgaagcagtgttgccgatggataagcgtctcgatcggctgatatctcattgcgggcctgtcaccggctatatctttgcgcttttggcagtgttcaactttctgttcctcatttttctccgctggatgacccctgactccataatcgatgttgccatcgatgccacgggccctcgcggagcgtggacgaataactactcacatagtaagcggggaggcgaaaataatgagatttctgagacaagatag

SEQ ID NO: 128392 - DNA, 1665 bp, synthetic construct
  misc_feature 1..1665: note = Description of Artificial Sequence: Synthetic coding sequence
  source 1..1665: mol_type = other DNA
atgcgtcgtccactgagcaagtgcgggatggaacctggtggaggagacgcgagcctgacactgcatggactccagaataggtcccatgggaagataaagttgcgcaagcgcaaaagtaccctgtacttcaatacacaagaaaaaagtgcccgcaggcgaggggacttactcggggagaacatctacctcctactctttacaattgcattgcgaatcctgaattgttttctggtgcaaaccagctttgtgccagacgagtactggcagtcactcgaggtgagtcaccacatggtgttcaactacggctacctcacttgggaatggacggagagattgcgatcatacacgtatcccctcatctttgcatcaatctacaagatactgcatctgctgggaaaggactcagtccagcttctgatctggattcctcgactcgcacaagccctcctctctgctgtagcagacgtgagattgtatagtttaatgaagcaattagagaaccaggaggtggcccggtgggtctttttttgtcaactctgttcctggtttacatggtattgctgcactagaaccctgacaaataccatggaaaccgtgctgactatcatcgcgctgttctactaccctctcgaggggtcaaagagcatgaactcagtgaaatactccagcctcgtcgcactcgccttcatcatcagaccaaccgcagtgatcctttggacacccttactcttcagacacttttgccaggagccaaggaagctcgatctgattctgcaccacttcctgcctgtcggcttcgtaaccctcagtctctcactcatgatagatcggatattttttggccaatggacactcgttcagtttaactttctgaagtttaatgttctacaaaactggggcacattttatggctcccacccatggcactggtacttctctcagggtttccctgttatactaggtacgcatctgccctttttcatccacggatgctacctggccccaaaacggtataggatcctacttgtgacagtgctttggaccttgctcgtctattcaatgttgagtcataaggaatttcgattcatttatcctgtcttgccattttgcatggtcttttgcggctactccctcacccacctaaaaacttggaagaaaccggccctgtccttcctgttcctaagcaacctgttcctggctctttacacaggattggttcaccagaggggcacattggatgtgatgtctcacatccagaaggtctgctacaacaatcctaacaaaagcagcgcatcaatttttatcatgatgccttgtcattcaacgccatactactcccatgtgcactgccccttacccatgcggtttctccagtgccctccagacctgacagggaagtcacattatctagatgaagcagacgtcttctacctcaatcctcttaactggttgcaccgcgagtttcatgacgacgccagccttccgactcacctaatcaccttctcaatactggaggaagaaatttcggccttcctgatcagcagcaattacaagcgaacagccgtcttttttcacacacatctgcccgagggccgtatcgggtctcatatctacgtgtatgaacgtaagcttaagggcaagttcaatatgaagatgaagttctag

SEQ ID NO: 128393 - DNA, 1080 bp, synthetic construct
  misc_feature 1..1080: note = Description of Artificial Sequence: Synthetic coding sequence
  source 1..1080: mol_type = other DNA
atggaaacagtgctgaccatcatcgcactcttctactatccattagaggggtctaagtccatgaattctgtgaagtactcatcccttgtcgcccttgcattcatcatccgaccgacagctgttatactgtggaccccgctgctattcaggcatttctgccaagagcctagaaaactcgacttgatactccaccactttctgcctgtgggctttgtgaccctgtccctgtcactcatgatagatcgcatctttttcgggcagtggactcttgtccagttcaatttcctcaaatttaatgtgctgcagaattggggtaccttttatgggagccatccctggcattggtattttagccagggatttccagtgatcctgggaacacacctcccctttttcatacatggctgctatctggcccccaagcggtaccgcatcctcctggtgaccgtcctgtggacattgctggtatattcaatgctgtcgcacaaggagtttaggttcatttaccctgtgctaccattttgtatggtgttttgcggttactctttaactcaccttaagacctggaaaaagcccgcactctcctttctcttcctcagcaatttgttcctggcgctttacacaggactggtccaccagcggggaactctggacgtgatgagtcacattcagaaggtgtgctacaacaatcccaataagtcgtccgcatccatctttatcatgatgccatgccactcaacgccttattactcccacgtgcactgccctttacctatgagattcctgcagtgccccccagatctgactgggaaatctcattatttagacgaggctgacgttttctacctgaatcctctgaactggctccaccgtgaatttcacgatgatgccagtctccctacacacctgattacgttcagtattctggaggaagagatatctgcctttctgatatccagtaactacaaacgcacagctgtgttttttcacacccatctccctgaaggacgtattgggtcacacatctacgtctacgagagaaagctgaaggggaagttcaacatgaagatgaaattctag

SEQ ID NO: 128394 - DNA, 894 bp, synthetic construct
  misc_feature 1..894: note = Description of Artificial Sequence: Synthetic coding sequence
  source 1..894: mol_type = other DNA
atgtatgcacaacctgtaacgaacacaaaagaggtcaagtggcagaaagtgctctatgagagacagccatttccggataattacgtggacagaagattccttgaggagctgagaaagaatattcatgcacgcaagtaccaatattgggcagtggtgttcgagtcatctgtcgtgatacagcaattatgttcagtgtgcgtatttgtcgtcatttggtggtatatggacgagggtctactcgcgccacactggctgcttgggactggcctcgcatcctctttaataggctacgtgctgtttgacctgatcgacggcggggagggacgcaagaaaagcgggcaaacaaggtgggctgatttgaaatccgccctcgtatttataacctttacgtacggtttctcgcccgtgctgaaaaccctgactgaatccgtctccacagatactatctatgcaatgtccgtgttcatgcttctaggccacctgatatttttcgattacggcgcaaatgccgccatcgtgtcaagcacactctccctgaacatggctattttcgcctctgtgtgcctggcttcccgtctgccaagatccctccatgcatttatcatggtgacgttcgccatccaaattttcgctctctggccaatgttgcagaagaaactcaaggcctgcactccacgaagctatgtgggggtgacactgctgttcgctttcagcgctgtagggggactgctgtccatctcggcagtgggggcagtgctgtttgctctcttactaatgagcatctcctgcctgtgccccttttacctgataaggcttcagctttttaaagagaatatccatgggccatgggacgaggctgagattaaggaggacctcagtcggttcttgagctag

SEQ ID NO: 128395 - DNA, 894 bp, synthetic construct
  misc_feature 1..894: note = Description of Artificial Sequence: Synthetic coding sequence
  source 1..894: mol_type = other DNA
atgtacgcccagcctgtgacgaacaccaaggaagttaagtggcaaaaggtgttatatgaacggcaaccttttcctgataactatgtcgaccgcaggtttctggaagagttgcggaagaatatacacgcgcgaaagtaccaatactgggcagtcgtattcgaatcatcagtggtgatccagcagctgtgttcagtgtgcgttttcgtagttatttggtggtatatggatgaggggctgctagcccctcattggctactgggcaccggactggcatcttcgttgattggatacgtgctcttcgacctgatagatgggggcgaaggcaggaagaagagtgggcagaccaggtgggcagatctgaagtccgctctggtgttcataacattcacatacgggttttctcccgtcctcaagaccctgaccgagagcgtctcgacagataccatttatgcaatgtccgtatttatgttgctgggtcacctgatcttctttgattacggggctaatgcggctatagtatcctcaactctgagcctgaatatggcgattttcgcaagcgtttgtcttgcttccagactccctcgatcacttcatgcatttatcatggtgaccttcgcaatacagattttcgctctgtggcctatgcttcagaaaaagcttaaggcatgtacgcccaggtcttacgtgggggtgactctgttgtttgcatttagcgcagtgggcggtctgctgagcatctccgccgtgggcgcagtgttgtttgcccttttgctgatgtccatcagttgcctttgccctttttatcttatcaggctgcagctctttaaagaaaacattcacggcccatgggacgaagccgagatcaaggaagacctctctaggttcttatcttag

SEQ ID NO: 128396 - DNA, 894 bp, synthetic construct
  misc_feature 1..894: note = Description of Artificial Sequence: Synthetic coding sequence
  source 1..894: mol_type = other DNA
atgtacgcgcagccagtgaccaacaccaaagaagtgaagtggcagaaggtactgtacgagcggcaacctttccccgacaactatgtagatcgcaggttcctagaggagcttaggaaaaacatccatgctcggaaataccagtattgggcagtcgtctttgagagttctgtagtcattcagcaactttgtagcgtatgtgttttcgtcgtgatttggtggtatatggacgaaggactgctagctccacattggttactgggtacaggtttggcttcaagcttgataggctatgtgctctttgatttgattgatggcggagaggggcgtaaaaagtccggccagactagatgggcggacctgaaatccgccttggtgttcattacttttacttacgggtttagccccgtattgaaaacgttgactgagtcggtgagcaccgacaccatatatgcaatgtcagtatttatgctgttaggtcatttgattttctttgattacggcgccaacgccgcaatcgtttcgtcaaccctcagccttaacatggccatctttgcgtcagtttgcctagcatcaaggctgcctcggtcattacacgcctttatcatggtcacctttgcgatccaaattttcgcactgtggccaatgctgcaaaagaagctcaaagcttgcacgccaaggtcctacgtaggagtaactctgctcttcgccttctcagcagtgggcggactgctctctatttctgcggttggtgcagtgctgtttgccctgctccttatgtctatctcatgtctgtgccccttctacttaatcagacttcagctgtttaaggaaaatatacacggcccttgggacgaggccgaaattaaggaagacctgagcagatttctgtcctag

SEQ ID NO: 128397 - DNA, 660 bp, synthetic construct
  misc_feature 1..660: note = Description of Artificial Sequence: Synthetic coding sequence
  source 1..660: mol_type = other DNA
atgaaggacaatgatatcaaaagactcctgtacacccaccttttatgtatcttttcaattattctctctgtgttcatcccatccctgtttttggagaatttcagcatactcgaaacccacctgacctggctgtgcatttgttctgggtttgtgacagccgtgaatctggtcctgtacctcgtggtcaaacccaatacatcgagtaaacgctcctccttgtcccacaaggttactggcttcctgaaatgttgcatatactttctaatgtcctgtttcagtttccatgtgatctttgtactctatggcgctccccttattgaactggccctggagaccttcctgtttgcggtgatcctgtctacgttcactacagttccatgtctatgcctgcttgggcccaacctcaaagcatggcttagggtgttctcacgaaatggggtcacaagtatctgggagaactctctgcaaatcacaacaatatcgtcattcgtcggggcatggctgggcgctcttcccattccgcttgattgggaacggccatggcaagtgtggccaatctcctgtacccttggagctacttttgggtacgtggctggtctagtaatatctcccctctggatttattggaatcgcaagcaactgacctataagaataattag

SEQ ID NO: 128398 - DNA, 621 bp, synthetic construct
  misc_feature 1..621: note = Description of Artificial Sequence: Synthetic coding sequence
  source 1..621: mol_type = other DNA
atgaaggacaatgatataaaaaggctactctacacacatctcctgtgtatattcagcattatcttgtcggtcttcattccgagcttattcttggaaaacttttccatcctcgagactcatcttacatggctgtgcatttgttcaggctttgtgactgctgtcaatcttgttctttacctggtggtaaaacccaacacctcttccaagagatcctccctgtctcacaaggtgaccggatttctgaagtgctgtatttacttcttaatgtcatgcttttcattccacgtgatctttgttctgtacggcgctcctttaattgagctggccttagagactttcctgttcgccgtcatcttaagcacttttacgacagtcccgtgcctgtgcctcctcggaccaaatttgaaagcctggctccgggttttctcaagaaacggagttacgagtatctgggaaaattctttgcagattactaccattagctcatttgtcggtgcttggctaggggctctgcccataccactggattgggagcgcccatggcagatgacggttgagcgaaaaaggtccacttaccgcagcctgcatgtcccgtgtcgggggctcgggaccgttaagtag

SEQ ID NO: 128399 - DNA, 150 bp, synthetic construct
  misc_feature 1..150: note = Description of Artificial Sequence: Synthetic coding sequence
  source 1..150: mol_type = other DNA
atgaaggataacgacataaagaggttactttacacccatctgctgtgtatcttctctatcatcctgtccgtctttatacccagcctgttcttagaaaactttagcattctcgaaacccatcttacttggttgtgtatctgctctggatag

SEQ ID NO: 128400 - DNA, 999 bp, synthetic construct
  misc_feature 1..999: note = Description of Artificial Sequence: Synthetic coding sequence
  source 1..999: mol_type = other DNA
atggcggtgacggactctctaagccgcgcagcaactgtactggccaccgtactattgctctccttcggctccgtggcggccagccacatcgaggatcaggcagaacagtttttcagaagcgggcacaccaacaattgggccgtgctggtgtgcacatcaaggttctggtttaattatcgccatgtagcaaataccctttcagtgtatcgaagcgtgaagagactcggaattcctgactctcacatcgtgttaatgctcgctgacgatatggcctgcaatcctcggaaccccaaacccgcaacagtcttcagccacaagaatatggagctgaatgtgtacggggacgacgtggaagtggattacaggtcttatgaagttactgtcgaaaacttcttgcgagttctcaccggacgtattccgccatccactccacgttcaaaacgcttattatccgatgatcggtcgaacatccttatctatatgacggggcacgggggcaacggtttcttaaagtttcaagactcagaagagatcacaaatatcgagctggcagacgctttcgagcagatgtggcagaaaagaaggtataacgagttgctgttcattatcgacacctgtcaaggtgcgtcaatgtatgaacgattctactcaccaaatataatggctttagcgtctagtcaggtaggggaggattctctgtcccatcagcctgatcccgctatcggggtgcacctgatggatcgatacacattctacgtgttggagtttttagaagagataaatcctgcgtcacagaccaacatgaatgacttattccaggtatgccccaagtcactgtgtgtgtcgacacccgggcacagaacagacctgtttcaaagggacccaaagaatgttttaatcacggacttcttcgggtccgtgaggaaggtcgaaataacaactgaaacaattaagttacaacaggacagtgagatcatggagtcgcgatacagtagctag

SEQ ID NO: 128401 - DNA, 1188 bp, synthetic construct
  misc_feature 1..1188: note = Description of Artificial Sequence: Synthetic coding sequence
  source 1..1188: mol_type = other DNA
atggcagtgaccgactcactgagcagggccgcgaccgtccttgccaccgtactgctgctctcttttggaagtgttgctgcgagccacatagaagaccaggctgagcaattcttccgctctggtcacaccaacaattgggctgtgctggtgtgtacctcaaggttttggttcaattaccgacatgttgctaatacgctgtcagtgtatagatccgttaaaagactcggcatccccgactcacacatagtgctgatgcttgccgatgatatggcttgtaacccaaggaaccccaaacctgccacggtcttctcgcataagaatatggagctcaatgtttatggcgacgatgtcgaagtggactaccgctcttacgaggtgacagtggaaaacttccttagagtcctcacagggaggatcccgccgtcaactccccgctctaagcgtctgctgtcagacgatcgaagcaacatactgatctacatgacaggacatggaggcaacggattcttaaaattccaagacagcgaggaaatcacaaacattgagttagctgacgccttcgagcagatgtggcagaaaaggcggtacaatgaattgttgttcatcatcgacacatgtcagggggcttccatgtatgagaggttctactcgccaaatatcatggccctggcaagctcacaggtgggagaggattctctcagtcatcagccggaccccgccatcggcgtgcacttgatggaccgctacacgttttacgtgctggagtttctcgaagagatcaatccggcgtcgcaaactaatatgaatgacttattccaggtgtgtcctaaatcactgtgcgtgtcaacccccggccaccgcactgatttgttccagagagaccctaaaaacgtgctcattaccgactttttcgggtccgtccggaaggttgaaataaccactgaaaccataaaacttcagcaggactcagagataatggagtcttcttacaaagaagatcaaatggacgagaaactcatggagcccctaaaatacgcggagcagctgccagtggctcagatcatccaccaaaaaccaaagctcaaagattggcaccctcccggcggatttattctcggtctgtgggcactgatcattatggtattctttaaaacgtatggcatcaaacatatgaagtttattttttag

SEQ ID NO: 128402 - DNA, 960 bp, synthetic construct
  misc_feature 1..960: note = Description of Artificial Sequence: Synthetic coding sequence
  source 1..960: mol_type = other DNA
atggcagtgacggactccttatcaagggctgcaaccgtgttagctacagttctgcttctgtcttttgggtcagttgctgcgtcgcatattgaggaccaggcggaacagttctttagaagcggacacactaataactgggccgtgctcgtgacagtggagaactttctgcgggtgctaactggtagaattcctccttctacaccaaggtcaaagcggctgctgtcggatgaccggtctaatatcctgatctacatgacaggtcacggaggaaacgggtttcttaaattccaggattctgaggaaattacaaatattgagttggctgacgcttttgaacagatgtggcagaagagacggtacaacgagctgctgttcatcatagatacttgccaaggcgcttcaatgtatgagcgcttctatagccctaacatcatggcactagcctctagtcaggtgggcgaagacagcctgtctcatcaaccagaccctgccatcggcgtccacctaatggataggtatacattttatgtgctggaatttctggaggagattaaccctgcctcacaaacaaatatgaacgatttgttccaagtgtgccccaaaagtctgtgtgtgtctactcccggtcaccgtacagatcttttccagagggatcccaaaaatgtgctgattaccgacttttttggatccgttcggaaggtggaaatcacaacagagaccattaagctccaacaagacagtgaaatcatggaatcatcctataaagaagatcagatggacgagaaacttatggagcccctaaagtacgcagaacagttacccgtcgcacaaattatccaccaaaagcccaaacttaaagactggcacccacccggcggcttcatcctcgggctgtgggcccttatcatcatggttttttttaaaacatacggaattaaacatatgaagtttatcttttag

SEQ ID NO: 128403 - DNA, 906 bp, synthetic construct
  misc_feature 1..906: note = Description of Artificial Sequence: Synthetic coding sequence
  source 1..906: mol_type = other DNA
atggcagtcactgacagcctgagccgggcagcaactgttctggccactgttctgctgttgtctttcggttccgtggctgcgagtcatatagaggtcacagtggaaaactttttaagagtcctaactggcagaattccgccttcgacaccacgctctaaacgacttctctcagatgaccgatctaatatcctcatctacatgacaggtcatggcggtaatggcttcctgaagtttcaggacagtgaggagattacgaatatcgagcttgccgacgcgttcgaacagatgtggcagaagcgccgatataatgagctgctgtttataatcgatacatgtcagggcgcatctatgtacgaacgattctatagcccaaacatcatggccctggcctcctcccaggtgggcgaagactctctctctcaccagcccgatcccgcgattggcgtgcacctcatggaccgctatactttctacgtgctggaattcttggaggaaattaatcctgctagccagaccaacatgaacgacctgttccaagtatgtcccaaatccctctgcgtgtcaacacccggccacaggactgacttattccaacgtgaccccaagaatgttctgatcactgacttctttggctctgtccggaaggtcgaaatcaccactgagactattaagctccagcaggacagcgaaattatggaaagctcttataaggaggaccagatggacgagaaactcatggagcccctgaagtatgctgaacagctgcctgtggcccagatcattcaccagaaacctaaactgaaagactggcatccccccggggggttcatccttggactgtgggctctgatcataatggtcttctttaaaacatacgggattaagcacatgaagtttatattttag

SEQ ID NO: 128404 - DNA, 558 bp, synthetic construct
  misc_feature 1..558: note = Description of Artificial Sequence: Synthetic coding sequence
  source 1..558: mol_type = other DNA
atgggaaaaaagcagaataagaaaaaggtggaagaggtcttagaggaagaggaggaggagtacgtcgtggaaaaagtccttgacaggcgcgtggtgaaagggaaagtcgagtatcttctgaagtggaaaggcttctcggacgaggataacacttgggagcctgaggagaacctggattgtccagatctaattgccgaatttctgcagtctcagaaaactgcccatgagacagacaaaagtgaaggaggtaagaggaaagccgacagtgacagcgaggacaaaggagaagagtctaagccaaagaagaagaaggaagagtctgaaaagccaagaggcttcgcccgcgggctggaacctgaacggatcatcggtgccaccgactcctcaggcgagctaatgttccttatgaagtggaagaatagcgacgaggcagatctggtgccagcaaaggaagcaaatgtgaaatgccctcaggtcgtgatcagcttttatgaagagagattgacctggcattcctatccctctgaggacgatgataaaaaggatgacaaaaactag

SEQ ID NO: 128405 - DNA, 735 bp, synthetic construct
  misc_feature 1..735: note = Description of Artificial Sequence: Synthetic coding sequence
  source 1..735: mol_type = other DNA
atggaagctatgtggcttctgtgtgttgcccttgccgtgctggcttggggctttctgtgggtgtgggattcctccgaaaggatgaagtcccgcgaacagggagggagactgggcgcggagtctcggacactcttggtcattgcgcaccccgacgacgaagcaatgttctttgcccccacagttcttggcctcgcgcgcctgcgtcactgggtttatctgctgtgctttagtgcgggtaactactacaatcagggggagacccgtaaaaaagagctcctgcaatcgtgtgacgtgcttggcatccccttatcttcagtgatgattatcgacaatcgggatttcccggacgacccaggcatgcagtgggatacagagcacgtggcaagggtccttctgcagcacattgaggtgaacgggattaatttggtggtgactttcgatgcgggaggagtgtccggccatagcaatcacatagctctttatgccgcggtgcgggtgctgtgcgctcacgccagcgtgtgcgagtgtgcggcccaagtccatctaccatcaggctccgccctggttagcgcctcctacgccggatgtcctctgcgggctcagcagcaaagaagtggtaccgggcaggagagtcatgtcctgcctccacagcccgccccactggttccacccccattacactacctgctgccagtgcatgaaaatcagctcacagaactcccactaaagccctag

SEQ ID NO: 128406 - DNA, 1272 bp, synthetic construct
  misc_feature 1..1272: note = Description of Artificial Sequence: Synthetic coding sequence
  source 1..1272: mol_type = other DNA
atgggatcaactaagcattggggagagtggctactcaacctgaaggtggcaccagctggggtcttcggtgtcgccttcttggccagagtagctctggtgttctatggcgttttccaggatagaacacttcatgtgcgttacaccgatattgactatcaggtgtttacggatgccgcgcgctttgttactgaaggccggagcccttaccttcgcgcaacgtacagatatacacccctgttaggctggttacttaccccaaatatctacctgagtgagctgttcggcaaatttctgtttatcagctgcgatcttctgactgcctttcttttatatcgacttttactgctcaagggtctggggcggcggcaggcttgcggatattgtgtgttctggctgctcaaccccttgccaatggcagtgtcatcacgcggcaatgcggactctattgtggcctccctggtcctgatggtgttatacctgatcaagaaaaggcttgtggcctgtgcggcagtgttctatggctttgccgtacatatgaagatctacccagtgacatacattcttccaataaccctgcacctacttccagatcgtgataatgacaaaagcctgaggcaatttaggtataccttccaagcatgcctctacgaattgctaaaaagactctgtaatcgcgcagtgcttctgttcgtggctgtggccggactgacgtttttcgccctaagcttcggtttctactacgagtacggctgggaatttttagagcacacctatttttaccacctgactcgtcgtgacattaggcataacttcagcccttacttttacatgctctaccttacagcagaatctaaatggagttttagtctggggatcgctgctttccttcctcaactgatactgctgagcgccgtttccttcgcgtactaccgcgacctagttttctgctgcttccttcacactagtattttcgtgacgttcaacaaggtgtgcacctctcaatattttctctggtatctttgtctgttgcctctcgtaatgcctctcgtaaggatgccctggaagcgggccgttgtgctgttgatgctgtggtttatcggacaggccatgtggctggcccccgcttatgtgcttgaatttcagggaaagaacacgttcctgttcatctggttggctggattatttttcctgctcataaactgttccattttgatccagattatcagccattacaaggaggaacctctgaccgaaagaataaagtacgactag

SEQ ID NO: 128407 - DNA, 2796 bp, synthetic construct
  misc_feature 1..2796: note = Description of Artificial Sequence: Synthetic coding sequence
  source 1..2796: mol_type = other DNA
atgctgcttttctttacgttggggctgctgatccattttgtttttttcgcatccatttttgacatttattttacctccccccttgtacacggcatgacaccccaattcaccccactgcccccacccgctagacggctggtgttgttcgtggctgatggtctccgtgccgatgcactgtatgaactggatgaaaacgggaactcccgagccccctttatccgcaatattatcatgcacgagggctcgtggggaatctcccacacccgggtgcctacagagagccgaccaggtcatgtggcccttatcgccggattttatgaagacgtctctgccgtggccaaggggtggaaagaaaatcccgtcgagttcgactccctattcaatgaaagcaagtatacatggtcttggggctctcctgacatactgcccatgtttgccaagggcgccagcggggaccacgtgtacacttattcctatgatgccaagcgcgaagactttggtgcccaagacgccactaagctggacacatgggtgttcgataatgttaaggactttttccaccatgcacggaataaccagtctctattttcaaagattaatgaagagaagatagtttttttcctccacctactgggtattgatacaaacggacacgcgcataggccctctagccgtgactacaaacataacatcaaaaaggtcgatgacggagtaaaggaaattgtgagtatgttcaatcatttttacggcaatgacggtaagactacgtttatcttcacctccgatcatggtatgactgattgggggtcacatggggcaggccacccatctgagaccctgacacctctcgtgacctggggcgccggtatcaagtatcctcagcgcgtgtcagctcaacaattcgacgacgcctttcttaaggagtggaggctggaaaattggaagcgcttggacgtgaaccaagcggacattgcccctctgatgacaagtctaatcggcgtccctttccctttaaactcagtcggcattctacctgtcgactatttaaacaatacagacctgttcaaagcagaatccatgtttacaaacgccgtgcaaatcctggagcagttcaaagtcaaaatgacccagaagaaagaggtaaccctgccatttctgttcacaccatttaagctgttgtcagattcgaagcaatttaatattttaagaaaggctcgctcgtacatcaagcatcgcaagtttgatgaagttgtgtctctctgcaaagaacttatacatctggccctgaaggggctttcctactaccatacctacgatcggttctttctgggggtaaacgtggttatcgggttcgtcggctggatttcctatgccagtctgctaatcataaaaagccactccaacctcatcaagggtgtctcaaaagaggtcaaaaaaccttcccatctgctcccgtgttcttttgtcgctattgggattctcgtggctttcttcttgctgattcaagcttgcccatggacatactatgtgtatggcctgttgcctctaccgatctggtacgcagtcctgcgtgagtttcaggtcattcaggatcttgtggtctcggtattaacctatcccctgtcccactttgtcggctatctgctcgctttcacactgggaattgaggtgttagtgctgagttttttctatcggtatatgctgacagcaggtctaacggcctttgctgcttggccctttctgacacgtctttggacgagagccaagatgacctccctgtcatggacattcttttcactgctgctggcagtgtttccgctcatgcctgtagttggacggaagccagatatctctctggtaatgggagcaggcctccttgtcctacttctgagcctctgtgtcgtgacaagcctgatgaaacggaaggactcgttcattaaagaggagctgctcgtgcacctgcttcaagtcctcagcacggttctcagcatgtatgtggtctactcaacacaaagtagtctccttaggaagcaggggctgcctttgatgaaccagatcatctcttgggccacgctggcctcttcactggtagtccctctgctgagcagcccagtactgttccagcggctgttcagcatcttgctgagcctgatgtcaacttatctcctgcttagcacaggctatgaggcactgttcccactggttctgagctgcctgatgttcgtgtggatcaatattgagcaggaaacccttcagcagtcgggtgtttgctgtaaacagaaattgacatccattcagttctcctataatactgacataacccagtttagacagctgtaccttgacgacatccgaagggcgttttttttggtcttctttctggttacagcgttctttgggactgggaacatcgcgagcatcaactcctttgatctggcgtccgtctactgcttcctcacggttttttctccttttatgatgggggctctaatgatgtggaagattctgattccattcgtcctcgtaatgtgcgcgttcgaggcagtccaactgaccactcagctgtcatccaaaagtctcttcctgattgtgctggttatctccgacataatggcattgcattttttctttcttgtgaaggactacggatcttggctggacatcggcacttccatcagccactacgtgatcgtaatgagcatgactatctttctggtctttctgaacggactagcccagctcttgacgactaaaaaactcagactgtgcggcaaacctaagtcacactttatgtag

SEQ ID NO: 128408 - DNA, 2796 bp, synthetic construct
  misc_feature 1..2796: note = Description of Artificial Sequence: Synthetic coding sequence
  source 1..2796: mol_type = other DNA
atgttactattctttaccctgggacttctgatccacttcgtcttctttgcctccattttcgacatctatttcacctcgccactggttcacggcatgacgccgcagtttactccactgcccccaccagcacgtagactggttctgtttgttgctgatggcctgcgcgccgacgcattgtatgagctcgacgagaatggcaatagccgcgccccatttattaggaatatcataatgcacgagggcagttgggggatcagtcatactagagtgcctactgagagccgcccaggccacgtggccctcatagcaggtttctacgaagatgtctctgcagtagcaaaggggtggaaggaaaaccctgttgagttcgactccctgttcaatgagtctaaatatacctggtcctgggggtcaccagatatcctgccaatgttcgcgaaaggcgcaagcggggaccatgtgtacacttattcctatgatgccaagcgggaggactttggggctcaggacgcaacaaagctggacacatgggtgtttgataatgtgaaggatttctttcatcatgcccgaaacaaccagtctctcttttccaagatcaatgaggaaaaaatcgtcttcttccttcacctgctgggcatcgataccaatggccatgcacacagacccagtagtcgggactataaacacaacattaaaaaggtggacgatggagttaaggagattgtctccatgtttaaccacttctacggtaatgatgggaaaacaacttttatcttcacatctgaccacggcatgaccgattggggcagtcatggcgctggccatccatcagaaacattgaccccactggtgacatggggagccgggatcaaatatcctcagcgcgtgagtgcccagcagtttgatgatgcgtttctgaaggagtggcgactcgagaactggaagagactggatgtgaaccaggcggatatcgctcccctgatgacatcactgattggtgtgccgttcccactgaactcagtggggatactccccgtagattatctcaataatacagatctctttaaagccgagagcatgttcaccaacgcagtgcaaatcctcgagcagtttaaagttaagatgacacaaaaaaaggaggtcaccttgccatttctctttacgccctttaaattgctgagtgactcgaagcagtttaacatcctccggaaagccaggtcttacattaagcatcggaaattcgatgaagtggtgagtctgtgtaaagagcttatccaccttgcccttaaggggctcagttactatcatacctacgataggttcttcctcggggttaatgttgtaattgggttcgttggatggatcagttacgcctccctgctcatcattaagagtcactcaaacctgattaagggcgtttccaaggaagttaaaaaaccttctcacctgctcccctgtagcttcgtcgctattggcatcctggtggccttcttcctgctgatccaggcgtgcccgtggacctattatgtttacgggctgttacctcttcccatatggtacgcagtccttcgcgaatttcaggtgattcaagatttggttgtgagcgtgctgacttatcccttatctcatttcgtggggtacctgctggctttcacgctgggtattgaggtgcttgttctgtcatttttttatcgttacatgcttacagccggccttacagcctttgccgcatggccctttctgactcgcttgtggacccgagcaaaaatgacttctctgagctggacattcttctctcttttgctggcagtgttccccctgatgccggtagtggggaggaagcctgacatttcgctcgtcatgggcgctggtcttcttgtgcttctcctctctctctgcgtcgttacctccctgatgaaacggaaggatagtttcatcaaggaggagctgctggtgcatctcttgcaggtcctgtctacggtgctgagcatgtacgttgtgtacagcacacagagctcccttcttagaaagcaggggttaccacttatgaatcagatcataagttgggccacactggcatcatctctcgtggttccgctcctgagcagtcctgtacttttccaacgcctcttctcaatcctactctccctgatgagcacttatctgttgctgagcacaggctacgaggccctcttccctctcgtactgagctgtctgatgttcgtctggatcaatatcgagcaagagactctgcagcagagtggcgtgtgctgcaagcagaaactgacgagtatccaattttcatataacactgacattacccagtttcgccagctctacctggatgacattagacgggcctttttcctagtgttttttctggtcaccgctttcttcggaacaggaaacatcgcttcaataaactcgtttgacttggccagcgtgtattgttttctgacagtgttttcaccctttatgatgggtgcgcttatgatgtggaagatcctgattcctttcgtgctagtgatgtgtgccttcgaggctgttcagctgacgacgcagctctcttccaagtctctttttctgatcgtgttggtaatttccgacataatggctctgcatttttttttcctcgtcaaagactacggatcatggttggacatcggaacgtccatatcacattatgttatcgtcatgtctatgacaatttttctggtgttccttaacggcctcgcacagttgctcacaaccaaaaagctcaggctgtgcggcaagccaaagagccatttcatgtag

SEQ ID NO: 128409 - DNA, 405 bp, synthetic construct
  misc_feature 1..405: note = Description of Artificial Sequence: Synthetic coding sequence
  source 1..405: mol_type = other DNA
atggtggagaacagccccagcccgctgccagaaagggctatttatggcttcgttttgttcctctcatctcagttcggcttcatactgtatctggtgtgggcatttatacccgaatcgtggttgaattcactgggccttacctactggcctcagaagtattgggctgtggccctcccagtgtatttgctaatagccatcgtgatcggttacgtgctgctcttcggcattaatatgatgtcaaccagcccactcgatagcattcacactataaccgacaattatgccaagaatcagcagcaaaagaagtaccaggaggaggccatccctgcactgcgcgatatctcaatttccgaggtcaatcagatgtttttccttgcagcaaaggagctgtacactaagaactag

SEQ ID NO: 128410 - DNA, 327 bp, synthetic construct
  misc_feature 1..327: note = Description of Artificial Sequence: Synthetic coding sequence
  source 1..327: mol_type = other DNA
atggtcctgtatcttgtgtgggccttcatccctgagtcgtggctcaactcactcgggttgacgtattggcctcagaaatattgggccgttgccctgcccgtctacctgctgatcgccatcgtgattggttacgtgctcctattcggcatcaatatgatgtctacgtctcccttggattctatccacaccataaccgacaattacgccaagaatcagcaacagaagaagtaccaagaagaagcgatcccggccctccgcgacatttccatatcggaggtgaaccagatgttcttcctggccgcaaaggaactatacaccaagaactag

SEQ ID NO: 128411 - DNA, 405 bp, synthetic construct
  misc_feature 1..405: note = Description of Artificial Sequence: Synthetic coding sequence
  source 1..405: mol_type = other DNA
atggtggagaactcccctagcccactgcctgaaagggctatctacggatttgttctgttcctgagtagtcagtttgggttcatcttgtaccttgtctgggccttcatccccgagtcctggcttaacagcctggggttgacgtactggccccagaagtactgggctgtggccctcccagtgtacctactaatcgcgatcgtgatcggttacgtacttttattcggaatcaatatgatgagtacctctccccttgactcgattcacacgattacggataactacgctaagaaccagcaacaaaagaagtaccaggaggaggccataccagcgcttcgggacatcagcatttctgaggtgaatcaaatgttcttcctcgctgcaaaggaactctataccaagaattag

SEQ ID NO: 128412 - DNA, 405 bp, synthetic construct
  misc_feature 1..405: note = Description of Artificial Sequence: Synthetic coding sequence
  source 1..405: mol_type = other DNA
atggtggaaaacagtccatccccccttccagagagggcaatctatggatttgtgttgttcctcagcagccaattcgggttcattctttatctggtatgggcctttattcccgagtcgtggctaaattcacttgggttaacctactggccgcagaaatactgggccgttgccctccctgtgtatctcttgatcgccatcgtgattgggtatgtactcctttttggaattaacatgatgtctacaagccctctggacagcattcacaccatcacagataattatgccaaaaaccagcaacagaagaagtatcaggaagaggcaatcccagcacttcgggacatctccatttccgaagtgaatcagatgttctttctggcagccaaagaactatacactaaaaactag

SEQ ID NO: 128413 - DNA, 78 bp, synthetic construct
  misc_feature 1..78: note = Description of Artificial Sequence: Synthetic coding sequence
  source 1..78: mol_type = other DNA
atggtgctgtatctggtatgggccttcattccagagtcgtggctcaattctttgggccttacctactggccacagtag

SEQ ID NO: 128414 - DNA, 477 bp, synthetic construct
  misc_feature 1..477: note = Description of Artificial Sequence: Synthetic coding sequence
  source 1..477: mol_type = other DNA
atggtgccccgatcgaccagcctggccttgatcgtgttcctctttcaccggttgagtaaggcgcccggaaagatggttgaaaattctccaagtccactgcctgaacgggcaatatacgggttcgtactgtttcttagctcccagtttgggttcattctgtacctggtctgggcattcattcctgaaagctggcttaacagtctcggactcacatattggccgcaaaaatactgggcggtggctctacccgtgtacctacttatagccatagtgattggctacgtactcctgttcggcattaatatgatgtcaacctcccccctcgattctatccacacaataacagataattatgccaagaaccagcagcagaagaagtatcaggaagaggccatcccagccctgagagatatctcgatttccgaggtcaaccaaatgttctttctggcagctaaagagctttacacaaagaactag

SEQ ID NO: 128415 - DNA, 1848 bp, synthetic construct
  misc_feature 1..1848: note = Description of Artificial Sequence: Synthetic coding sequence
  source 1..1848: mol_type = other DNA
atggcgcgagcgtgtctgattcaaaggctgcctatcaaaagagactgtacgcctgtcttcgtaagaggtctgtcatctccaagtgcagccatggcactgctgagtgaaggcctggatgaagtccctgccgcgtgcctgtcgccttgtggtcccccaaatccaacagaattattctcagagagcaggagactggctctggaggagctggttgccggtggacccgaggcatttgctgccttcctgcggcgggaacgacttgcccgttttttaaatcctgatgaggttcatgcaatattaagggcagcggagcggccaggtgaagagggagctgccgccgcagcggcagcagaagattctttcggtagttcccacgactgcagcagcgggacctatttccctgagcagtccgacttggaaccccctttgctggaactggggtggcctgcattttaccagggcgcttaccgtggagcgacaagagtcgagacccattttcagcctaggggtgcaggcgagggggggccatacggctgtaaagatgccctcagacaacagctccggagtgctagagaggttattgctgtcgtgatggatgtgtttaccgacattgatattttccgtgatctccaagaaatttgccgcaagcagggggttgccgtttatatactgctcgaccaagcgctgctctctcagtttcttgatatgtgtatggacctgaaggtacacccagagcaggaaaagttgatgaccgtgcgcactatcaccggaaacatctactacgcccgtagcgggaccaagatcattggcaaagtgcacgagaagtttaccctgattgacggcatccgggttgcgaccggatcatacagctttacatggacagatggcaagctcaactcctcaaatctggtaatcctgagcgggcaggtggtggagcactttgatctcgagtttaggatactgtacgctcagtcaaagccgatctccccaaaactcctttcccacttccaatcatctaataaatttgatcacctgactaacaggaaaccccagagcaaggaactgacacttggcaacctgctgcgcatgcgtctggctaggttaagctcaaccccccgaaaggctgacctagacccagagatgcccgcagaaggaaaggctgagaggaagccgcacgactgtgagagttccactgtgagcgaggaagactatttttcatcacacagggatgagttgcagtccaggaaggcaatcgacgcggcaacccagacggaacccggcgaggaaatgcctggcctcagcgtcagtgaagtcggcacacagacaagtatcaccaccgcatgtgctggcacacagaccgctgtgatcacccgcattgcctcaagtcagacaactatctggtctcgttccaccacaacacagaccgacatggacgagaacattctgtttcctcgaggcactcagtctaccgaggggagtccagtgagcaaaatgtcagtctctcggtcatctagcctgaagagcagcagctcggtgagttcgcaaggctctgttgcatcaagtaccggatcaccggctagcatccgtaccacagatttccataatcccggctatccaaagtacttaggaacaccccacctggagctctatctttctgacagcttgcggaacctaaataaagaaaggcagttccattttgcaggtattcggagccgacttaatcacatgttagcaatgctttctcgacggacattatttaccgaaaaccacctgggcctgcactccggcaatttttccagagtgaatctgttggcagtgagggatgtggccctgtatcccagctaccaatag

SEQ ID NO: 128416 - DNA, 1248 bp, synthetic construct
  misc_feature 1..1248: note = Description of Artificial Sequence: Synthetic coding sequence
  source 1..1248: mol_type = other DNA
atggccgctcctctggtactcgttctagtggtggcagtaacggtcagggcagccctgttccggagctctctcgccgaattcatctccgaaagagtcgaagtggtgagcccactgtcttcctggaagcgggtagttgaaggactcagtcttctggaccttggcgtgagcccatatagcggagcagtcttccatgagatcactgacgccctgactgccatcgctctgtacttcgcaatccaggacttcaacaaggtggtgttcaagaagcagaagctgctactggagctcgaccagtacgccccggacgtggcagagcttattcggacaccaatggaaatgaggtatatccccctcaaagtggcattattttatctactgaatccctacacaattttgtcttgcgtggctaagtctacatgtgcaatcaacaacactctaatcgcattctttatcctgacaaccatcaagggctcagccttcttatcagccattttcctggctctggctacatatcagtctctgtaccctctgaccctgttcgtgcctggtcttctctacttgttgcagcgccaatatattcctgtaaagatgaaatccaaggccttttggatcttttcctgggaatacgctatgatgtacgtgggatccctcgtcgttatcatttgcttgagcttctttctgttgagtagttgggactttattccagctgtctatggctttattcttagtgtgcctgatctcacacctaatatcgggctattctggtatttctttgctgagatgtttgagcactttagtctgttttttgtttgcgtgttccagattaatgtctttttttacacaatccctttggctatcaaactcaaggagcaccctattttttttatgttcatccagatcgcggtgatcgccattttcaaatcctacccaactgttggtgatgttgcgctatacatggccttttttcctgtgtggaatcacctgtataggttcttgagaaacattttcgtcctaacatgtataataatcgtttgttccctcttgtttcctgtgctctggcacctctggatctacgccggatccgctaatagcaatttcttttatgccatcacactgacgtttaatgtcggtcagattcttctgatcagtgactacttctatgcgttcctccgtcgggagtattatctcactcacggtctgtacctaacagccaaagatggcactgaggctatgcttgtcctcaaatag

SEQ ID NO: 128417 - DNA, 513 bp, synthetic construct
  misc_feature 1..513: note = Description of Artificial Sequence: Synthetic coding sequence
  source 1..513: mol_type = other DNA
gtatctgtccccacacatttagtttgtcctcggacaccccttagtcccccagccgccgtgcacacctgcgagaacgaggagcagtccttgctagacttatttctcggagtctgtcatgacattaacgtcttcttttacaccattccactggcgattaagcttaaggagcatcccatattcttcatgttcatccagatcgccgtaattgctatattcaagtcttatcctacagttggtgacgtcgctttgtacatggccttcttcccagtgtggaaccatctttatcgttttctcagaaacatcttcgtgctcacttgtatcattatcgtctgctcacttctctttccagtactgtggcatctgtggatttatgcagggtcagcaaattcaaattttttctacgccattaccctgacattcaacgtgggacagatactcctgattagcgactacttctatgccttcctgcgcagggaatactacctgacccacggcctctatctcactgcctag

SEQ ID NO: 128418 - DNA, 1272 bp, synthetic construct
  misc_feature 1..1272: note = Description of Artificial Sequence: Synthetic coding sequence
  source 1..1272: mol_type = other DNA
atggcagcacccctggtgctggtgttagttgttgcagtgaccgttcgcgctgctctattccggtccagtctcgctgaattcatcagtgagagggtggaggtagtttcgcccctatccagctggaagagagttgtggagggcctttccctgcttgatctaggcgtttcaccatactccggggcggttttccatgagactccactgatcatatatcttttccacttcctaattgactacgctgagcttgttttcatgataactgatgcattgacggctatagccctgtattttgccattcaggattttaacaaagtcgtgtttaagaaacaaaagcttttgctggaacttgatcagtacgcgcccgatgtggcagagctaattaggaccccaatggagatgcgctatattcccctgaaagtagcactcttttaccttctgaatccgtacaccatcctgtcctgcgtggccaaatctacttgtgccattaataataccctaatcgcattcttcattctaacaaccatcaaggggtctgcttttctttctgccatcttcctggctctcgccacataccaaagtctctacccactgacactatttgtgcctgggttgttgtatctgctccagaggcagtacatcccagtgaagatgaagtccaaggcattctggattttcagctgggagtatgccatgatgtacgttggctctctggtggtcatcatatgtttgtccttcttcttgctctcatcatgggactttatccccgccgtctacggtttcatcttgtcagtaccagatctaacccctaatattggactcttctggtacttttttgccgagatgtttgagcatttcagcttgttctttgtttgtgtctttcagatcaacgtgtttttttacaccatccccctagccattaagcttaaggagcaccccatattcttcatgttcatccaaattgccgtgattgctattttcaaatcatatcctacagtcggcgacgtcgccctgtatatggcctttttccctgtctggaaccacttatacagatttctgcgcaatatatttgtgctcacatgcatcataatcgtgtgttctctattgttccccgttctttggcacctttggatttacgctggtagtgccaattctaacttcttttacgcgattaccttaacctttaacgtggggcagatgggcttctgcggagatcgaatggctggaacctgtcctgaggccatccgggcggcaggcgaccgaactccatcatag

SEQ ID NO: 128419 - DNA, 1482 bp, synthetic construct
  misc_feature 1..1482: note = Description of Artificial Sequence: Synthetic coding sequence
  source 1..1482: mol_type = other DNA
atgtggccccaggacccttctcgcaaggaggttcttcggttcgccgtgtcatgtaggatcctgacattaatgctccaggctctcttcaacgctataatcccagaccatcatgcagaggccttttctcctcctcggctggccccatcggggtttgtcgaccagctggtggaaggcctgctgggggggctctctcattgggatgccgagcattttcttttcatcgctgagcacggctacctgtatgagcacaattttgccttttttcctggatttcctttggctttactggtcggtacggagctgcttaggcccctgcgcggactcttaagcctgcgctcttgcctcctgatttctgtagcaagtctgaacttcctgttttttatgcttgcggccgtagccctacacgaccttgggtgtcttgtgctgcattgccctcaccagtcattctatgccgctctgctgttctgtctgagtcccgcaaatgtgttcctggccgctggatattctgaagccctgtttgctttgttaactttttccgccatggggcaattggaacgcggccgtgtgtggactagcgtgttgctgttcgcattcgctacaggcgttagatctaacgggcttgtctcggtgggattccttatgcattcccaatgtcagggctttttctcatcactgacaatgctgaaccccctcagacaactattcaagttaatggccagtctctttttgtcggtgttcacccttgggctccccttcgccttgtttcaatactatgcctacacccagttttgtctgccaggatctgcgcgcccaattccagaaccactggtgcagctcgccgtggataagggttaccgcatcgcggagggcaacgaacccccttggtgtttctgggatgtgcccttgatctattcatatatccaggacgtttattggaacgtcggtttcctcaaatattacgagttgaaacaggttcctaatttcctgctcgccgcccctgtcgcaatcctggtagcctgggcgacatggacatacgtcaccacccatccttggctgtgcctgacactcggactgcagcgcagtaagaacaataaaacccttgagaagcccgatttgggattcctttccccgcaagtgtttgtgtacgttgtgcacgcggcagtgctactcctgttcggagggctttgcatgcacgttcaggtattgactcgctttctggggagtagtactccaattatgtactggttccccgctcacctgctgcaggaccaggagccactcttgaggtctcttaagaccgtcccttggaagccgttagcagaggactcacctcccggccagaaagtcccaagaaaccctataatgggtctgttgtatcactggaagacatgttcccctgtgactcggtacatcctgggttatttcctgacgtactggctgttaggtctcctgttgcattgcaatttcctgccatggacttag

SEQ ID NO: 128420 - DNA, 1482 bp, synthetic construct
  misc_feature 1..1482: note = Description of Artificial Sequence: Synthetic coding sequence
  source 1..1482: mol_type = other DNA
atgtggcctcaggatccatctagaaaagaggtgctgaggttcgctgtttcctgtcggatcctcactctaatgctgcaggccctgttcaatgccatcattcccgaccaccacgctgaagccttctctccaccccgtttagcacccagtggatttgtggatcagctggtcgaggggcttcttggcgggctgagtcactgggacgccgaacacttcctcttcatagccgagcatggatatttgtacgaacacaacttcgctttctttccaggattccccctggcactcttggtcgggactgaactgttaagaccacttcgcggattgctgtctctgcggtcttgtctactgatatcagtagcatcccttaattttcttttttttatgttagcagcagtcgcactccacgacctggggtgtctggtcctccactgccctcaccagtccttctatgccgcactactcttttgcctatctcccgcaaatgtgtttctggccgcggggtattccgaggctctatttgcactgctaactttttcagcaatgggtcagctggaacgtggcagggtatggacctctgtcctattgtttgcttttgccaccggcgttagatcaaatggactggttagcgtaggtttcctgatgcattcacagtgtcagggcttttttagtagcctgacaatgttgaacccgctgcgacaattatttaaactgatggcctccctgtttctgtccgtctttacactgggcttgccattcgccttgttccagtactacgcttacactcagttctgcctgccaggttccgcccggccaattcctgaacctcttgtgcagttggctgtcgataagggatatagaattgccgaaggaaatgaacctccatggtgcttttgggacgtgcccctgatatattcttatatccaagacgtatattggaatgtcggcttcctcaagtattacgagctgaagcaggtgcccaatttcctgctcgccgctcctgtcgccattctcgttgcctgggctacatggacatacgtgacgacacacccatggttgtgtctcactctggggcttcagcgctcaaagaacaataaaaccctagagaaaccagatttgggtttcctctcccctcaggttttcgtctacgttgtccacgccgctgtccttctgctgttcgggggcctgtgtatgcacgtgcaggtgctgactcgattcctcggtagttccacaccaattatgtattggtttcccgcccaccttctccaggatcaggagccactcctccggtccctgaaaaccgtcccatggaagcctctggctgaggattcccctccgggacaaaaagtgcctcgaaatcccatcatgggcctgctataccactggaaaacatgtagccctgtcaccagatacatactggggtacttcctcacctattggcttttgggtctactgctgcattgtaactttctgccttggacgtag

SEQ ID NO: 128421 - DNA, 219 bp, synthetic construct
  misc_feature 1..219: note = Description of Artificial Sequence: Synthetic coding sequence
  source 1..219: mol_type = other DNA
atgtggccacaggatccatctaggaaggaagtactgcggttcgcagtctcttgtagaatcttgactctgatgttacaggcgttgtttaatgccataattcccgaccaccatgctgaggctttttccccaccacgccttgctccttcaggcttcgtggatcagcttgttgaaggcttattagggggcctgtcccactgggatgccgagcacttcttgtag

SEQ ID NO: 128422 - DNA, 366 bp, synthetic construct
  misc_feature 1..366: note = Description of Artificial Sequence: Synthetic coding sequence
  source 1..366: mol_type = other DNA
atgtggccgcaggatccatcgagaaaagaggtgttgaggttcgcagttagctgccgtattctcaccctaatgctccaagcgctgtttaacgctataattcccgatcatcatgcagaggccttctctccgccgcgcctggctcccagtggcttcgtcgatcaactggtggagggcctgctcgggggcctaagccactgggacgcagaacacttcttgtttatcgcagaacacgggtacttatacgagcataactttgcgtttttccccggatttcccctggcactgcttgtggggacagaacttctcaggccgttgagagggctgctgtcactgcgaagctgcctgctcatcagtgtggcatcatag

SEQ ID NO: 128423 - DNA, 798 bp, synthetic construct
  misc_feature 1..798: note = Description of Artificial Sequence: Synthetic coding sequence
  source 1..798: mol_type = other DNA
atgccatcttcacagatcacaatgcagaaaccgtctctgctgctggcatggccacctcaggccctgtggaccaactcatggaaatattacgcttacactcagttttgtctgccaggcagcgcccgtccaattcctgagccgctcgtacagctcgctgttgacaagggctataggatagcagagggtaatgagcccccatggtgtttttgggatgtcccattaatttatagttacatccaggacgtgtactggaatgttggattccttaagtactacgaactgaagcaggtgcctaactttcttttagcagcccctgtagcgatcttggtagcttgggctacctggacatacgtcacaacccacccgtggttatgtctgaccctgggcctgcaaagatcgaagaacaacaagactcttgaaaaacctgacctgggtttcctgagcccccaagtcttcgtttatgtggtgcatgcggctgtgctgctgcttttcggaggactttgtatgcatgtgcaggtcctcacccgattcctcgggagctccaccccaattatgtactggtttcccgctcatcttttgcaagaccaggaacctctcctaagatcgctgaagacagtgccgtggaagcccctagcagaggattccccacctggccagaaggtccccaggaaccctattatggggctgctgtatcattggaagacatgttccccagtaacacgttacattctgggctactttctgacatactggcttcttggactgctgcttcactgtaattttcttccttggacttag

SEQ ID NO: 128424 - DNA, 549 bp, synthetic construct
  misc_feature 1..549: note = Description of Artificial Sequence: Synthetic coding sequence
  source 1..549: mol_type = other DNA
atgtggccccaggatccttctagaaaggaggtactgaggttcgcagtcagctgtcgaattttgacattaatgctgcaggccctgttcaacgccattattccagatcaccacgccgaggcttttagccctccgcggttggccccctctggctttgtggaccaattggtcgaaggcctcctcggaggactgtcccactgggatgcagagcacttcctttttatcgccgagcacggctatctgtacgagcacaattttgccttctttcctgggttccctcttgccctgcttgtgggcacagagctgctaagaccactccggggtctgctgtctctccgaagttgtttgctgataagcgtcgcatcactaaatttcctgttctttatgctggccgcagttgccctgcacgacctcgggtgcctggtattgcactgtccccatcagagcttctacgccgccttactcttttgcttatctcccgccaacgtattccttgccgcaggatacagcgaggcgctatttgccctgttgacctttagtgcaatggggtag

SEQ ID NO: 128425 - DNA, 1515 bp, synthetic construct
  misc_feature 1..1515: note = Description of Artificial Sequence: Synthetic coding sequence
  source 1..1515: mol_type = other DNA
atgtcagagaagcagatgaaggaagctttcgtgagcaacctgaatgggacgactgtattagagatcacccagggtttgtgttttcccgccttttgtatcctgtgcagggggtttctgatcatcttctcgcagtatctttgttcctttagcccgacatggaaaaccagatttctaacagattttgtggtgctcatcgttccaatggtggccacactgacaatttgggcctcgttcatcctgctggagttgctcggtgtgattattttcggcgcggggctcctgtaccagatctacagacgcaggacgtgctatgcacgtctccctttcctgaaaattctcgaaaagtttctgaacataagcctagagtcagagtataatccggctattagctgcttccgggtcatcacctccgccttcaccgcaatcgcgatcctcgccgtggactttccgctctttcctagacgcttcgccaagactgaactgtacggcaccggtgctatggatttcggtgtcgggggattcgtctttgggtcagccatggtgtgcctcgaagtacgccgccgtaaatacatggagggttcgaaactccactactttactaactctctttatagcgtttggcccctcgtgtttttgggtatcggcagactggcaatcataaagtcgattggataccaggagcatttgactgaatacggtgtgcattggaactttttcttcacaatcattgtagttaaacttatcacgccccttctgttaatcatctttcctctcaataaatcttggatcatcgctttgggcattacagtactataccagttggcattggattttactagcctcaagagacttattctctatggtaccgacgggtcggggacaagggtgggactcctgaacgccaacagagaagggattatttcaactctgggttacgtcgccatccatatggcgggggttcaaacgggactgtatatgcacaagaaccggagccacatcaaggaccttatcaaggtggcgtgtttcctacttcttgccgccattagtctgtttatcagtttatatgtcgtgcaggtgaatgtcgaggcagtgtctaggcggatggccaatttagcattttgcatttggatcgtcgcctccagcctgatcttgttgtcctccctcctgctgggcgacatcatcttgtctttcgctaagttcctgattaaaggggctttagtcccatgctcctggaaactcatacagagccccgtcaccaataaaaaacactcagaatcactcgtcccagaggctgagcgcatggagccctcactgtgtctgatcactgctctcaaccggaagcagctcatattcttccttctctctaatattacgacaggcctcatcaaccttatggtggatacgctgcattccagtacgttgtgggctctgtttgtggttaacctgtacatgtttagcaactgtttgatcgtatatgtcctttacctccaggacaagaccgttcagttttggtag

SEQ ID NO: 128426 - DNA, 318 bp, synthetic construct
  misc_feature 1..318: note = Description of Artificial Sequence: Synthetic coding sequence
  source 1..318: mol_type = other DNA
atgagcgagaaacagatgaaggaagcctttgtgagcaacctgaacgggacgactgttctggagataacccaaggcctgtgttttccagcattttgcattctctgtcggggcttcctgattattttctcccagtacctgtgctccttcagccccacgtggaaaacccggtttcttactgatttcgtggtcctgatcgtaccaatggtcgcaacactgaccatttgggcgtcttttatattgctggagcttctcggtgtcataatattcggggctggcctgctgtaccaaatctaccgaaggaggacgtgctacgcatag

SEQ ID NO: 128427 - DNA, 831 bp, synthetic construct
  misc_feature 1..831: note = Description of Artificial Sequence: Synthetic coding sequence
  source 1..831: mol_type = other DNA
cttgcagcccgagtggctgccgtccgcgctgccgcctggctcctgcttggtgccgccacgggcctaaccaggggcccagccgctgcattcaccgccgcaagatcagatgcagggatccgagcaatgtgttccgagataattctgcggcaggaagtgctgaaggatggcttccacagggacctcctcataaaggtcaaatttggtgaatctattgaggacctccatacttgtcgcttattgatcaagcaggacatccctgctggcctctacgtggatccctacgagctcgcctcattgcgtgaacgcaatatcacagaggccgtcatggtgtctgagaattttgacattgaagctcccaattacctgtctaaggagtccgaagtactgatttatgccaggagggactcccagtgcattgattgtttccaggcgttcctgccagttcattgcagatatcaccgtccccactcagaggacggagaggctagcatagtcgtcaataaccctgacctgcttatgttttgcgaccaggcgggcagccgacgtatgattagatttcgtttcgattcttttgataagactattgaatttccaattctcaagtgctgggcacactctgaagtcgcggccccgtgcgcactggagaacgaggatatatgtcaatggaacaagatgaaatacaagtcggtatacaagaatgtcatcttgcaggtgcccgtcggactcacggtgcacacctctcttgtctgttctgtcactcttctgattacaattttgtgctcaactttaatcttagtggccgttttcaaatatggacatttcagcctgtag

SEQ ID NO: 128428 - DNA, 654 bp, synthetic construct
  misc_feature 1..654: note = Description of Artificial Sequence: Synthetic coding sequence
  source 1..654: mol_type = other DNA
atgtgctccgagatcattctacgtcaggaggtgctgaaagacggattccaccgggatttactcatcaaggtcaagtttggggagagcatcgaagacctgcacacatgtagactgttgatcaaacaggatataccagccggactgtacgtcgacccttacgagctagctagcctgcgtgagagaaatattacagaggctgttatggtctcagaaaacttcgacatagaggccccaaattacctgtccaaggagagcgaagttctgatttacgcccgacgcgattctcagtgcattgattgcttccaggccttcctccctgtgcactgccgttaccaccggccccactccgaagacggtgaggcaagtatcgtggtcaacaatccagatcttctgatgttttgcgaccaggagttcccaattctgaagtgttgggcgcacagcgaagtggccgccccttgcgcactcgaaaacgaagacatttgtcagtggaacaagatgaaatataagtcagtttataaaaatgtaatattgcaagtgccagtcggtcttacggtacacacaagtttagtttgttcagtgactctcctgatcaccatactctgtagcaccctcattttggtcgcggtgttcaagtatggccactttagcctatag

SEQ ID NO: 128429 - DNA, 777 bp, synthetic construct
  misc_feature 1..777: note = Description of Artificial Sequence: Synthetic coding sequence
  source 1..777: mol_type = other DNA
ctggcagcccgcgtggcggccgtacgggcagccgcttggcttctgctgggcgctgcgactgggctgacgagggggccagctgccgccttcactgcagctagatccgacgccggtatcagggctatgtgctcagagattatcctacggcaggaggttctgaaagatggtttccacagggacctgctcattaaggtcaaattcggggaatccatagaagacctccacacatgccgcctgcttattaaacaggatatcccggcgggattgtatgtcgacccatatgaattggcctccctgcgagagcggaacatcacggaggccgtgatggtgagcgagaacttcgacatcgaggctccaaactatctgagcaaggagagcgaagtgctaatatatgccaggagagattctcagtgtatagattgctttcaggccttcttaccagtgcactgcaggtaccatcgccctcacagtgaagatggggaggctagcattgtggtgaacaaccccgacttgctcatgttctgcgatcaggaatttccaattctaaaatgctgggctcacagcgaagtcgcggccccctgcgcattggagaacgaggacatttgtcagtggaataaaatgaagtataaatcagtgtacaagaatgtcatactgcaggtacctgtaggattaaccgtgcacacatcccttgtgtgttcagtaacactgctgattactatattgtgttccactcttatcttagtggccgtgtttaagtacggacacttctctctttag

SEQ ID NO: 128430 - DNA, 507 bp, synthetic construct
  misc_feature 1..507: note = Description of Artificial Sequence: Synthetic coding sequence
  source 1..507: mol_type = other DNA
atggtttcagagaactttgatatcgaagccccgaactacctcagtaaagagtcagaggtgctcatctacgcacgtcgggatagccagtgcatcgactgtttccaagcctttttgcctgttcactgtagataccaccggccccatagcgaggatggggaggcctctatcgttgtaaataacccggatctcctaatgttttgtgaccaggcaggcagtcgccgaatgattcggtttagattcgattcttttgataaaaccatcgaattcccgattcttaaatgctgggcacactctgaagtcgccgccccatgcgcactagaaaatgaggacatctgtcagtggaataagatgaagtataagtccgtatataaaaatgtaatcttgcaggtgcctgtgggcctcactgtgcacacttcactggtatgcagtgtgaccctgctgataacaatcctgtgcagcaccttgatcctggtagctgtattcaagtacgggcacttctctctgtag

SEQ ID NO: 128431 - DNA, 1740 bp, synthetic construct
  misc_feature 1..1740: note = Description of Artificial Sequence: Synthetic coding sequence
  source 1..1740: mol_type = other DNA
atgcagatatgtggctctagtgtcgcgagcgtggcggccggtacctcttttcaggtgctaggtcctgtgtgctggcaacaactggatctgaagatggccgttagagtgctgtggggggggttatccctactgagagtattgtggtgtcttctgccacagacagggtacgtgcacccagacgagtttttccagagccccgaagttatggccgaagacatactgggagtgcaagcggcccgtccatgggaattttacccttcatccagttgcagaagcgtgctcttccctctgctgatctctggcagtacgttctggctgctccgactgtgggaggagcttggaccatggcctggattggtgagtgggtatgctcttctggtggggccacgactccttctaacggccctgagtttcgccctggatggggctgtttaccacctggccccccctatgggagcggaccggtggaatgctctcgccctcctatccgggtcttatgtcactctggtgttttataccaggacatttagtaatactatcgagggcttactgtttacttggttgcttgtgttagtgtcgtcccacgtcacttgggggcctactaggaaagagcccgcaccaggtcccaggtggcgctcctggctgctgggaggaattgtagccgccggattttttaacaggccaacatttctggcttttgcagttgtgcccctctacctctggggcacccggggagccaccaacccaggattaaagagcttaactagggaggccttggtgttactccccggtgccgcgctgactgcagccgtcttcgtcgccactgattcctggtacttttctagtcctgctacgagccggaatctcgtgcttaccccagtgaatttcctccattataatcttaatccccagaacctcgcacgccacgggacccatgccaggttgacccatctagccgtgaacgggtttctgctttttggagtgctacatgctcaagcattacaggccgcatggcagaggctgcaggtagggctgcaggcgtccgctcagatgggcttgctgagagccttgggggccagaagtctgttgtctagtccgcgaagttatctgcttctcctctactttatgcccctagctctgctgagtgctttcagccatcaggaggctcggttcctaatccctctcctggtgcctctggtgctgctgtgtagcccgcagacccagcctgtgccgtggaaggggaccgtggtgctcttcaacgcacttggcgcgctgctgtttggctgtctgcaccagggcggattggtgcctggactcgaatacctggagcaggtcgtccacgcacccgtcttgcctagcacaccgacgcactatacgctgctgttcacacatacctatatgcctccccgccacctgctacatctgccagggctcggagctcccgtggaggtggtagacatggggggtaccgaagactgggctctgtgtcagacgcttaaatccttcaccagacagcccgcatgccaggttgccggcggcccttggctgtgcagactcttcgtggtgacccccggcaccacgaggcgggctgtcgagaagtgttcctttccgtttaagaatgagaccctcctctttccccatctcacactggaggatcctccagctctgtcctccttgctctccggagcctggcgcgatcaccttagcctccacattgtggagctgggggaagaaacgtag

SEQ ID NO: 128432 - DNA, 813 bp, synthetic construct
  misc_feature 1..813: note = Description of Artificial Sequence: Synthetic coding sequence
  source 1..813: mol_type = other DNA
atggttctgctgaaggaatatcgcgttatcttacctgtttcagtcgatgagtaccaggtcgggcagctctactctgtggctgaggcatctaaaaatgagaccggcgggggagaaggcgttgaggtgttggtgaacgagccctacgaaaaggatggagaaaagggccagtacacccacaagatctatcacttgcagagcaaggttccaacttttgtgcggatgctggcacccgaaggagccttgaatattcacgagaaagcctggaacgcgtatccatattgtagaacagtcattactaatgaatacatgaaagaggacttcctcatcaaaatcgagacatggcacaaaccagatttgggaacccaggagaacgtacacaagctcgaaccagaggcatggaaacacgtcgaggcggtctatatagacatcgcggatcggagccaagtactctctaaggattacaaggcggaagaggaccctgccaagtttaagtccataaagacaggacgcggtcctctggggcccaattggaaacaagagctggtaaatcagaaggattgtccatacatgtgcgcctataagctcgtgacagtcaagtttaaatggtggggactgcagaacaaagtcgaaaattttattcacaaacaggagagacggctctttacaaactttcaccggcagcttttctgttggctggacaaatgggtggacctgactatggatgacattcgtcggatggaagaagagaccaagcggcagctggatgaaatgaggcaaaaagatcctgtcaagggtatgaccgccgacgattag

SEQ ID NO: 128433 - DNA, 813 bp, synthetic construct
  misc_feature 1..813: note = Description of Artificial Sequence: Synthetic coding sequence
  source 1..813: mol_type = other DNA
atggtactcctcaaagaataccgggtgatcctccctgtgtctgtagatgaataccaggtgggacagttgtactcagtcgctgaagcctctaaaaacgagacgggagggggcgaaggggttgaggtcctcgttaacgagccttacgaaaaggatggcgagaagggccagtacacacataagatctaccatttgcagtctaaagttcctacatttgttcgcatgctggctcccgagggggctttgaacatccatgaaaaggcatggaatgcgtacccctattgtaggaccgtgcttcctaatgagtatatgaaggaggacttcttgatcaagatcgagacctggcacaagccagatctcggaacacaagagaacgtgcacaagctcgaaccagaagcatggaaacacgtggaggctgtatatatcgatattgcagaccggagccaggtcttatcaaaggattacaaggcagaggaggatcctgccaaatttaagagcatcaaaactggtagaggaccattgggacccaattggaaacaggaattggttaaccagaaggattgcccatacatgtgcgcatacaaactggttacagttaaatttaaatggtggggactgcagaacaaggtggagaattttatccataaacaagaacgtcgattattcacaaatttccatcgacagctcttttgctggctggataagtgggtagatttgaccatggatgatattcggcgcatggaggaagagacaaagcggcaactggacgagatgcggcagaaggatcccgttaaagggatgaccgccgacgactag

SEQ ID NO: 128434 - DNA, 594 bp, synthetic construct
  misc_feature 1..594: note = Description of Artificial Sequence: Synthetic coding sequence
  source 1..594: mol_type = other DNA
atgctggccccggaaggggctcttaatattcacgagaaggcctggaatgcatacccttactgcagaaccgtgcttcccaacgaatatatgaaagaagattttttgattaagatagaaacatggcacaagccagatctgggaacccaggagaacgtgcacaagttggagcccgaagcctggaaacatgtggaagcggtttacatcgacatagctgaccgaagtcaggtgttaagcaaggattataaagctgaagaggatccagccaaatttaagtctatcaagaccggtagggggcctctcgggccgaattggaaacaggaactggtgaaccagaaggactgcccctatatgtgtgcatataagcttgtgactgtcaagtttaagtggtggggcctccagaacaaagtcgagaattttattcacaaacaagagcggcggctgtttactaatttccataggcaactcttttgctggctcgacaagtgggtcgatctgacgatggatgacattcggaggatggaagaggagactaagcggcagctggatgagatgcgccaaaaggatcccgtgaaaggaatgacagcagacgattag

SEQ ID NO: 128435 - DNA, 819 bp, synthetic construct
  misc_feature 1..819: note = Description of Artificial Sequence: Synthetic coding sequence
  source 1..819: mol_type = other DNA
atggtgttgatcaaggagttcagagtcgtgctcccatgttcagtgcaggaatatcaggtgggtcaactgtatagcgttgccgaggccagcaagaatgagactggggggggcgagggaatcgaagtgctgaaaaacgaaccatatgaaaaggacggcgagaagggtcagtatacccacaagatctatcacctgaagtccaaagtgccagcattcgtgcgcatgatcgcacctgaagggagcctagttttccatgaaaaggcctggaatgcgtatccatactgtcgaacaatcgtgaccaacgaatatatgaaggatgattttttcattaagatcgaaacatggcataaacccgacctgggcacactggagaatgtgcacggccttgaccccaatacttggaaaaccgttgagatcgttcacattgacatcgcagaccgctctcaggtggagcccgctgattacaaggccgacgaggatccagccctgtttcagtctgtaaaaaccaaacggggccctctggggcccaattggaaaaaggaactggcaaactcccccgactgcccccagatgtgcgcatacaaactcgtgaccattaaattcaaatggtggggtctgcagtctaaggtcgaaaattttatccagaagcaggagaagaggatttttaccaactttcataggcagctgttttgctggatcgataagtggatagatctgacaatggaggacatccgaaggatggaggatgaaactcagaaagagcttgagacactgaggaaccagggccaagtccgcggaacctccgcagcttcagatgaatag

SEQ ID NO: 128436 - DNA, 816 bp, synthetic construct
  misc_feature 1..816: note = Description of Artificial Sequence: Synthetic coding sequence
  source 1..816: mol_type = other DNA
atggtcctgattaaggaattccgagtcgtgcttccctgctccgtgcaagagtatcaggtgggccagctgtattccgtcgccgaagccagcaaaaacgagaccggtgggggggaggggatcgaagtgcttaagaatgaaccatacgaaaaggacggggaaaagggccagtacactcacaagatctaccatttaaagagtaaggtgccggcgtttgtgaggatgatagcccccgagggctctttagtctttcacgagaaggcctggaacgcctacccctattgccgtacgatcgtgacaaacgagtatatgaaagacgatttttttattaagattgaaacttggcacaaacccgacctgggtaccctcgagaacgttcacgggctggaccccaatacatggaagacggttgaaatagttcacatagatattgcagacagaagtcaggtggagccagcggattacaaagcggatgaggatcccgcgttgttccagagtgtaaagactaaacgcggtccccttggacccaactggaagaaagaactggccaactcacccgactgtccacagatgtgtgcttacaaactggtcacgatcaaattcaagtggtgggggcttcagtctaaggtagagaactttattcagaaacaggagaagcgaatcttcacaaattttcatcggcagttattttgttggatagataagtggatcgatctgaccatggaggatatcagacggatggaggatgagactcaaaaagaactggagaccatgcggaaacggggttctgtgcgcggaacctctgccgctgacgtctag

SEQ ID NO: 128437 - DNA, 363 bp, synthetic construct
  misc_feature 1..363: note = Description of Artificial Sequence: Synthetic coding sequence
  source 1..363: mol_type = other DNA
atgatcgcgcctgaaggttcattggtcttccacgagaaagcctggaatgcctatccgtattgcagaaccattgtgaccaatgagtatatgaaagatgacttctttataaaaattgaaacatggcacaaacctgatctcggaaccctcgagaacgtacacggtctggaccccaatacatggaagacagtagaaattgtccacattgatatcgcagataggtcacaggtagaaccggccgactataaggccgatgaggatcctgcactgtttcagagtgtcaaaactaagagaggccctctggggcctaactggaagaaagagttggccaattcacctgactgtccacagatgtgcgcctactag

SEQ ID NO: 128438 - DNA, 507 bp, synthetic construct
  misc_feature 1..507: note = Description of Artificial Sequence: Synthetic coding sequence
  source 1..507: mol_type = other DNA
atgggcgacttactgatggaaaagtgtagagttgtgcttccgtgttctgtgcaggagtaccaggtagggcagctgtatagtgtggccgaggcttcaaagaacgaaaccggaggaggggaaggtatcgaggtgctaaaaaacgagccttacgagaaagatggtgagaagggccaatacacccataagatataccacctcaagtccaaagtcccggcttttgtccggatgattgccccggaagggtccctcgtgttccatgagaaggcatggaatgcctacccgtattgcagaacgatcgtgacaaatgaatacatgaaagacgactttttcattaaaatcgaaacttggcataagcccgatctggggaccctggaaaacgttcatggcctggacccgaatacttggaaaaccgttgagatcgtgcacattgacatagccgatcggtctcaggttgagccagcagattacaaggccgacgaggatccagcattgttccagagtgtgtag

SEQ ID NO: 128439 - DNA, 822 bp, synthetic construct
  misc_feature 1..822: note = Description of Artificial Sequence: Synthetic coding sequence
  source 1..822: mol_type = other DNA
atgggcgatctactgatggagaagtgtagagtagtgcttccctgttccgtacaggagtatcaggtaggtcagctttattcagtagccgaggcctcgaaaaatgaaactggaggtggcgaaggaattgaagtgctgaagaatgaaccatacgagaaagacggggaaaagggccagtacacccacaaaatctatcatctgaaaagcaaggtgccagctttcgtgagaatgattgcccctgagggatccctggtctttcacgagaaagcatggaacgcatacccctactgccgcacaattgtgactaatgaatacatgaaagatgactttttcatcaaaatcgagacatggcataaaccggatcttggaactctggagaacgtgcatggattagatcctaatacttggaagaccgtggaaattgtccacattgacattgctgataggtcccaggtggaacctgccgactataaagccgatgaagaccctgcactgtttcagtctgttaagactaaaagggggcctctcggtccaaactggaagaaagaacttgcaaattcccccgactgtccgcagatgtgcgcttacaaactggtgactataaaattcaagtggtgggggttacaaagcaaggtggagaacttcattcagaaacaggaaaagcggatattcaccaatttccatagacaacttttttgctggatcgataagtggatcgatctgaccatggaggatattaggagaatggaggacgaaacccaaaaagagcttgagaccatgcgcaagagaggctccgtgaggggcacctctgccgccgatgtctag

SEQ ID NO: 128440 - DNA, 4980 bp, synthetic construct
  misc_feature 1..4980: note = Description of Artificial Sequence: Synthetic coding sequence
  source 1..4980: mol_type = other DNA
atggaggcaccctcgggatccgagcctggcggcgatggcgccggagattgcgctcatcccgaccccagggcaccgggagccgccgcacccagttcaggtcccggtccatgcgccgccgcccgggaaagtgaaagacagttgagactgaggctctgcgtgctcaacgagatcctaggcaccgaaagggactacgttggcaccctgcgtttcctgcaaagcgcgttcctgcacaggatcaggcagaatgtcgccgattccgtggagaaaggactcaccgaggagaatgttaaggtgctcttttccaacatcgaagatatcctggaggtgcataaggatttcctggccgctctggagtactgcctgcacccagagccacagagccagcacgaactgggcaatgtgttccttaagttcaaggacaagttttgcgtgtacgaagagtactgttctaaccacgagaaggccctgcgcttgctcgtagaattgaacaagatccctacagttagagcattcctgttatcctgtatgcttctgggcggccggaagaccacagatatccccctggaaggatatctgttatcacctatccaacgcatctgtaagtatcctctgctattgaaagagctcgcaaagcgaactcccgggaagcacccggaccatcctgccgtgcagagtgcccttcaggctatgaagacagtatgctctaacataaatgagacaaaacgccaaatggaaaagcttgaagctttagaacagctccagagccacatcgagggatgggaaggcagcaacctcaccgacatttgtacccaactactgctccaaggtacactcctgaagatttctgcagggaatatccaggaacgcgctttcttcctgttcgataacctcttagtgtactgtaaaaggaaaagcagggtgacgggctctaagaagagcactaagcgcacgaagtctattaatggctccctctatattttccgcggtcgaatcaacactgaggtgatggaagtggagaatgtggaagatgggacggccgattaccacagcaatggttatactgtgaccaatggttggaagatacacaacactgcaaagaacaagtggttcgtctgtatggcaaagaccgccgaggagaagcagaaatggctggacgcgatcattagggagcgcgaacagcgggaatcactcaagcttgggatggagagagatgcgtacgttatgattgccgaaaaaggcgaaaagctgtaccatatgatgatgaacaagaaggtgaatctcataaaagaccggcggaggaaactgagcactgtccccaaatgttttctgggaaatgagttcgtggcttggctactagagataggcgaaatcagtaagaccgaggaaggagtgaacctgggccaggccctcttggagaacgggatcatccatcacgtctcggataaacaccaatttaagaatgaacaggtgatgtacaggtttaggtacgacgatggaacctacaaagctagaagcgagctggaggacattatgtctaaaggagtgagactgtactgccggctccactccttgtatacacctgtgatcaaggaccgcgattaccaccttaagacttataagtcggtgctccctggtagtaagctggtcgactggttgctggcccagggcgactgtcagaccagagaggaagcggtggctttaggcgtagggctctgcaacaacggattcatgcaccatgttctggagaagtccgaattcagagacgagtcacagtatttccgttttcacgccgatgaagagatggagggcaccagctctaaaaataagcagctgaggaacgatttcaagcttgtggagaacattcttgccaaaagactgctgattctgcctcaggaggaggactacggcttcgacatagaagaaaaaaataaagccgttgttgtcaagagcgtgcagagaggctcactcgcggaggtggctggccttcaggtcgggcgcaagatctactccatcaacgaagatttagtattcctgcgaccattttctgaggtcgagagtatactgaaccagtctttctgtagccgccggccattgcgtttactagttgcgaccaaggctaaagagatcatcaaaatcccagatcaacccgatacactttgttttcagattagaggtgcagcccccccctatgtgtatgcagttggacgggggagcgaggccatggctgccggactgtgtgccggccaatgtatcttgaaggtaaatggatcgaatgttatgaacgatggcgcaccagaggtgctggagcatttccaggcctttcgctctcgaagagaggaggcgctggggctttatcagtggatttaccacacacatgaagacgcgcaagaggcccgtgccagtcaagaggcatcaacggaggaccccagcggtgaacaggcacaagaggaggaccaagcagacagtgccttccctttgctgagcctcggccctcgattgtcactgtgtgaagatagtcccatggtgaccctgacagtcgacaatgtccatctggaacatggagtggtttatgaatacgtgagtactgccggcgtccggtgccacgtgctggaaaagatagtggaacccaggggttgcttcggcttgactgctaaaatattggaggccttcgcagccaacgacagtgtttttgtcgagaactgccggaggctaatggccctaagctccgcgatcgtgactatgccccatttcgagttcagaaatatctgtgacacaaaattagagtctatcggccagcggatcgcctgctatcaggaatttgccgctcagttaaagagccgcgttagcccgccgttcaagcaggcacccttggaaccccaccctctgtgtggcctcgacttctgccccaccaactgtcatatcaacctgatggaggtgtcctatcctaagactaccccttccgtgggtcgatccttctcgatacgtttcggacgcaagccatctctaatcggccttgatccagagcaaggccacctgaatcccatgtcttatacccagcactgtatcaccacaatggcggccccctcttggaaatgtttgcccgcagccgaaggcgatccacagggtcagggcctgcacgacggaagttttggccctgccagtgggactctgggacaggaagatagaggtctgtccttcctcctgaagcaggaggaccgcgagattcaggatgcatacttgcaactatttactaagctggacgtggcgctcaaggagatgaaacagtacgtgacacagattaatcggctgctgtctactatcacagagcctactagcgggggatcatgcgacgcctcccttgccgaggaggccagctccctgcccttagtatcagaggaaagcgaaatggatcgatctgaccacgggggaattaagaaggtgtgttttaaagtagcggaggaagatcaggaggactccgggcacgacacaatgtcttatagggacagctatagcgagtgcaatagcaacagggacagtgtcctgtcctatacatctgtgcgatcaaacagcagctacctgggatctgacgagatgggtagtggggacgagctgccctgtgatatgcgcatcccatccgacaagcaggacaagttgcatggctgtctggaacacctattcaaccaggtcgactctattaacgccctgctgaagggacccgtcatgagtcgagccttcgaggaaaccaagcatttcccaatgaaccattcccttcaagagtttaagcaaaaggaagagtgcaccattcgcgggcgatccctgatccagatctccattcaggaagacccatggaacctgccgaacagcatcaagaccctggtggacaacatccagaggtatgtcgaggatggtaagaatcaattactgctggccttactcaaatgtactgacaccgaattacaactgaggagggatgccattttttgccaggccttggtcgccgcggtctgtacattcagtaagcagctgcttgccgcgctcggatacagatacaacaacaacggagaatatgaggaatcctcacgcgacgcatctagaaaatggctggagcaggtggccgctaccggagttttgttgcattgccagtccctgctatcccctgccactgtgaaagaggaacgcacaatgctggaagatatctgggtaaccctttccgaactggacaacgtcaccttttctttcaagcaactcgacgagaactatgtggccaatacgaatgtgttctaccatatcgagggctctagacaggcactcaaggtcatcttctacctggactcataccattttagtaagctgcctagtagactggagggaggtgctagcttacggctacatacagccctgttcactaaggtgctggagaatgtggagggtctgccaagcccaggctcacaagccgcagaggatcttcagcaagatataaacgcccagagcttggagaaagtgcaacagtattatcggaagctcagggcattttatcttgagaggtctaatctgcccactgatgcctctacgaccgccgtgaagattgaccaattgatccgtcccataaatgcgctggacgagctgtgccggctcatgaagagcttcgttcatcctaaaccaggagcggccggctccgtgggggccggcctgattcccatctcctccgagctgtgctatagattgggtgcctgccagatggtaatgtgcggcacaggaatgcagcggagtacactgagtgtatccctggaacaagcagccatactagcccgctcccatggactcctgcctaaatgcattatgcaggccacagacatcatgaggaagcaaggtccccgggttgagattctcgccaagaacctcagggtaaaggaccagatgccccagggggctccaaggctctatcgcctctgccaacccccagtggatggtgatctgtag

SEQ ID NO: 128441 - DNA, 4686 bp, synthetic construct
  misc_feature 1..4686: note = Description of Artificial Sequence: Synthetic coding sequence
  source 1..4686: mol_type = other DNA
atggaagcgcccagtggtagtgaacccggcggtgatggtgccggagactgtgcccacccagaccctagggcgcccggcgcagccgctccctctagtggaccaggcccctgcgctgcagcgcgtgagtctgagaggcagttgcggctgcgcctctgcgtgcttaacgagattctggggacagaacgagattacgtgggtaccctgagattcttgcaatctgcttttctccatcgcattcgacagaatgtagccgacagtgttgagaagggacttaccgaggaaaacgtaaaggttctgttttccaatatcgaggatatattggaagtccataaggattttttggcagcactagagtattgccttcaccctgagccccaatcgcagcatgaactcggtaacgtcttcttgaagttcaaagataagttttgtgtgtacgaggagtactgttctaatcacgaaaaggccctgcggttactggtggaactcaacaaaataccaaccgtaagagcgttcctcttgtcctgcatgctgttgggcgggcgtaaaacgacggacattcccctggagggataccttttgagccctatccagcgaatctgcaaatacccacttctgctgaaggagttggccaaacggactcctggcaagcaccctgatcatccagccgtgcagagcgccctacaggccatgaaaacagtgtgttcaaatatcaacgagacaaagagacagatggagaagttagaggctctagaacaattgcagtcgcatatcgaaggttgggaaggttcaaacttaaccgacatatgcacccagctcctgctgcaggggactctgctgaaaatttctgcgggcaatatccaggagcgggcattttttctgttcgataatctgctcgtgtactgcaaacggaaaagccgcgtgaccggctcaaagaagtcgacaaagaggaccaaatcaattaatggatctctgtacatattcagaggaagaattaatacagaagtaatggaggtagagaacgtggaggacggcactgctgattatcattctaacgggtacaccgtcaccaatggctggaagatccacaataccgcgaagaacaaatggtttgtttgtatggcaaagaccgccgaggaaaagcagaaatggctggatgccattatccgagagagggaacaacgcgaaagcctaaagttgggcatggagagagacgcctatgtaatgattgccgagaaaggcgagaagctgtaccacatgatgatgaacaagaaagtaaacctgatcaaggataggcgacgcaaactgagcactgtgcccaaatgtttcttaggcaatgagtttgtagcctggttgctggagattggagaaatctctaaaacagaagagggagtaaatctgggccaggcactgctggaaaatgggatcatccaccacgtctctgataaacatcagttcaagaacgagcaagtgatgtatcggtttcgttatgacgatggtacttataaggccaggtccgaacttgaagacataatgtctaagggcgtccgtctttactgcaggctgcactctctatatacgccagtgataaaggatcgggattaccaccttaaaacctacaagtctgtactccctggatcaaagctagtggactggctgctggcccaaggcgactgccagaccagggaagaagccgtggcactgggtgtggggttgtgcaacaacgggtttatgcatcacgtgctggagaaaagtgaatttcgggacgagagccagtacttccgcttccatgcggacgaagaaatggaaggtacatcttcaaagaacaagcagttgagaaatgatttcaaactagtagagaacatcttggccaaacgacttctaatactgccccaggaggaggattatggattcgacattgaagaaaagaacaaagccgtggtggtgaagtcggttcagcgcggttccctcgcagaagtggctggcctacaggtgggccgtaagatctacagtatcaatgaggaccttgtttttctgcgaccattcagcgaggtagagtctattcttaatcaaagcttctgcagtagacgccctctgaggcttctggtagccacaaaggctaaagaaattattaaaatccccgatcaaccagacactctgtgctttcaaattagaggcgcggctccaccatacgtgtatgcagtcgggcgcggctctgaggctatggccgctgggctttgtgcgggccagtgcattttaaaggtcaatgggtccaatgtgatgaatgatggggcgcccgaagtgttggagcactttcaggccttccgatcccgtcgagaagaggccctggggttgtaccaatggatctaccatacccacgaagatgcacaagaagcccgtgcatctcaagaagcctctacggaggaccctagtggcgaacaagcgcaagaagaagaccaggctgacagtgcttttcctctccttagtctgggtcccagactatccctgtgtgaagactctcctatggttaccctcaccgtcgacaacgtccatctggagcatggagttgtgtacgagtacgtttcaactgctggagttcggtgccatgttctcgagaagattgttgaaccacggggttgcttcggcttgactgctaagatcttagaggcttttgcagccaatgatagcgtcttcgtagagaactgtaggaggctgatggcactgtcctccgccatagttaccatgcctcacttcgagtttagaaacatttgtgacaccaaactcgaaagcataggacagcgtatcgcctgctatcaggaatttgcagcccagctcaaatcccgggtgtccccacccttcaagcaggctcccctggaaccccaccccctgtgtggtctcgacttttgccccacaaactgccacattaatctaatggaggtctcatatccgaagacaaccccctcagtggggagatcattttctatccgctttggaaggaagccatcccttatcggacttgaccccgaacagggccacctcaaccccatgagctacacccagcactgtataaccactatggccgctccctcctggaagtgcttgccggcggctgagggtgatcctcagggacagggcctccatgacggttcattcggccctgcctctggtactcttggacaggaagatcgcggcctctctttcctgctcaagcaggaggacagagagattcaggatgcttatctccaactctttacaaaactagatgtggcactcaaggagatgaagcagtacgtgacacaaataaatcgtctcttgtctacaatcaccgagccaacatctggtggctcctgtgatgccagtcttgccgaagaggccagttccctgcccttggtatccgaggagtccgagatggaccgcagcgaccacgggggcattaaaaaagtgtgctttaaagtagcagaagaggaccaggaggactctgggcacgatacaatgagctacagagattcctactccgagtgcaactccaatagagactcagtcctgagttacacctcagttaggagcaacagttcatatcttgggagcgacgaaatgggctctggtgacgaactgccatgtgacatgcgtatccctagcgataaacaggacaaacttcacgggtgtctcgagcatcttttcaatcaggtggattccattaatgcactgttgaaggggccggtgatgtctagggcctttgaagagactaagcacttccccatgaatcacagcctgcaagagttcaaacagaaagaggaatgcacaattcgcgggagatctcttatccagatctcaatccaggaagatccctggaacctgcccaactctattaagaccttggtggacaatattcagaggtacgtggaggacggcaagaaccagcttctgctcgcactgctaaagtgtacggacacagaattgcagctacggcgagacgcgatcttctgccaagcactcgtcgccgccgtttgtacattcagcaagcagcttctggccgccctgggatacagatacaacaacaatggagagtatgaggaatcatcccgtgacgcatccagaaaatggctcgagcaagtggccgcaactggagtacttctgcattgccagagcctgcttagccccgctaccgttaaagaggagcggactatgctcgaagatatctgggttacgctgagcgagctcgataatgtgactttctctttcaaacagctcgatgagaattacgttgcgaacacaaacgtgttctaccatatcgaaggctccagacaggcgctaaaagtaatcttctatctcgactcttaccacttttcaaagttgccatcacggttggagggaggtgcatccctgcggctgcataccgctttgtttactaaaggggaactccaagcctggggtcgtgaggaccacggaggacgcgccaaagccaccaagcacaccgggtcacaaccgcctgcacggcctcgccatctcccctcgcaatgttggaggacttggagaggctgtcttctgcaagccgctagaccacgtcgcatctgcagtagaacctccactaggtccccctggaggaaatttagcagtatcactgcaaactctggtcatttcacatggtccggcctcacctgcccgcggatgccagcgcctagacgttag

SEQ ID NO: 128442 - DNA, 4821 bp, synthetic construct
  misc_feature 1..4821: note = Description of Artificial Sequence: Synthetic coding sequence
  source 1..4821: mol_type = other DNA
atgtctgaggactccagaggagattccagagctgaatcagcgaaagacctggagaagcagctacggctgcgagtctgcgttctatcggaactgcagaaaactgagagagattatgtaggcacactggagttcctggtctccgccttcttacatcgcatgaaccagtgcgctgcatcaaaagttgacaagaacgttacagaggagacagttaagatgctcttcagtaatatagaagacattctggctgtccacaaggaattcttgaaagtcgtcgaagagtgcctgcaccctgagcctaacgcccagcaggaagtcggaacatgcttcctccattttaaggataagtttcgcatctatgatgagtactgctccaaccacgagaaagcccagaagcttctgctggagctgaataagataagaaccatacgcactttcctccttaattgcatgctcttaggcggacgaaagaatacagatgttccattggagggctacctggtaacccccattcagcgcatctgtaagtatccactgatcctgaaggagctcctgaagcgaacgcccaggaagcattcagactacgcggctgtgatggaagcattgcaggccatgaaggcggtgtgcagcaacatcaatgaggcaaagagacaaatggagaaactggaggtgctcgaggaatggcaatctcacattgagggctgggaaggatccaacatcacagatacttgcactgagatgctgatgtgcggtgtgctacttaaaatttcaagcggaaacattcaggagagggtgttctttttattcgataatctgctggtgtattgtaagcgcaagcaccggcgactgaaaaacagcaaggcgagcactgacggacaccgctatctattccggggtagaatcaacacagaggtaatggaagttgagaatgttgatgacggaacggccgacttccattcctccgggcatatcgtggtcaacggatggaagattcataacactgccaaaaataaatggtttgtgtgcatggctaagacgcccgaagagaagcacgagtggttcgaggcaatccttaaggaaagagaacgccgcaaaggcttaaagcttggtatggagcaggacacatgggtgatgatatccgaacagggtgagaagctatataagatgatgtgccgccagggtaatctgattaaggaccgcaagcgcaaacttaccacattcccgaaatgttttttagggtccgagtttgtgagctggcttctggagattggcgaaattcataggcccgaggagggcgttcacctcgggcaggcactgttagagaatgggatcatccatcacgtgactgacaagcatcagtttaagcccgaacagatgttgtaccgctttaggtatgatgacggcacgttttacccccggaatgagatgcaagatgtgatttcaaagggagtgcgactgtattgtcggcttcactcattgttcacaccagtgataagggataaagactatcatctgcgaacttataaaagtgtagtcatggccaacaaactgattgactggctcatcgcacagggagattgtcggaccagagaggaggcaatgattttcggagtaggtctttgtgataacggtttcatgcatcatgtgctcgagaagagcgaatttaaagacgagccgctcctgttcaggtttttcagcgacgaagagatggaggggtctaacatgaaacatcgcctcatgaaacatgacttgaaagtggttgaaaacgtgattgccaagtccctactcattaaaagtaatgagggttcctacggttttggcctggaagacaaaaacaaagtaccgatcatcaaactagtggaaaaggggagcaacgcggagatggctgggatggaagtgggtaaaaaaattttcgcgatcaatggcgatcttgtgttcatgcgtccttttaatgaagtcgactgctttttgaaatcatgtttaaactctagaaagccactgcgggtgctggtatctaccaagccacgggaaaccgtaaagatcccagacagtgccgatggattaggattccagataagaggcttcgggccttccgttgtgcacgctgtcggccgtgggacagtggctgctgcagctggtctgcatccagggcagtgcattattaaagtgaatggtattaacgtgtctaaggagacccatgcctccgttatcgcgcacgtaactgcctgtcgtaagtataggaggcccactaaacaagactccatccagtgggtgtataactctattgagagtgcacaggaggacctgcagaaatcacattcgaaaccaccaggagacgaagcgggggatgcgttcgattgcaaagtggaggaggtgatcgataaattcaacacaatggccataattgacggcaagaaagaacatgtgagcttgacagtggataacgtgcacctagaatatggcgtggtttacgaatacgacagcaccgctggcattaagtgcaacgtggtggaaaagatgattgagcctaaggggttttttagtctcacagctaagatcctggaagccttggccaagagcgacgagcactttgttcagaactgcacctcgctgaactctcttaatgaggtcattcctacagacctacagtccaaattctcagcactttgctccgagagaatcgaacacttgtgccaacgcatcagctcatataaaaagtttagccgcgtgctcaaaaatagagcttggccgacttttaaacaagctaaaagtaaaataagtccattgcactctagtgacttctgccctacgaactgtcatgtaaatgtaatggaagtatcttacccaaagacatcaacatctttggggagcgcctttggcgttcagctagacagtcgcaagcacaattcccacgataaggagaacaagtcatccgagcagggtaaactgagtcccatggtatatatccagcataccattactactatggctgccccgagcggactcagtctcgggcagcaagacgggcatggtctgcggtacctgctaaaggaggaagatctcgagacccaggacatttaccagaaactcctcggcaagctccaaaccgccctgaaggaagtggagatgtgtgtatgtcagatcgatgacctcctctcaagcatcacctactccccaaaactagagagaaagacgagtgagggcatcatacctaccgactcagataatgagaagggagaacggaactctaagagagtgtgtttcaatgtcgctggggatgagcaggaggattctggccacgataccattagtaatcgggactcctacagcgattgcaactccaacaggaattcaatcgcgtctttcacttccatctgcagctcccagtgttctagctattttcatagcgacgagatggactccggagatgagctgcccctctccgtcaggatcagccacgataaacaggataagatacattcatgccttgaacacctcttctctcaagttgactcgatcactaacctgcttaaagggcaggcagtggtgagggcttttgaccaaacaaagtatctgaccccgggccgggggctgcaggagtttcagcaggagatggaaccaaaattatcttgtccgaagcggcttaggctgcacataaagcaagacccctggaacctcccctctagcgtgaggacgcttgcgcagaacattcgcaagtttgtggaagaagtcaaatgccggctcctcctcgcacttctggaatatagcgactccgagacacagctaaggagagacatggtgttttgccagacactcgttgccactgtgtgtgccttcagcgagcaattgatggccgcactgaatcagatgttcgataacagtaaagaaaatgaaatggagacgtgggaagcgagcagacgatggttggatcagattgcgaatgcgggcgtcctcttccatttccagtcactcctcagcccgaacctaacagacgaacaggccatgctggaggacaccctggtggcattgttcgacctagagaaggtgtctttctacttcaaaccttcagaggaggaaccccttgtcgcaaatgtcccgctgacttaccaggctgagggcagtagacaggcgctgaaagtgtacttttatatcgattcctatcacttcgaacaactgccacagagactgaaaaatggcggaggcttcaagatacaccccgtgctcttcgcacaggcgctggaatcgatggaaggatattactaccgggataatgttagcgtagaagaattccaggcccagatcaatgctgcaagtttggaaaaagtcaaacagtataatcagaagctgagggccttctatttagacaagtccaattcaccaccaaactcgacttccaaggcagcgtacgtagacaagttgatgcgacccctgaacgctctagatgagctgtaccgcctggtagcatcattcatcagatctaagcgcacagccgcctgcgccaatactgcctgttccgcgagcggtgttggattactaagcgtttcaagtgagttgtgtaatcgacttggcgcctgccatattatcatgtgctcttccggcgtccacagatgcactctcagtgtgaccttggagcaggctataatcctggcccgttcacatggcttgcctcctaggtacatcatgcaggcaactgacgtgatgcggaagcagggagccagagtccagaacactgccaagaacttgggcgtaagagaccgtaccccccagtccgcgccaagactgtataagctctgcgagccacctcccccagccggtgaagaatag

SEQ ID NO: 128443 - DNA, 3525 bp, synthetic construct
  misc_feature 1..3525: note = Description of Artificial Sequence: Synthetic coding sequence
  source 1..3525: mol_type = other DNA
atgtcagaggatagtcggggtgatagtagggcagagagcgctaaggacttggagaaacaattgcgactgagagtctgcgtactgagtgagctgcagaaaaccgagcgagactacgtgggaacattagagtttcttgtcagcgcattccttcacagaatgaatcagtgcgccgcatccaaagtagacaaaaatgtgactgaagaaaccgtgaaaatgctgtttagtaacattgaggacatactggcagtccataaggagtttctgaaggtggtcgaggagtgtctgcaccccgagcctaacgcccagcaggaagtcggcacatgctttctgcattttaaagacaagttccgcatctacgatgaatactgtagcaatcatgagaaggcgcaaaaattgctgctggagctgaataaaatcagaactatcaggacattcctgctcaattgcatgctgctcggaggccgaaaaaacacggatgtgccactcgaagggtacttggtgacgcccatccaacggatctgtaaatacccgctgattctcaaggaattgctgaaacgtaccccaagaaaacacagtgattacgctgccgttatggaagccctgcaggctatgaaggcagtatgttccaatattaacgaggccaagaggcagatggagaagttagaagttctggaggaatggcagtctcacatcgaaggctgggagggctccaatatcaccgatacctgtacagagatgctcatgtgtggcgtgctgttgaaaatcagcagtggaaacattcaagagcgggtcttcttcctgtttgacaacctacttgtgtattgtaagagaaaacacaggcggctgaagaattccaaggcatcaacagatgggcatcgatacctctttcgcggccggataaataccgaagtgatggaggtcgagaacgtggacgatggcacggcagactttcacagcagtgggcacatcgtcgtgaatggctggaagattcacaacaccgctaagaacaaatggtttgtgtgtatggccaaaacccctgaggaaaagcatgaatggtttgaagctattctcaaagagcgggagagacgcaaaggcctgaagctcggcatggagcaggatacctgggtaatgatttcagaacaaggcgaaaaactctacaaaatgatgtgtcgccaagggaacctcattaaggacaggaaacggaagctgaccaccttcccaaaatgtttcctcggctccgaattcgtaagttggttgctcgagataggggagattcaccgacccgaagaaggggtacacctaggacaggcccttttagagaatggaatcatccaccatgtgaccgataagcatcaatttaagccggagcaaatgctgtaccgattccgctatgacgacggaaccttctatcctcggaatgagatgcaggacgtcatttctaagggagtccgcctgtattgcagattgcattctttgttcacccccgttatccgggacaaagactaccacctgaggacatataagagtgtggtcatggcgaataagctaatcgattggctgattgctcagggagattgccggacacgggaagaagctatgatatttggagtgggactttgcgataacgggtttatgcatcacgtgctcgagaagagcgagtttaaggacgagcccctcctgttcagattctttagtgacgaagagatggagggctctaacatgaaacaccgtctcatgaagcatgatctcaaggtggtagaaaacgtgatcgcaaaatctctactcatcaaaagtaatgagggaagctacggatttggcctggaagacaaaaataaggtgccaatcattaaactcgtagagaagggcagcaacgcagaaatggctggaatggaagtggggaagaagatattcgctattaatggcgatctggtgttcatgcgaccttttaatgaggtcgattgctttcttaagagttgcctcaactcacggaagcctcttcgcgtactcgtgagcacaaagccccgggagactgtgaagatacctgactcggccgacggcttgggatttcagatccgcgggttcggcccctcagttgtacacgccgttggccgcggcactgtcgccgctgccgctgggctccaccctggccaatgcattattaaagtcaacgggattaatgtctcaaaggagacccatgcatcagtgatcgcccacgtaaccgcttgccggaagtaccgtcggcctactaagcaagattcaatccaatgggtgtacaacagcatagagagtgcccaggaggacctgcaaaagtcacactctaagcctccaggagatgaagctggcgatgcctttgactgtaaggtggaggaagtcatagataagtttaacaccatggcaataatcgatgggaaaaaggaacacgtttcactgaccgtggataatgttcacttggagtacggggttgtctatgaatacgattctacggcgggcattaagtgcaacgtagtggaaaagatgatcgaaccgaaggggtttttcagtctaaccgccaaaattctagaagcattagctaagtcagacgaacatttcgtacagaactgtacatcactcaattcattgaacgaagtgataccaacagacctgcaatctaagttttcagccctttgttccgagaggatagaacacctctgtcagagaatcagttcgtacaagaaggtaagtgtgctgcttatcctctataccattattgtcgaaatgtatcattttaccgaaatgattactctgtacaatattttggaacttgttcggccacccaactccgagttttttttttcatttttgccgacaaaaaggatgaagacacttaatcagaagaaagtgactcacatgaaaaagaccaacattcagttgcagttctctcgcgtgcttaagaaccgagcttggccgaccttcaaacaggctaaatccaaaatttctccacttcattcttccgacttctgtccaaccaactgccacgtgaacgtgatggaagtgtcctacccgaaaacatcgaccagcctgggcagcgcttttggggtccaatggaaactgtcaccgatggtgtacatccagcatacaataacgacaatggctgccccctccggcctctcacttggccaacaagatggtcacggattgcgctatctcctggaaagaaaaactagcgagggcattatccccaccgactccgataatgaaaaaggagaacggaattcgaagagggtttgctttaatgtggcaggagacgaacaggaggactccggacacgatacaatcagtaaccgcgattcttactcattcagcgactgcaactctaaccggaacagcatcgccagctttacttcaatctgctctagccagtgtagtagttacttccactcggacgagatggacagcggctccgacgaattgccactgtccgtgaggatcagccacgataagcaggataagatccactcttgtttggagcatttattctcccagtag

SEQ ID NO: 128444 - DNA, 1650 bp, synthetic construct
  misc_feature 1..1650: note = Description of Artificial Sequence: Synthetic coding sequence
  source 1..1650: mol_type = other DNA
atggcttccgccagttctggtccgagctcttctgtgggtttcagttcttttgaccctgctgtgccatcttgcactttaagcagtgcctccgggatcaagcggcccatggcctctgaggtcccatatgcatccggcatgcccattaagaaaatcggacaccgctccgtggattcaagcggggagactacatacaaaaagacgacatcttcggcattgaaaggagccatccagctaggtattactcatacggtgggctcactttcaactaaacccgaacgcgatgtcctgatgcaggacttctatgtggtggagtctatattctttcccagtgaagggagcaaccttacacctgcccaccactacaatgattttaggttcaaaacatacgcaccagtagcattcagatattttcgcgagctgttcggtatccgtcccgatgactacttgtactccttatgttctgagcccctgatagagctgtgtagttccggggcatcaggcagtttgttttacgtctccagcgacgacgaatttatcatcaagacagtgcagcataaagaggccgagtttcttcagaagctcctccctggttactatatgaacctgaatcaaaacccaaggaccctcctgcccaaattttacggcctctattgcgtacaggctggcgggaaaaacatccgtatcgtggtgatgaacaacctgctgcctcggtctgtgaagatgcatatcaaatacgatttaaagggcagcacctacaaaagacgtgcgtctcagaaggagcgggagaagccactgcccacgttcaaagatctggactttctgcaggatatccctgacggcttgttcctggacgcagatatgtataatgccctgtgcaagacacttcagcgcgactgccttgtgttgcaaagctttaagattatggattactccttgctaatgtctatccataacatcgaccatgcccagcgcgagcccctgtctagcgagacccagtacagtgtggatacaagacggccggcacctcagaaagccttatactccacagctatggaaagtattcagggtgaagctcgccggggcggcactatggagacagacgaccacatgggcgggattcctgctcggaactcgaaaggggaacggcttctgttgtatattgggataattgacatcctgcaatcctacaggttcgttaagaagttagaacactcttggaaggctttggtgcacgatggggatactgtgtccgtacacaggcctggcttttatgccgagcggttccagcgttttatgtgtaatactgtcttcaaaaaaatccccctaaagccgtccccatcaaaaaagttcaggagcggtagcagcttcagccgtcgagcgggatctagtggaaactcatgtattacatatcagccgtcagtgagcggggagcacaaagctcaggtgaccacaaaagccgaagtcgagccaggggttcacctggggaggcctgacgtgctgccgcagacaccacctctggaagaaattagcgagggtagtccaatcccagatcccagtttcagccccctggtcggagagacacttcagatgttgacaacttcaactactctggaaaaactggaggtggctgaaagtgagttcactcattag

SEQ ID NO: 128445 - DNA, 1689 bp, synthetic construct
  misc_feature 1..1689: note = Description of Artificial Sequence: Synthetic coding sequence
  source 1..1689: mol_type = other DNA
atggcgtccgctagtagtgggccttcctcgagtgtgggattctcaagctttgatccggccgtccctagttgtactctctcgagtgccgcaagcgggatcaaaagacccatggcttctgaagtgctcgaagcccgccaggattcctacattagcctggtcccatacgcaagcggtatgccgatcaaaaagatcgggcaccggagtgttgattccagcggggagaccacctataagaaaaccacttcatctgccctgaaaggagcaatccagctgggcatcacacacaccgttggatctttgtcaacaaagcccgagagggatgtgctgatgcaggatttctacgtggttgagtcaatctttttccccagcgaggggagcaatctgactcctgctcaccactataacgacttcaggtttaagacctacgcccccgttgcgtttcggtatttccgcgagttgttcgggatccgcccagacgactacctgtattccttgtgttctgagcctctgattgaactctgttcatccggggcttccggaagtcttttctacgtttcttcagacgatgagtttatcatcaagacggtacagcacaaggaggcggaatttctccagaagctcctccctggttattacatgaatctcaatcagaatcctcggacccttttgcccaaattctacgggttgtactgcgttcaagcgggaggcaagaatatacggatcgttgtgatgaataacctgctacccagatccgtaaagatgcacatcaagtacgatctgaagggctctacatacaagcgaagggcctcacaaaaggagcgtgagaagccactcccaacgtttaaagatttagatttcctgcaggacatccctgacgggctttttctggacgccgatatgtacaatgcactgtgcaaaactctgcaaagggattgtctcgtgttgcaaagctttaagattatggattatagcctccttatgagcatccataatatcgaccacgcacagagagaaccactctctagtgaaacccagtatagcgtcgacacaaggagacccgcaccacagaaggcattgtactcaactgccatggaatctatccaaggcgaggcccgccgaggcgggacaatggagacggacgatcacatgggaggcatcccagcaaggaactccaagggcgagcggttactgctttacatcgggattatcgacatcctgcagtcttacagattcgtaaagaagttggaacactcatggaaggctctggttcacgacggcgacactgtctcagtgcacaggccaggattttacgctgagcgctttcagcggttcatgtgtaatacagtattcaagaagattcctctgaagccttctccaagcaaaaaatttcggtcgggtagctcgttctcaagaagagccgggagcagtggaaacagttgtattacctatcaaccctctgttagcggggaacataaggctcaggtgacaacaaaggctgaagtagaaccgggagtccacctgggccggccagatgttttaccacaaacaccacctcttgaagagatatccgaggggtccccgattcctgacccatctttctcacccttggtcggtgagaccctgcaaatgttgacgactagcactaccctagaaaagctcgaggtcgcggagtccgagtttacgcattag

SEQ ID NO: 128446 - DNA, 1503 bp, synthetic construct
  misc_feature 1..1503: note = Description of Artificial Sequence: Synthetic coding sequence
  source 1..1503: mol_type = other DNA
atggccagtgcttccagtggccccagttctagtgttggattttcctctttcgaccccgccgtgccttcatgtacgttgagcagcgcatcgggaatcaagcgtccaatggcctcagaagtcccttatgcttcaggaatgccgattaagaagatcgggcatcgcagcgtcgattcctcgggagagacaacctataagaagactaccagcagtgcgctaaaaggggccatccagctaggaattacccatactgtgggaagcctgagtacaaagccagagcgggatgtactgatgcaggatttttacgtcgttgaaagtatattttttccttcagaaggcagtaatttaactccagcgcatcattataatgacttcagattcaagacctatgctcccgtagcgtttaggtacttccgagagctgtttggtattcgacccgatgactatctctacagtctttgcagtgaaccactgatcgaactgtgctccagcggggcctccggcagccttttctacgtcagtagcgacgatgaatttattattaaaaccgtgcagcacaaggaagccgagtttctacagaagctcctgccaggctattacatgaacctgaatcagaatcccagaacgctccttcctaaattttacgggctctattgcgttcaggccggcggtaagaacatcagaatcgtcgtaatgaataacttgctaccacggagtgtgaagatgcacatcaagtacgacctgaagggtagtacatacaagcggagagcttctcagaaggaaagggaaaagccccttcctactttcaaggacctcgactttctgcaggacatcccagacggtctgtttttagacgccgatatgtacaacgcactttgtaagacactgcagagagactgtcttgttctgcaatcatttaaaatcatggactatagtttgcttatgtccattcataatatagatcatgcccagagggaaccacttagtagtgagacacagtatagtgtggatacgaggcggcccgctcctcagaaagcattgtattctactgcaatggaaagtatccaaggggaggctaggagagggggcacgatggaaacagacgatcatatgggcggaatacctgctcgaaattctaaaggtgagaggctgttactttatattggaattattgatatcttgcagtcttaccggttcgtgaaaaagttggagcattcgtggaaggctttggtgcacgacggagacacagtgtctgtgcaccgacctgggttctacgctgaacggttccagaggttcatgtgtaataccgtttttaaaaagataccctgtgtgcatctggggagacctgatgtgttgccacaaacccctccattggaggagatctctgagggatcccctattcctgacccatcgtttagtccactggtgggtgaaaccctccaaatgttaaccacttctacaacacttgaaaaactcgaggtcgcagaatccgagttcactcactag

SEQ ID NO: 128447 - DNA, 1653 bp, synthetic construct
  misc_feature 1..1653: note = Description of Artificial Sequence: Synthetic coding sequence
  source 1..1653: mol_type = other DNA
atggcaagtgcctcatcaggcccttccagctccgtcggtttcagttcatttgaccctgccgtgccctcctgtacactctcttctgcagcaagtggcatcaaacggccgatggcgagcgaagtcccgtatgcttctggaatgccgattaaaaagatcggacaccgatctgtggatagtagcggtgagacaacctataagaagacaacctcttctgctttgaagggggctattcaactgggaattacgcacacggtgggtagcctctcaacaaagccggagagagatgtccttatgcaagacttctacgttgtggaatccatatttttcccatctgaaggatccaatttgactcccgcccatcactacaacgatttccgatttaaaacatatgcccccgtggcgtttaggtatttccgagagctgttcgggataagacctgatgactatttgtatagtttgtgtagcgaacccctgatcgagctgtgttcttccggtgcctcagggagcttgttctacgtaagcagcgacgatgagtttataattaagaccgttcaacataaagaggccgaattccttcagaagttgctgcccgggtactacatgaatctgaatcaaaatccgcgcaccttgctccccaagttctatggcctgtactgtgtccaggcgggaggtaaaaacatacgcatcgttgtaatgaacaatcttctgccacgcagtgtgaagatgcacatcaagtatgatctgaaagggtccacctataaacgtagggcgagtcagaaggaacgagagaagcctttaccgacctttaaggacctagattttttgcaggatattccagatggactgttcctagacgccgacatgtacaacgcgctctgcaaaactctgcaaagagattgtctggtactgcagagcttcaagatcatggattattccctcctaatgtctatccacaacattgaccatgcccagcgcgagcctctgtcgagcgaaacccagtacagcgtagatactcggcggccggccccacagaaggctttatactccacagcaatggaaagtattcagggggaggccagacgaggaggaacgatggagaccgatgatcatatgggcgggatacccgcccggaatagtaagggagaacgcctcctcctctatattgggatcatcgatattttgcagagctaccggtttgttaagaagttggaacactcctggaaggcactggtgcacgacggtgacacagtctctgttcatcgcccggggttctacgcagagcgcttccaacgattcatgtgtaacacagtcttcaaaaagatccctttgaaaccttcacccagtaagaaatttcgctccggcagctcattctctcgccgcgctgggagcagcgggaatagctgcattacctatcagccctcagtctccggtgagcataaggcccaggtgactactaaagccgaggtggagcctggcgtgcatctcggtaggccagacgtacttccccagactccccctttggaagagatctccgagggtagcccaatcccggatccttcctttagcccactggtgggagagacactccagatgctgaccacatctacgacgctggaaaagctggaagtggccgagtctgaatttactcattag

SEQ ID NO: 128448 - DNA, 597 bp, synthetic construct
  misc_feature 1..597: note = Description of Artificial Sequence: Synthetic coding sequence
  source 1..597: mol_type = other DNA
atgtacaacgctttatgtaaaaccctgcagagagactgtctcgtgttacagtcttttaagattatggactatagtctgctcatgtcaatacataacattgaccacgcacagcgggaaccgctcagtagtgagacccaatactccgtcgacacccggcgtcccgctccccagaaagcattgtactcaaccgccatggagagcatccagggcgaggctagacggggaggtaccatggagacggatgaccatatggggggcattcccgcacgtaactcaaagggggagaggttactgctatatatcggtatcatagatatactgcagagttaccggttcgttaaaaagttggagcattcctggaaggcactggtccatgacggtgatacagtctccgtgcatcgacctgggttttatgctgaaaggttccagagatttatgtgcaacaccgtgttcaaaaagattccactgcagccttggaagtctctaaagctccagagccagtcttctcctatcaagcgaaaggcttcagaagatctggaacaagactcagctatctccgttattcccagatgccagcccctcccccaacagtgttag

SEQ ID NO: 128449 - DNA, 261 bp, synthetic construct
  misc_feature 1..261: note = Description of Artificial Sequence: Synthetic coding sequence
  source 1..261: mol_type = other DNA
atggcatctgaagttttggaagcccgccaggactcatacatttccttggtaccttatgccagcggcatgcccatcaaaaaaatcggacaccgttcagttgattccagtggggagaccacttataaaaagacaacttctagcgcactcaaaggagccattcaactgggaattacacacactgtggggagcctcagcaccaagccggagcgagatgttctgatgcaggacttctatgtggttgagagtatctttttcccatag

SEQ ID NO: 128450 - DNA, 1569 bp, synthetic construct
  misc_feature 1..1569: note = Description of Artificial Sequence: Synthetic coding sequence
  source 1..1569: mol_type = other DNA
atggcgtccgctagcagcggcccctcttcatcagtgggctttagttcctttgacccagcagtccctagctgtaccttgagcagtgctgcatcaggtattaaacggcccatggcctccgaagtaccctacgcctccggaatgcctatcaagaagatcgggcatcgttcagtggactctagcggggagaccacttacaagaaaacaactagttccgccctgaagggagcaattcagctgggcatcacacataccgtaggcagcctctctactaagccagagcgagatgtgctcatgcaggatttctacgtggtggagagcatcttcttccctagcgagggctcaaacctcaccccagctcaccattataacgatttccgattcaagacctacgcccctgtggccttcaggtatttccgggaacttttcggcattcgcccagatgattatctctattcactttgctccgagcctctcatagagctatgctcctctggagcttctggatctctattctacgtttcatccgacgatgagtttatcattaaaactgtccagcacaaagaagcagaatttctgcagaagctcttgccagggtactatatgaacctcaaccaaaaccctcgcactttgcttcccaaattctatggcctgtattgtgttcaagcaggaggtaaaaacataaggattgtagttatgaacaacctgctgcctaggtcggttaaaatgcatattaagtacgatctcaaagggtccacatataagcgtcgcgcatcccaaaaagaaagggaaaaacccctacctaccttcaaggatctggactttctccaggatatcccagacggcctctttctggacgctgatatgtataatgccctgtgcaagactcttcaacgggactgtctggtgctacaaagcttcaaaattatggactatagtttgctgatgtccattcataatattgaccatgctcaaagagagcccctgtcctcagaaacgcagtattccgttgatacaagaaggccggcccctcagaaggccctttacagcacagccatggaaagcatacaaggcgaggctcggaggggtgggaccatggagaccgacgatcagttcgtgaaaaagctcgaacacagctggaaagctttggtacacgacggcgacaccgtctccgtgcaccgccccggcttctacgcggagcgttttcaaaggtttatgtgtaatactgtgttcaagaagatccctctgaagccaagcccctcaaaaaagttccgctctggtagttctttcagcaggcgcgcggggtcgtccggaaattcttgtattacctaccaaccatcagtgtctggtgagcataaggcccaagtgacgaccaaggcagaggttgagccgggtgtgcacctgggacggcccgacgtgctcccccagacgccacctctcgaggagatatccgagggcagtcccattcccgatcccagcttcagtccactggtgggggagaccctgcagatgttaaccacgagcaccacattggaaaaactagaggtcgccgagtcggagtttacccattag

SEQ ID NO: 128451 - DNA, 1623 bp, synthetic construct
  misc_feature 1..1623: note = Description of Artificial Sequence: Synthetic coding sequence
  source 1..1623: mol_type = other DNA
atgagttccgctgcagagaacggcgaggcggctcctggaaagcagaacgaggaaaaaacttataaaaaaactgcttcatctgccatcaaaggggcaattcaactcggcatcggctacacggtaggaaacttaactagtaagcccgagagggacgttctgatgcaagatttctacgttgtcgagtccgtgttcctgccatcggagggctccaatctaacgcccgcccatcactacccggattttaggtttaaaacctacgcccctctcgcgttcaggtattttcgagaactctttgggatcaaaccagacgactatctctattctatctgttcagagcctctaattgagctgtcgaatcctggtgccagtggctcactgtttttcgtgacaagcgacgacgagtttatcattaagacagttcagcataaagaagctgagtttctgcaaaaactgttgcccggttactacatgaatctaaaccaaaatcctaggaccctgctgccaaaattctacggcctgtattgtatgcagtcagggggcattaacatcaggatcgttgttatgaataatgttcttcccaggtcaatgcggatgcactttacctacgacctgaagggctcaacatataaaagacgcgctagcaggaaggaacgggagaagtccaaccccacattcaaggacttagatttcctacaggatatgcatgaggggctttacttcgacaccgaaacatataatgccctcatgaaaacgctccagagggactgcagagtgcttgagtcctttaaaatcatggattacagtctgctgttaggcatccacttcctggatcacagcttaaaagagaaggaggaagagactccgcagaatgtccccgacgcaaaacgaaccggaatgcagaaggttctgtactcaacagcaatggaatcgatccaagggcctggtaaatctggggacggaatcatcaccgaaaatcccgataccatgggaggcatccctgctaagtcacaccgcggagagaaactattgctgttcatgggcatcatcgacattttacagtcctaccgcctcatgaaaaagctggaacacagctggaaggccctggtgtacgacggagacacggtgagcgttcaccggccgagcttctacgctgataggtttctgaagtttatgaacagtcgtgtcttcaagaaaattcaggccctcaaagccagtccctccaagaagcgctgcaattctatcgcggctctgaaggcaacgtcacaagagatcgtctcttctatcagccaggagtggaaggacgagaaaagagacctcctaacagaaggtcaatcgttttcatccctggatgaggaggccctgggctcccgccacaggccggatctggtgcccagcacccctagcctgttcgaagcagccagccttgctacgaccattagcagctcatccctttacgtcaatgaacactacccccacgaccggcctactttgtactctaattcaaaggggctgcccagtagttcaacattcaccctcgaggagggaacgatctacctaaccgccgagcccaatacgttagaggttcaggacgataacgcctctgtgttggatgtctatctgtag

SEQ ID NO: 128452 - DNA, 312 bp, synthetic construct
  misc_feature 1..312: note = Description of Artificial Sequence: Synthetic coding sequence
  source 1..312: mol_type = other DNA
atgagttcggccgccgagaacggcgaggccgctcctggaaaacagaacgaagaaaagacctacaagaagactgcttcctcagctattaaaggtgcgattcagctagggatcgggtacaccgtcgggaacttgacaagtaaaccagagagagatgtgttgatgcaggacttttatgttgtggagtctgtgtttcttccatcagaaggttccaacttgacacccgcacatcactatcctgattttcgattcaagacatatgcacccctggcgttcaggtactttagggaattatttggcatcaaacccgattag

SEQ ID NO: 128453 - DNA, 1623 bp, synthetic construct
  misc_feature 1..1623: note = Description of Artificial Sequence: Synthetic coding sequence
  source 1..1623: mol_type = other DNA
atgtcttccgcggcggagaacggcgaggccgcccctggcaaacaaaacgaggaaaaaacttacaaaaagacggcatcgtccgctattaagggggctattcaacttggtattggctacacggtcgggaacctcacctccaaacctgagcgtgatgttctgatgcaggacttttatgtagtggaaagtgtgttcctgccctctgaagggtcaaatttgacccctgcacatcactaccccgatttccggttcaaaacatatgcacccctggccttcagatatttccgggagctattcggaattaagcccgatgactacctgtacagcatttgcagtgagcccctgattgaactcagcaacccaggtgcctctgggtccctcttctttgtgactagcgatgacgaattcattattaagactgtgcaacacaaagaggccgagtttcttcagaaactgctgccagggtattacatgaatctgaatcagaacccccgaaccctgcttcccaagttttacgggctctactgtatgcagagcggcggtattaatatacggattgtggtgatgaataacgtacttccaagaagcatgcgcatgcactttacatacgacctgaagggaagcacgtataagcggcgggcctctcggaaggagagggaaaagagcaatcccacctttaaagaccttgatttcctccaggacatgcatgagggcctgtactttgacacagagacatacaatgcactaatgaagaccctccagcgagactgccgtgtccttgagtcctttaagatcatggattatagcttgctcctcggtattcatttcctggaccactcattgaaagagaaggaagaggagacccctcagaacgtgcccgacgcaaaacgtactggaatgcagaaggtgctgtattctacggctatggaatccattcagggccctggaaaatctggggacggcataatcaccgaaaacccagataccatgggcggcattccagctaagtcgcaccgcggcgagaaattgctactcttcatgggcattatcgatatccttcagagctatcggctgatgaagaaactcgagcatagttggaaggctcttgtgtacgacggggacactgtcagcgtgcataggccttctttctatgccgatagattcctcaagtttatgaattctagggtcttcaagaagatccaggcactcaaagcctccccatcaaaaaagaggtgtaacagcatcgcggctctgaaggccacttcacaggaaatagtaagttctatcagtcaggagtggaaggatgagaaaagggatctcctgacagaaggtcagtctttcagttcactggatgaggaggccctcggcagtcgccaccgcccggatctggttccgtcaactcccagcctcttcgaagcggcctccctcgccactacgataagcagttcctccctctacgtcaacgagcactatccccatgatcggccaaccctttacagcaactccaaaggtttgccaagcagttccaccttcacattggaggagggcacaatatatttaaccgccgaaccgaacaccctggaggtgcaggatgataacgcgagtgtcttggacgtctatctgtag

SEQ ID NO: 128454 - DNA, 1350 bp, synthetic construct
  misc_feature 1..1350: note = Description of Artificial Sequence: Synthetic coding sequence
  source 1..1350: mol_type = other DNA
atgcaggatttctacgtcgtcgaatctgtattcttgccttctgaaggatccaatctgacaccggcacatcactaccctgactttagatttaaaacatacgctcccctggcctttcggtacttcagagagctttttgggataaagccagatgactatctctattcgatatgcagtgagcctctcatcgagctctccaaccccggggcctccgggagcctgttcttcgtaacctctgacgacgagtttattatcaaaaccgttcagcataaggaagccgaatttttacagaaactgttacccggatactacatgaacttgaatcagaatcctcgaactctcctgcccaagttttacgggctatactgcatgcagagcggcggcatcaatataaggatcgtggtgatgaacaacgtgctgcctcggagcatgcgaatgcattttacttatgacttaaagggctccacatacaagcgaagggcatcacgtaaagagagagagaaatccaatccaaccttcaaggacctggactttctacaggacatgcacgaaggactgtacttcgacacagaaacttacaacgctttgatgaaaaccctgcaaagagactgtcgtgtcctggaatccttcaaaattatggactattcactcctcctggggattcattttctggatcattctctgaaggagaaagaggaggaaaccccacaaaacgtacccgatgcaaagcgcactggcatgcagaaggtgctgtactctactgccatggaaagtatccaagggccaggaaaaagcggcgatggaatcatcactgagaatcccgataccatgggcggcataccggccaagtctcataggggggagaagctactcttatttatgggcatcattgacatcctccagagctatagattaatgaagaaactagaacactcctggaaggcattggtgtatgatggagataccgtctccgtgcaccgcccctccttttacgcagaccggtttctaaaatttatgaacagtcgggtgtttaagaagatccaagctctgaaggcttccccaagtaagaaaagatgtaattccattgcggcactcaaggcaacctcccaagagatcgtaagctcgatcagtcaggagtggaaggatgagaagcgcgacctgttgaccgaaggccagagcttctcatcgctggacgaggaggccctgggatcaagacatcggccagatctcgttcccagcactccaagcctgttcgaagccgcctcactcgctacaacaatttcaagctccagcttatacgtgaacgagcattacccgcatgaccgccctactctgtatagtaatagtaaatag

SEQ ID NO: 128455 - DNA, 489 bp, synthetic construct
  misc_feature 1..489: note = Description of Artificial Sequence: Synthetic coding sequence
  source 1..489: mol_type = other DNA
atgagctctgccgccgagaatggagaggcagcaccaggtaagcagaacgaggagaagacatacaagaagaccgcttcctcagccataaaaggcgctatacaactgggaatcggctatacagtgggcaacttgacctccaaacccgagcgtgacgttctcatgcaggatttttatgtcgtggaaagcgtgtttttaccttccgaaggctcaaatctgacccctgctcaccactatccagattttagattcaagacatacgctcccttagcatttagatacttcagagaacttttcggtatcaaaccagatgactacctttatagtatttgctcggagcctctaatcgaattgtctaatcctggcgcatctggctccttgttcttcgtcacaagcgacgatgagttcatcattaagaccgtccaacataaggaagccgagtttctccagaaattgctaccaggatactatatgaacctgaaccagaactag

SEQ ID NO: 128456 - DNA, 474 bp, synthetic construct
  misc_feature 1..474: note = Description of Artificial Sequence: Synthetic coding sequence
  source 1..474: mol_type = other DNA
atgtcctccgcagctgaaaatggcgaggccgctccgggaaagcagaatgaagagaaaacatacaagaaaacagcctcctcagcaattaaaggcgctatccagcttggtattgggtacacagtgggtaacctgaccagtaagccagaacgggatgtgctgatgcaggatttctatgtagtggagagcgtattcctgcccagcgagggcagcaatctcactccagcgcaccattaccctgactttcgcttcaaaacttatgcacccctggcgttcaggtatttccgcgagctgtttggtattaaacctgacgattacttgtactcgatttgctctgaacccttgattgaactgtctaaccccggggcttcaggttctctgttctttgtaacctccgacgacgaattcattataaagacggtgcagcacaaggaagcagagtttctgcaaaaactgctgcctggttattacatgtag

SEQ ID NO: 128457 - DNA, 1509 bp, synthetic construct
  misc_feature 1..1509: note = Description of Artificial Sequence: Synthetic coding sequence
  source 1..1509: mol_type = other DNA
atgagcagcgctgcggagaacggcgaggcggctcctggtaagcaaaatgaggagaaaacttataagaaaactgcaagctccgccatcaaaggcgcgatacagctgggtattggctataccgtgggaaacctgacgagtaagccagaaagagatgtcctgatgcaggatttttacgtcgtagagtctgtgttccttcctagcgaaggatccaacctcacacccgcccaccactaccccgatttcaggttcaaaacttatgcaccactcgcctttcgatactttagggaacttttcggaattaagcccgacgactacctgtattcgatctgctcagaacccttgatagagcttagcaacccgggagcgtccgggagtctgtttttcgtgacatcggacgatgaattcattatcaagaccgtacagcataaggaagcggagttcctccagaagttactgccaggctactacatgaatcttaaccaaaaccccaggactctgctgccgaagttttacggcctctattgtatgcagtcaggcggcatcaacatcagaattgttgttatgaacaacgtactgcctaggtcaatgcgaatgcattttacatatgacttaaagggatctacgtataagcgcagagctagtcgcaaagagagagaaaagtcaaaccccacctttaaggaccttgattttcttcaggacatgcatgaaggactgtacttcgacaccgaaacatacaatgcccttatgaagacacttcagcgcgactgtagggttctggaatcgtttaagattatggactactcacttctgctgggcatacacttccttgatcactctctgaaagaaaaagaagaagagactccccagaatgtacctgacgcaaaacgaaccggaatgcaaaaggtgttgtacagtactgctatggagtccattcagggcccaggtaagtccggggatggcattattactgagaatcctgacacaatgggaggtatccctgccaaatcccatagaggcgaaaagcttctgcttttcatgggcataatcgatatccttcagtcctaccggcttatgaagaagctcgaacatagttggaaagctttagtctacgatggcgacacagtcagcgtgcaccggccatcattctacgcagacagatttcttaaattcatgaatagccgcgtatttaagaaaatccaggcattgaaagcttccccttccaagaaaaggtgtaacagcatcgcagcacttaaagctacttcacaggagatcgtcagcagtatctcccaggagtggaaagacgagaaaagggacctgttgaccgagggccagtctttcagctcattggacgaggaggcattagggtcccggcacaggcccgacctcgttccgagcaccccttccttattcgaagcagcttctctagcaacaacaatatcctcttccagcttgtacgttaacgagcattatccccacgataggccaactttatactccaattccaaatag

SEQ ID NO: 128458 - DNA, 2007 bp, synthetic construct
  misc_feature 1..2007: note = Description of Artificial Sequence: Synthetic coding sequence
  source 1..2007: mol_type = other DNA
atggagcttgaggttcctgatgaggcagagagcgcagaggccggcgccgtgccatctgaagcagcatgggctgctgagagtggcgccgcagccggccttgcacaaaaaaaagccgctcccaccgaggtgctctctatgacagcacagcccggacccggtcatggcaaaaaactgggacatcgaggagtggatgcttcaggcgaaaccacatataagaagaccacgagttcgactctgaagggggcgatccagctaggcattggatatactgtcggacatttgtcaagcaaacctgaaagggatgtgcttatgcaggatttttacgtagtggaatccatttttttcccaagtgagggaagcaacttaaccccagcacaccactttcaagatttccgctttaaaacctacgctcccgtggcctttaggtacttccgagagctgttcgggatccgaccagacgattacctttatagcttatgcaatgagcctttgatagagcttagcaatcccggcgccagtggaagcctattctacgtcacctccgatgacgagtttattatcaaaaccgtaatgcacaaggaggctgaattcctgcagaaactgcttcctggatactacatgaaccttaaccaaaaccctaggaccctcctaccaaagttctatggcctgtactgcgtgcagtccggagggaagaatattagagttgtcgtgatgaataacattctcccccgagtagtcaaaatgcacctgaagttcgacttgaaaggctctacttacaagcggcgggccagcaagaaggaaaaggaaaaatcttttccgacttataaagacctggactttatgcaggacatgcccgagggtttgctgctcgacgccgatacattcagtgccctggtaaaaactcttcagcgcgactgcttggtcctggaaagctttaaaattatggactatagtctcctgctcggtgtgcacaatattgaccagcacgagcgggaacgccaggcacagggggcccaatcgacctccgatgagaaacgccctgtgggccagaaagccctgtattccactgctatggagtccatacagggcggtgccgcgcgcggagaagctatcgagagcgatgatactatgggaggaatcccagccgtgaacggaagaggagagcggctgctcctgcacataggaatcattgacattctgcagagctacaggtttatcaagaagctggaacacacctggaaggcccttgtgcacgatggtgatactgtctctgtccatcggccatcattttacgcagagcgattttttaagttcatgtcgaatacggtgttccgcaagaactcttccctcaaaagtagcccatcaaagaaagggaggggaggggcccttcttgctgttaagcctctaggccctaccgccgccttttccgcatcccagattccctctgaacgcgaagaagctcaatacgacctgagaggagcacggagttacccaaccctggaagatgaagggcgtccagatttactgccgtgtacaccgccctccttcgaggaggccacaacagccagtatcgccaccaccttgtcgtccacctccctgagcatacctgaacgatcccccagtgagacttccgaacagccacgctaccgtagaagaacacaatcatcgggccaggacggcaggccgcaggaagagccaccggccgaagaagacctgcagcaaatcaccgttcaggtggagccagcatgttcagtagagatagttgtgccgaaggaggaagacgcgggcgtggaggctagtccagctggggcgtctgccgcagtcgaagtggagacggcaagccaagcttcagatgaggagggggcacctgcctctcaagcctctgacgaggaggacgcacccgctactgatatttactttcccacagacgagagatcttgggtctattcccctctgcattattctgcgcaggctcctcccgctagcgacggagagagcgacacgtag

SEQ ID NO: 128459 - DNA, 2103 bp, synthetic construct
  misc_feature 1..2103: note = Description of Artificial Sequence: Synthetic coding sequence
  source 1..2103: mol_type = other DNA
atggaactcgaagttcctgacgaagccgagagtgctgaagcaggtgcagtgccctcagaagcggcttgggccgcagagtctggcgcagctgccggactggctcaaaagaaagccgctcccaccgaagtgctgtctatgacagctcagcccgggcccgggcacggtaaaaaattgggacatcggggagtggatgcctccggtgaaacaacttacaagaagaccacctcctcaacgctaaagggggcaattcagctggggatcggctatacggtggggcatctgtcaagcaagcccgaacgcgacgtcctgatgcaagatttttatgtcgtggaatcaattttcttcccgtcggagggaagcaatctgactcctgcccaccacttccaagatttccgttttaagacatacgccccggtggcttttcgctattttagggagctgttcgggatccgacccgatgattatctctactcactgtgtaacgagccgctcatcgaactatcgaatccaggcgcctctggatctcttttttacgttacatctgacgatgagtttattatcaagaccgttatgcataaggaagctgaattcctgcaaaaactcttgccaggctattacatgaatctcaaccaaaatccgcggacccttcttcctaagttttacgggctgtactgtgttcagtccggcggcaaaaacatccgggttgtcgtcatgaataatatcttgccccgcgttgtcaaaatgcacctgaaatttgacctgaagggttcaacatacaagaggcgggctagtaaaaaagagaaagaaaagtcctttccaacgtataaagaccttgattttatgcaagatatgccagaaggactactcctagatgcggacactttctccgccctcgtcaaaaccctacagagggactgccttgtgctcgaaagcttcaaaatcatggactactcccttctcctcggggtccacaatatcgatcagcacgagcgggagcgacaggcccagggagcgcagagcacttctgatgaaaaacgacctgtcgggcagaaggctctgtatagtacagctatggaaagtatccagggtggggccgcccgtggcgaggccatcgaaagcgatgatacaatgggcggaatccctgcagtgaacggccgcggagaacggctcctgcttcatattggaataattgacatccttcagagttatcgatttattaagaaactcgaacacacgtggaaagcattggttcatgacggagacaccgtgtctgtccaccgccctagcttttatgccgagagatttttcaaattcatgtcaaacaccgtgtttagaaagaattcttccctgaaatcgagcccctccaagaaaggcagagggggggccctgttggccgtcaaaccactgggacctactgccgcctttagtgcctcacagataccgagcgaacgagaagaggcccagtatgacttaagaggagctcggtcttacccaaccctggaagacgagggcaggccagacctgttgccatgcaccccaccgtcatttgaggaggccacgaccgcgtcaatcgctactacactctcgtcaacgtcactgagcattcccgagagatcccccagtgagacttctgagcagccgcgataccgacggagaactcagagctcaggccaggatggacgcccacaggaagagcccccagcggaggaagacctgcagcagattacggtgcaagtggagcctgcctgctctgtcgagatcgtggtgcctaaggaagaagacgcgggcgttgaggcctcccctgcaggggccagcgccgcggtggaagtggagaccgcctcccaggcatctgatgaggaaggagcacctgcaagccaagcatcagatgaggaagacgcccctgcaacagatatatatttctggcgcctgtgggggcctcacgcacctacctggccttggcggcgggaaggccgggcggcatgtttatgcccatatcccccccatgtggtcacaccgtttccggggacgggcttatgcgcctcttggagcccagacgggacgggcggattaggggcaatgagctgttgtgtctccgtatcctag

SEQ ID NO: 128460 - DNA, 1923 bp, synthetic construct
  misc_feature 1..1923: note = Description of Artificial Sequence: Synthetic coding sequence
  source 1..1923: mol_type = other DNA
atggaactggaagttccggacgaagcagaaagtgctgaagcaggagccgtccccagcgaagcggcttgggcggccgagtcaggcgccgccgccggtctggctcagaagaaggcagccccaaccgaggtactctctatgactgcgcagcctgggcccggccatggcaagaagctaggacaccggggcgttgacgcatcaggagagaccacctacaaaaaaacgacaagttcaacgctcaagggtgccattcaactcgggatagggtacaccgtcggccatctctcaagcaagccagaacgtgatgtcttgatgcaggatttctacgttgtagagtccatcttcttccctagcgagggttctaacctgacccctgcacaccacttccaagacttccgcttcaagacatatgcaccagtcgctttcagatatttccgcgagttgttcgggattcgccccgatgactacttgtatagcctgtgtaatgagccgctaattgaactaagtaatcccggggcgtcaggaagcttattctacgtgacatccgacgatgagtttataattaaaaccgttatgcacaaggaagcggaattcctccaaaaactgctccccgggtattacatgaatctcaatcagaatcctcgcacgttgctaccaaaattctatgggctttactgtgtgcagtctgggggaaagaatattagggtggtggttatgaacaatatattgccacgagtggtgaagatgcaccttaagtttgacctaaagggatccacctacaagaggagagctagcaaaaaagaaaaggagaagtcgttccccacatacaaggatctcgactttatgcaggacatgcctgagggattgctgctcgatgctgataccttctctgcactggtgaagactctgcaaagagattgtttagtactcgaatcgtttaaaatcatggattattccctcttgttgggcgtccataacatcgatcaacacgagagggaacgacaagctcagggggcgcagtcaacctcggatgagaagcgtcccgtgggacaaaaagcactatattccactgctatggagtctatccaaggaggcgctgcaagaggcgaagcgattgagtcagacgacacgatggggggtattcctgcagttaatggacgcggtgagagacttctgctgcacatcgggataatcgacatactgcaatcttacaggttcatcaaaaagctggaacacacttggaaggctttagtgcacgatggagacaccgtatcagtccacaggccttcattttacgccgaacgctttttcaaattcatgtctaatactgtgttcagaaaaaatagttcactgaaatcatccccttcaaagaaggggcggggcggcgccctgctggctgtaaaaccacttggtccgactgcggcctttagcgcatcgcagattccttcagaaagagaagaagcccagtacgacttacgaggcgctagatcatatcctacactagaggatgagggccggcctgacctgctgccatgtactccgccgagcttcgaggaggctacgactgcatccatcgccaccactctgtcgagtacgtccctgtccatcccggagcgttccccctcggagacgagtgaacagccccgctacagacgcaggactcagtccagtgggcaggatgggcggccccaggaagagccgcccgctgaagaggacctgcagcagatcactgtccaagtggagccagcatgtagcgtggagatagtggtgccgaaggaggaagacgccggggtggaggcatctcctgccggtgcatcagcagccgtcgaggttgagactgcttctcaggcctccgatgaggaaggcgctccagcgtctcaagcatccgacgaagaagatgcaccggctaccgatatatatttttag

SEQ ID NO: 128461 - DNA, 576 bp, synthetic construct
  misc_feature 1..576: note = Description of Artificial Sequence: Synthetic coding sequence
  source 1..576: mol_type = other DNA
atgcagagtgtgttctatcctgcaggacggattagtgagcggtacgacattaagggctgcgaagtctcacgctgggtggaccccgcgccagagggatctccactagtgctggtgttaaaggacctgaacttccaaggcaagaccatcaacttggggccacagagatcctggttcctgcggcagatggagctggacaccaccttcctcagggagttgaacgtactggattacagtttgctcatagcgtttcagcgcctgcacgaagatgagcgcggccccgggagctcgttgatcttccgcactgctcgatcagttcagggtgcccagagccccgaggagtctcgcgcgcagaatagacgcttacttcccgacgccccgaacgctttgcatatccttgatggccccgagcagcgctatttccttggcgtggtcgacttggcgactgtctacggcctccgaaaaaggctagagcacctctggaaaaccctccgctatcccgggcggaccttttctactgtgtcccccgcaagatatgcacgtcggttgtgtcagtgggttgaagctcataccgagtag

SEQ ID NO: 128462 - DNA, 1185 bp, synthetic construct
  misc_feature 1..1185: note = Description of Artificial Sequence: Synthetic coding sequence
  source 1..1185: mol_type = other DNA
atggccgcccctagtcccggcccacgggaagtgctcgccccatcccccgaagctggatgcagggctgtcacctccagtcgccgggggctgctatggagacttagggataaacaatctcgactcggattgtttgagatctcccccggtcatgagctgcacgggatgacatgtatgatgcaggccggcctgtgggccgctactcaggtgagcatggaccatcctcccactgggccaccgagtagggacgatttttctgaggtactgactcaggttcacgagggatttgaactgggaacgctggcgggtcctgcctttgcttggttgcggaggagcctaggcctggctgaggaggattatcaggcagcactcggaccaggtgggccgtacctccagtttctcagtactagtaaatctaaggcaagtttcttcctgtctcatgatcaacggttcttcctcaagacacaggggagaagggaggttcaggccctgctggcccatctaccacgttatgtgcagcaccttcagagacatccccacagtctcttagctagactgcttggcgtacatagcttgcgggtggaccgcggtaaaaaaacatattttatagtgatgcagagtgtgttttacccagccggtcggatcagtgaaagatacgacatcaagggctgcgaggtctctagatgggtggatcccgcaccagaaggtagtcccctagtgctggtgcttaaggacctgaactttcagggaaagaccatcaacttagggccgcagcggagttggttcttaaggcaaatggagctcgatacaacctttttgcgcgaactgaacgtgctcgactactccttgttgatcgccttccagaggctacatgaagacgagcgcggcccaggtagtagcctaatttttaggaccgccaggtcagtccagggggctcagtctcctgaagaatcccgggcgcagaacaggcgcctgcttccagacgccccgaatgctctgcatatcctggatggccccgagcagaggtatttccttggcgtggttgatctggcaactgtctatgggttgcgcaaacgcctggaacacttatggaaaaccttgcgatatccaggccggaccttctctactgttagtcctgcacggtacgctagaaggctgtgccagtgggtggaggcccatacagaatag

SEQ ID NO: 128463 - DNA, 1128 bp, synthetic construct
  misc_feature 1..1128: note = Description of Artificial Sequence: Synthetic coding sequence
  source 1..1128: mol_type = other DNA
atgatgtgccaatcggaagcccgccagggccccgaactccgcgcggcaaagtggttgcacttccctcagctcgccttgcgacggcgtttagggcaattgagttgcatgtcccgcccggccctgaaactgcgttcttggcccctcaccgtcctgtactacctgcttccatttggcgcactaaggcctctgagccgggtcggctggagacccgtcagcagagttgctctctacaagtcagttcccactaggctgttaagccgcgcttggggccggcttaaccaggtcgagctaccacactggcttcgccgaccagtctactcattgtacatctggaccttcggtgtcaatatgaaggaggcggccgtggaagatctgcatcactatcgcaacctcagcgagtttttccgccggaaactcaaaccccaggccaggcccgtttgcggcttgcactctgtaatatcaccatctgatggccggatactcaatttcgggcaggtgaaaaactgcgaggtggagcaggtcaaaggtgttacttactccctggagtcgttcctggggcccaggatgtgtaccgaagaccttcctttccctcccgccgccagctgtgattcattcaagaaccagttagtgaccagggaaggcaacgaactgtaccattgtgtaatctacctcgcgcctggggattaccattgcttccacagtcctaccgattggacagtgtcacatagaagacattttcctggatccctcatgagcgttaacccaggaatggcaagatggattaaggaattgttctgtcacaacgagcgagtcgttcttacaggagattggaaacacgggttctttagtctcaccgctgtcggagctacaaacgtggggagcattcgcatctactttgaccgggacctccacacaaactccccccgccactcaaaggggtcatacaatgatttctccttcgtcactcataccaatagggaaggcgtgccaatgcgtaaaggagagcatctcggggaattcaacctagggagcactatcgtgctgatctttgaggcacctaaggacttcaacttccagctgaagactgggcaaaaaatcagatttggggaggcattgggttctttatag

SEQ ID NO: 128464 - DNA, 1227 bp, synthetic construct
  misc_feature 1..1227: note = Description of Artificial Sequence: Synthetic coding sequence
  source 1..1227: mol_type = other DNA
atggccaccagcgtgggacaccgctgtttgggattacttcacggagtagcaccctggagatcttcccttcacccctgcgagataaccgcactgtcccagtctttgcagcctctgcgcaaattgccgttccgggcattcaggaccgatgcccgtaaaatacatacagcgcctgcacgcacgatgttcctccttcggccgttgcccatcctgctagtaaccggggggggctacgctggttacaggcaatatgaaaagtaccgggaacgggagcttgagaaattggggcttgagatcccccccaaattggccggacactgggaagtggccctgtacaagtcagttcccaccaggctcctgtctagggcatgggggagactcaaccaggttgaacttccgcactggctgaggcgccccgtgtacagtttgtacatctggacctttggcgttaatatgaaggaggcagcagtggaggacctacatcactaccgcaacctcagcgaattttttcgccgtaagctgaaaccccaagcccgtccggtttgtggtctgcatagtattagtccctcagatggccggatactgaactttggtcaggtgaaaaattgcgaggttgagcaggtgaagggtgttacctactcactcgagtcattcttgggtcctcggatgtgtactgaggatctaccttttcccccagctgccagctgcgacagcttcaagaaccaactcgtgactagggaggggaatgagctctaccattgcgtgatttacctggctcccggagattaccactgttttcattctccgaccgactggactgtctcccaccggcgacatttcccgggctcattgatgtctgtgaatcccggtatggcaagatggattaaggaactgttttgtcataatgagagagttgtacttactggcgattggaaacacggttttttcagcctaacggctgtcggggctaccaatgtcggatccatccggatctactttgaccgagatcttcacactaatagccctcggcactccaaggggtcctataacgacttcagtttcgtcacccatacaaacagggaaggcgtgcccatgcgtaaaggggagcatctgggcgagtttaacctcggatccaccatcgtcttaatctttgaagcccccaaagactttaattttcagctgaagacgggtcagaagattcgatttggagaggccctggggtcactttag

SEQ ID NO: 128465 - DNA, 1128 bp, synthetic construct
  misc_feature 1..1128: note = Description of Artificial Sequence: Synthetic coding sequence
  source 1..1128: mol_type = other DNA
atgatgtgtcagtctgaggctcgacaaggaccggagctgcgggctgcaaaatggctccacttcccccagctcgctctgagacgtcgcttgggtcagctctcctgcatgagcagacctgccttgaaactgcggagctggcccctcactgtgctgtactatttgttaccttttggtgccctcaggccactctctagagttgggtggaggccggtgtcccgcgtcgccttgtataagagcgtcccaaccaggctgctgtctcgcgcatggggccggcttaatcaagttgagctcccacattggcttcggaggcccgtgtacagtctgtacatctggacgttcggggtgaatatgaaggaagccgctgttgaggatctccatcactatcggaacctgtccgagtttttcaggagaaaacttaaaccgcaagcgcggcccgtgtgtggcctgcatagcgtcatctccccttctgacggtcggattcttaacttcggtcaggtgaagaactgtgaggtagagcaggtaaaaggggttacgtacagcctagagtcgtttttgggcccccggatgtgtaccgaggatctccctttccccccagcagcgtcttgtgactcgttcaagaaccagttggtcactcgggagggtaacgaactctaccattgtgtcatttatctggcccccggggactatcactgcttccactctcccaccgactggacagtcagtcatagacgccacttccctggcagtcttatgagtgtaaatccaggtatggcacgatggattaaagagctattttgtcacaacgagcgggtggtacttactggagactggaagcacgggtttttctccttaaccgccgtcggggctacaaacgtcggcagcatcaggatctattttgacagagaccttcatactaactccccaaggcacagcaaaggaagctataatgacttttccttcgtcacccataccaatagagaaggagtcccaatgaggaaaggtgagcacttgggtgagtttaatttgggatcaaccatcgtgctaatctttgaggcccccaaggatttcaatttccagctgaagacgggccagaaaatccggttcggggaagctctcggttctctgtag

SEQ ID NO: 128466 - DNA, 789 bp, synthetic construct
  misc_feature 1..789: note = Description of Artificial Sequence: Synthetic coding sequence
  source 1..789: mol_type = other DNA
atgatgtgtcagtccgaagctcggcaggggcctgagctgcgggccgctaagtggcttcacttcccacagctcgcgctgcgccggaggctcgggcagctttcctgcatgagtagaccagcacttaaactgcgttcatggcccctgaccgtcctgtactatcttctgccatttggagccctgaggcctctctcaagggtcgggtggaggccagtcagccgagtggcactatataagagtgtaccaaccaggctgctgagcagggcatggggacggctcaatcaagtggaactgccccactggttaaggagaccagtatacagcctctacatatggacgtttggtgtaaacatgaaggaggccgctgtcgaggatttgcatcattatcggaatctgtctgaatttttccggcggaaactcaaacctcaggcccgtccggtgtgcggcctccattccgtgatcagcccttcagacggtagaatcctgaatttcgggcaggtgaagaattgtgaagtagaacaggttaaaggggtgacttacagtctagagagtttcctgggaccgcgaatgtgcacagaagacctgcccttcccaccagccgctagttgtgactcctttaagaaccaactggttactagggagggaaatgaactgtatcattgcgtgatttacttagccccaggggattaccactgcttccacagtccaactgattggacagtcagtcataggcgccacttccctggcccagcccacaagcagcctaaagcacagcaaggtctcctccagtag

SEQ ID NO: 128467 - DNA, 687 bp, synthetic construct
  misc_feature 1..687: note = Description of Artificial Sequence: Synthetic coding sequence
  source 1..687: mol_type = other DNA
atgatgtgccaaagtgaagctagacaggggccagaacttcgggcagctaaatggttacacttcccccagctggcactgcgccgccgcctcggccagctttcctgcatgagtagaccagcactgaagctccgtagttggcccctcactgtgctgtattatctcctacccttcggagctttaaggccactctcacgtgtggggtggaggcccgtatccagagtggcgctgtataagtcagttcccacgcgccttttgagtagggcatggggccgcttaaaccaggtggagctgcctcactggctcagaaggccggtgtattccctgtatatctggactttcggagtgaatatgaaggaggctgccgtagaggacctgcatcactacagaaacttaagcgaattttttcgccgcaaacttaagccccaggcccggcctgtatgcggattacatagtgtgattagcccgtcagacggaaggattttgaattttggccaggtgaagaattgcgaagttgagcaggtgaagggagtcacgtactctctagaaagctttctgggaccccgcatgtgcacggaggacttgccattcccccctgccgcttcttgtgattccttcaaaaatcagttagtgactagggagggtaatgaactgtatcactgcgtgatctatcttgcccctggcgattag

SEQ ID NO: 128468 - DNA, 222 bp, synthetic construct
  misc_feature 1..222: note = Description of Artificial Sequence: Synthetic coding sequence
  source 1..222: mol_type = other DNA
atgatgtgtcagagtgaggcgcgccagggccccgagctgagagcggccaaatggctacacttccctcagttggccctacgtagacggttgggccaattaagctgtatgtcacgcccagctttgaaactcaggtcttggccactcaccgtcctctactacctgctgcccttcggcgcactgcgtccactgagtcgggtgggttggaggcctgtctccagatag

SEQ ID NO: 128469 - DNA, 222 bp, synthetic construct
  misc_feature 1..222: note = Description of Artificial Sequence: Synthetic coding sequence
  source 1..222: mol_type = other DNA
atgatgtgtcagtctgaggcgcgacaggggccagagctgagagccgccaagtggctgcatttcccccagctcgcattaagacgacgcctcgggcagctaagctgtatgagccgaccagccttaaagctgcggtcatggcctctgaccgtcctttattacttgcttccattcggagccttgcggcccttgtcccgagttggatggagaccggtgtcccgctag

SEQ ID NO: 128470 - DNA, 1230 bp, synthetic construct
  misc_feature 1..1230: note = Description of Artificial Sequence: Synthetic coding sequence
  source 1..1230: mol_type = other DNA
atggctacatctgttggtcaccgatgcttgggtctgcttcacggcgttgccccatggagatcatccttgcacccctgcgagattactgccctgagccagagtctgcagcccttacgcaagctgccctttcgcgcctttagaaccgacgcccgcaaaatccacacggccccagccaggactatgtttctgctcagaccactaccaattctgctggtgaccggcggagggtacgccggttacaggcagtacgagaaatatagggagcgggagctagaaaagcttggcttagaaattccacctaagctcgcaggccactgggaggtcgccctctacaaatccgtccctaccagattgttaagcagagcatggggacggcttaatcaggtcgaactcccgcattggcttcgccgcccggtttactccctttatatttggaccttcggggtgaatatgaaagaggctgctgtggaggacctgcatcactataggaatttgagcgagtttttcagaaggaagctcaagcctcaggcccggcctgtctgtggcctgcactccgtgattagcccttctgacgggagaatcttaaactttggacaagtgaagaactgtgaggtggagcaggtgaaaggagtgacttatagcctagagtcgtttttgggtccacgcatgtgtacggaggacctcccattcccaccagctgcctcatgcgactctttcaagaatcagctggtgacccgggaagggaacgagctgtatcactgtgttatctacctggcccccggcgactatcattgttttcacagccctacagactggactgtctcacaccggcgccatttcccgggctccctgatgtccgttaacccaggaatggctcggtggatcaaggaactgttttgtcacaacgagcgcgtggtgcttacaggggattggaagcatggcttctttagcctcacggcagtgggagcgactaacgtgggtagcatacgtatatatttcgaccgggatctacataccaactctcccaggcattccaaaggcagttataatgatttctccttcgtgacccacaccaatcgcgagggcgtgcctatgcggaagggggagcatctgggagaatttaatcttggctctacaatcgtgcttattttcgaggcccctaaggatttcaattttcagctgaagaccggacaaaaaatacgctttggcgaggcccttggctcactgtag

SEQ ID NO: 128471 - DNA, 246 bp, synthetic construct
  misc_feature 1..246: note = Description of Artificial Sequence: Synthetic coding sequence
  source 1..246: mol_type = other DNA
atgatgtgccagtccgaggcgaggcagggtccagaactgcgggctgcgaaatggttgcatttccctcaattagcactccgtcggcgactgggacaactcagctgtatgagtcgtcccgccttgaaattgcgctcttggccactgacagtcctctattatctgctcccttttggcgcacttcgtccactgtctcgtgtaggatggcggcccgtttcaagggtcgccctgtacaagtctgtgccttag

SEQ ID NO: 128472 - DNA, 981 bp, synthetic construct
  misc_feature 1..981: note = Description of Artificial Sequence: Synthetic coding sequence
  source 1..981: mol_type = other DNA
atgatgtgtcaatcggaggccagacagggccccgagctacgcgctgccaagtggcttcattttccacagctggccctccggaggcgactaggccagttgtcttgcatgtcccgccctgccttaaaactcagatcttggccactgacagttctgtactatctgctgccattcggcgcgctccggccacttagtcgagtggggtggaggccagtgagccgcgttgccctttataagtcagttcccacacggctactgagccgcgcctggggcagactcaaccaagtggagctgcctcactggttgcgtcgccccgtctatagcctatacatatggacgtttggagtaaacatgaaagaggctgctgttgaggatttacaccactataggaacctgtcggagtttttccgtcgaaaactgaagccacaagcacgacccgtctgtggtctccattcggtgatctcaccaagcgacggaaggatcctaaattttggtcaagtgaaaaactgtgaagtggaacaggtcaagggtgttacgtattcgctggagtccttcctaggcccacgcatgtgcacggaagacttgccttttcctccagccgcttcctgcgactcctttaagaatcaactcgtgacacgcgagggcaacgaattgtatcactgtgtgatctacctcgccccaggggattatcactgtttccactccccgactgattggaccgtctcccaccgcaggcacttcccgggaagtttgatgtcagtaaacccaggcatggccaggtggattaaagaactcttttgccataacgaacgcgtcgtgttgaccggagattggaagcacggattcttttctttgaccgctgtaggtgctactaatgtgggttcaattcgcatatatttcgatagagacttacacactaactctccacggcacagtaaggggagctacaacgacttctctgtcgtggggtcgctgaccagatag

SEQ ID NO: 128473 - DNA, 984 bp, synthetic construct
  misc_feature 1..984: note = Description of Artificial Sequence: Synthetic coding sequence
  source 1..984: mol_type = other DNA
atggagtacgccgtaaactgccatgttattacttgggagagaattattagccactttgatattttcgcttttggccacttctggggctgggcaatgaaagcattgctgattcggagctacggtttgtgttggacaattagcatcacttgggaactcacagagcttttcttcatgcacctgctacccaactttgccgagtgttggtgggaccaggtgatcttggacatcctcctgtgcaacggcggagggatctggctcggaatggtggtgtgcagatttctggaaatgcgcacgtatcattgggcctcattcaaggatattcacaccactaccggcaagattaagagggctgtcctccagttcactcccgcctcatggacgtatgtcagatggtttgatccaaaaagttccttccagcgggtggctggtgtgtacctctttatgatcatctggcagttaactgagctcaataccttttttctgaagcacatctttgtattccaggcttctcaccctctgagctggggccgcattctgtttatcgggggaatcaccgccccgactgtgcgccagtattatgcataccttacggatacacagtgcaaacgtgtgggtacacagtgttgggtatttggggtgattggttttctcgaagcgatagtatgcattaagttcgggcaggacctgttttccaaaacccagatcctatacgtggtactatggttgctttgtgtggcttttacgactttcctttgtttgtatggaatgatctggtatgccgaacattacggccatagagagaagacatacagtgagtgcgaagacggaacatatagcccggagatctcctggcatcaccggaagggcacaaaaggatcagaagacagcccaccaaaacacgcgggcaacaacgagagccattcttcaagaagacgcaacagacattcgaagagcaaagttacaaatggagtggggaagaagtag

SEQ ID NO: 128474 - DNA, 1422 bp, synthetic construct
  misc_feature 1..1422: note = Description of Artificial Sequence: Synthetic coding sequence
  source 1..1422: mol_type = other DNA
atggccagctgtgtgggcagccgtacgctgagcaaggacgatgtcaattacaaaatgcacttcaggatgatcaatgaacagcaagtggaggacattactattgattttttctaccggcctcatacaattacattactcagctttactattgtctcacttatgtatttcgcattcacccgggacgattccgtacccgaggacaatatttggagaggcatactgagtgtgattttcttcttcctcattattagcgtcctcgcatttcctaacggacccttcacaaggccacacccggccctctggcgcatggtgtttggtctgtctgtgctctactttctctttctcgtgttcctgctgttcctaaatttcgagcaggtgaaatcacttatgtactggctcgaccccaatctgcgctatgccaccagggaagctgatgttatggagtatgcggtgaactgtcatgtcatcacctgggagcgaattatcagccattttgatatttttgcttttggccatttctggggatgggcgatgaaggccctgctgattaggtcctatgggctgtgttggacaattagtatcacctgggaacttactgagctcttctttatgcacttgctccctaattttgccgaatgttggtgggaccaggtgatcttggatattcttctttgcaacggtggcggaatttggctaggaatggtggtgtgcaggtttttggaaatgagaacatatcattgggcctccttcaaggacatccacaccacgacaggcaagatcaagcgggcagtcctgcagttcaccccagcttcttggacttatgtccgctggttcgatcccaagtcttctttccagcgtgttgcaggggtgtatctgttcatgataatctggcagctcacggaattgaatacttttttccttaagcacatcttcgtgttccaggcgtcacaccctctgtcctggggtcgcattttattcatcggaggcattacagcgccaactgtgaggcagtattacgcgtaccttacggacacccaatgtaagagagtgggaacccaatgttgggtcttcggggtaatcgggttcctggaggctatagtgtgcataaagttcgggcaggacctattcagcaagacccaaatcctgtacgttgtactctggctcctctgcgtggccttcacgacctttctctgcctctatgggatgatttggtatgcagagcattacggccacagggagaaaacttactccgagtgcgaagatggaacgtattcgcctgaaatttcctggcatcaccgcaaggggacgaagggtagtgaagactcaccccccaaacacgccgggaacaacgagagtcacagcagcagacgccgaaataggcactcaaagtctaaagtgacaaacggagttgggaagaagtag

SEQ ID NO: 128475 - DNA, 1464 bp, synthetic construct
  misc_feature 1..1464: note = Description of Artificial Sequence: Synthetic coding sequence
  source 1..1464: mol_type = other DNA
atgcgacgcggggagagacgggatgccggagggcccaggcctgagtcacccgtcccggccggtcgcgcctctttggaagagcctcctgacggcccaagcgcaggacaggccaccggacctggcgagggcaggagatccaccgagagcgaagtctacgatgacgggactaacacattcttttggcgcgcccatacattgacagtgttattcatcttgacatgcacccttggatacgtgactctgctcgaagaaaccccgcaggatacagcttacaataccaaacggggcatagtagccagcatcctcgtcttcctctgctttggagttactcaggccaaggatggtcctttctctcgcccacacccagcttactggcgcttttggctgtgcgtgagcgttgtatacgagcttttccttattttcattctgttccaaacagtgcaggacggaagacagtttctgaaatacgttgaccccaagctcggggtacctctgcccgaacgagactacggtggcaactgtctaatctacgacccagataatgaaactgacccatttcacaatatctgggataaactggatggattcgtgcctgcccatttcctggggtggtacctaaagaccctcatgattcgagactggtggatgtgtatgattataagtgtcatgtttgaattcctggaatacagcctcgagcatcaactgcctaatttctcggaatgctggtgggatcactggatcatggacgtcctcgtttgcaacggcttaggcatctattgcgggatgaagacactcgaatggttgagtttgaaaacctacaaatggcaaggcctgtggaatatacctacatataaaggcaagatgaaacggatagctttccaattcacaccctactcctgggttcggtttgagtggaagccagcatcaagcctgagacgatggctcgccgtatgcggtatcattctggtgttccttctcgccgagttgaacacattttatctcaaatttgtgctttggatgccacctgagcattacctcgtgcttctgcggctggtctttttcgtgaacgtgggaggcgtcgctatgagagaaatttatgactttatggatgaccccaagccgcataagaaactgggtcctcaggcgtggttggtcgctgcgatcaccgccactgagttactgattgtggtgaaatacgatccccatactctcaccctcagcctgccgttctatatctcgcagtgttggaccctaggctccgtgttagccctgacatggacagtgtggaggtttttcctgcgtgatatcacgctgcgctataaggagacacgctggcagaaatggcagaacaaggacgaccaaggtagtactgtcggtaacggcgatcagcacccactaggcctcgacgaggacctgcttggtcctggtgtcgccgaaggggagggagctcccacacctaactag

SEQ ID NO: 128476 - DNA, 2802 bp, synthetic construct
  misc_feature 1..2802: note = Description of Artificial Sequence: Synthetic coding sequence
  source 1..2802: mol_type = other DNA
atggccgcctcacgcctggactttggcgaggtggagacctttctcgaccgccacccagagcttttcgaggattacctcatgaggaagggcaagcaggaaatggttgaaaaatggctgcagcggcatagccaggggcagggagcgcttgggcctcgcccgtcattagcaggcacttcgtctcttgcccactccacatgcaggggaggctcttcagtcgggggggggacgggcccaaacggcagcgctcactcacagccgttacctggcgggggcgactgtggaggcgtgccactctccccatcatgggccggcggtagtcgcggagatggaaatctccagcgtagagcctctcagaaggagcttcgcaagtcattcgcacgatctaaagcaattcacgtgaaccgaacctatgatgagcaggtgacaagcagggcccaggaaccactttctagcgtcagacgtcgggcgctactccgcaaggcctcgagtctcccgccaacgacggcgcacatcctctccgcccttttagagagtcgcgttaacttgcccagataccctcctacggcgatagattacaaatgccacctgaagaagcacaacgaaaggcagttcttccttgagctagtgaaagatatcagcaacgacctggacctcacgtccttatcttataagatccttattttcgtgtgcctaatggtcgacgccgaccggtgttccctctttctggttgaaggcgccgctgctgggaagaagactctcgtgagtaagttctttgatgtccatgccggtacccctcttctcccttgcagcagtaccgaaaatagcaatgaggtccaggttccctggggcaaaggaattatcggatacgtcggagagcacggagagacagtaaacatccccgacgcgtaccaggatcgtcgcttcaacgacgagattgacaagctgactggatacaaaacaaaaagcctgctatgcatgccaatccggtcatcagacggagagattatcggtgtggcacaggcaattaataaaattcccgagggagcacctttcaccgaggatgacgaaaaggtaatgcagatgtatctgccattttgtggaatcgccatctccaatgctcagctgtttgcagcgtcaaggaaggaatacgaacgctcccgggccctcctagaggttgttaatgacctgtttgaggagcagacagacctggagaagattgtaaagaagatcatgcacagggctcagacacttctcaaatgtgaaagatgttcagtcctcctgctggaagacatcgaaagccctgtcgtgaaattcaccaagagctttgaactgatgagccccaagtgttcagccgatgcggaaaactcattcaaggagtcaatggaaaaatcctcatactcagactggctgatcaacaatagtatcgctgaactggtggcctctaccggtttgcccgttaatatctcagatgcctaccaggaccctagattcgatgctgaggccgatcaaatctcagggtttcatatcagaagtgtgctgtgtgtgcccatctggaattcaaaccaccaaattatcggcgtggcgcaggttcttaatcgtttggatgggaaaccttttgatgacgcggatcagcggttgtttgaggctttcgtcattttctgcggtttagggatcaataacactatcatgtacgaccaggtcaagaaaagttgggctaagcagagtgtagccctggatgtcttgagttatcacgccacctgctccaaggcggaggtcgacaagttcaaggcagcgaacatcccattggtaagtgagctcgcaattgacgacattcacttcgacgatttttccctcgacgtagatgcaatgattactgctgctctgaggatgtttatggaattgggtatggtacagaagtttaaaattgattatgaaaccctgtgcagatggctgctgacagtccggaaaaactaccgcatggtcctataccacaattggaggcacgcattcaatgtgtgtcagttgatgtttgccatgcttacaaccgccgggttccaagatattcttaccgaagttgaaattctcgcggtgattgtgggttgtctttgccatgatttagaccacaggggtactaataatgccttccaggctaaaagtgggtctgctctagctcagctctacgggacctcagccaccctggagcaccatcactttaaccatgctgtgatgattctgcagtcagaagggcataacattttcgcaaacctgagttctaaggaatactcggacctgatgcagcttctcaagcagtctatcctcgctacagatctgaccttatacttcgagcgccggacagagttctttgagctcgtttcgaaaggtgaatacgactggaatataaaaaatcaccgggatatcttcagatcgatgctcatgacagcctgtgaccttggtgcagttactaaaccatgggagattagccgacaggttgccgagctcgttactagcgagttctttgagcagggcgaccgggaacggcttgaactgaaactcaccccttccgccatatttgatcggaacagaaaggacgagcttcccaggctgcaactggagtggattgacagcatttgcatgcctctgtatcaggcactcgtgaaagtcaacgtaaagctgaaacccatgttggatagtgtggccacaaaccgtagcaagtgggaagaactgcaccaaaagcggctcctggcttccaccgcaagttcaagcccagcctctgtgatggtggccaaagaagatcgaaattag

SEQ ID NO: 128477 - DNA, 2052 bp, synthetic construct
  misc_feature 1..2052: note = Description of Artificial Sequence: Synthetic coding sequence
  source 1..2052: mol_type = other DNA
atgctcaagcaagcccgaaggcccttatttcgaaacgttctgtctgccacccaatggaagaaagtgaaaatcacacgactcgtacagattagcggcgcatctctcgctgagaagcaggagaagcatcaggactttttaattcagaggcagaccaagactaaagacaggcgctttaatgatgaaatcgacaagttaaccgggtacaagacaaaatctcttctctgcatgccaattcgctcatccgacggcgagattatcggcgtggcacaggctattaataagattccagagggcgccccattcacagaggatgacgagaaggtgatgcagatgtacctcccattctgtggcattgcaatcagtaacgcccaattgttcgcagcttctcgaaaagaatacgagcgcagtagggccctgctcgaggtggtcaacgacctgtttgaggagcaaactgacctcgaaaaaatcgttaagaagattatgcaccgcgcccagacactgcttaagtgcgagcgctgttcggttctgttactagaggacattgaatctcccgtcgtgaagttcacgaaatcatttgaactaatgagccccaagtgttccgcagatgccgagaatagtttcaaagagtccatggaaaagagctcgtatagtgattggctgatcaacaacagcattgctgagttggtggcctccaccggtctgcccgtgaatatatcggatgcgtaccaggaccccaggttcgacgccgaagctgatcagatctcggggtttcacatccgcagtgttctctgcgtgcccatatggaatagcaatcatcagatcataggggtcgcccaggtactgaataggcttgatggcaagccattcgatgatgctgaccagcgtttgtttgaggcattcgtgatcttttgcggcctggggataaataacaccataatgtatgatcaggtcaaaaaatcctgggcaaagcagtccgtcgcacttgacgttctctcataccacgctacctgttccaaagccgaagtggataaatttaaggcagcaaatataccgcttgtgtctgaactggccatcgacgacatccacttcgatgacttcagcttggacgtagatgctatgatcactgccgccctgcgcatgttcatggagctggggatggtgcagaagttcaaaatcgactatgagaccttgtgtagatggttgctaactgtcaggaagaactaccgaatggtactctaccacaactggagacatgcatttaatgtgtgtcaactcatgttcgccatgctgactactgctggtttccaggacatactgacagaagtggaaatcctggccgtcattgtggggtgcctttgtcacgaccttgatcatcgaggaacaaataacgcctttcaagccaaatcaggctccgcactagctcagctgtatggaactagcgctacactggagcaccaccacttcaaccatgctgtgatgatactgcaaagtgaaggccacaacatctttgcaaacctttcgtcaaaagagtattctgatttgatgcagctccttaaacagtctatcctggcaacagatcttacactgtacttcgagaggcgtacagagttttttgagcttgtgtccaagggagagtacgattggaatataaagaatcacagggatatatttagatccatgttgatgactgcctgcgaccttggcgcggtcacgaagccatgggaaatctcacgacaggtcgcagaacttgttacttccgagtttttcgaacagggcgatcgggaaagactggagctgaagctgaccccttctgctatctttgataggaacagaaaggatgagctgcctcggctacaactagagtggattgattccatttgcatgcctttatatcaagcgctggtgaaggttaacgtgaagcttaagcccatgctggactccgtggcaacgaataggagcaagtgggaagagttgcaccagaaaaggctgctggcttcaacagcctccagctcgcctgctagtgtgatggtagctaaggaggaccggaactag

SEQ ID NO: 128478 - DNA, 1470 bp, synthetic construct
  misc_feature 1..1470: note = Description of Artificial Sequence: Synthetic coding sequence
  source 1..1470: mol_type = other DNA
atgagcccgaaatgctccgccgacgcagagaactccttcaaagaaagcatggagaaatcctcttactcagactggctgataaacaacagtatcgccgagctggtggctagcaccggccttcccgttaacatttcagacgcctatcaagacccacggttcgatgctgaagccgaccaaatctccggtttccatatccgcagcgtgctgtgtgttccgatatggaattctaatcatcagattatcggcgtggcacaggtactaaatcgcttagatggcaaaccgtttgatgatgccgatcagcgcctgtttgaggcgttcgtgatcttctgcgggctgggaattaacaatacaattatgtacgaccaggtgaaaaaaagttgggccaaacagagcgtcgctttggatgttctgtcctatcatgcaacctgttcaaaggccgaagtggataaattcaaagctgcgaatattcccctggtcagcgagctggctatcgatgatatccactttgatgatttttctctagacgttgacgccatgatcaccgcagcactgcggatgttcatggaactcggcatggttcagaagttcaagatcgactatgagactctgtgccgctggttgttgacagtgcgcaagaactacaggatggtgctttatcacaattggaggcacgcctttaacgtgtgccagctcatgttcgccatgcttacaactgctgggtttcaggacatcttaaccgaagtggaaatcttagcggtgattgtgggttgcctctgtcacgatctagaccatcgcggcacaaacaatgcgttccaggctaaatcaggctctgctctggcacagttgtatggtacttcagccacacttgagcatcatcatttcaaccacgcagtgatgatattacagagtgagggccacaacattttcgcaaacttatctagcaaggaatatagtgatctgatgcaactgctcaagcaatcaatacttgcaaccgatctaacactttatttcgaaaggaggactgagttttttgagctggtgtctaagggagaatacgactggaacatcaaaaatcatcgggacatttttaggtcaatgctgatgaccgcgtgtgacctgggcgccgtgacgaagccttgggagatcagtcgacaggttgcagagctggttaccagcgaattcttcgaacagggggacagagagagactggaattgaagctgacaccctccgctatattcgaccggaacaggaaggacgagctcccccgactgcagctggaatggatagactccatctgtatgccactgtatcaggccctggtgaaggtgaatgttaaattgaagcctatgctggacagtgtcgcaacgaacagatctaaatgggaggaactccaccaaaagcggctgttagcgagtacagcgtcaagcagccccgctagcgtgatggtcgccaaagaggatcgtaattag

SEQ ID NO: 128479 - DNA, 1728 bp, synthetic construct
  misc_feature 1..1728: note = Description of Artificial Sequence: Synthetic coding sequence
  source 1..1728: mol_type = other DNA
atgcagatgtacttgcctttctgcggaattgccataagtaacgcccagttattcgccgccagtcggaaagaatacgaacgctcaagggcattgctggaggttgtcaacgatctttttgaggagcagacagacttggaaaaaatcgtcaaaaaaatcatgcatcgggctcagacactgctgaagtgcgaaaggtgctccgtgttactgctggaggacatagagtcacctgtcgtcaagttcacaaaaagtttcgaactgatgtctccaaagtgttcagcagacgctgaaaacagttttaaagaatctatggagaaatccagttattccgactggttgatcaacaattctatcgcagagctggtggcttctacgggcctccccgtgaatataagcgacgcataccaggacccaaggttcgatgccgaagcagatcagatatcagggtttcacatcaggtctgtactgtgtgtacccatctggaactctaaccaccaaatcatcggggtagcacaggtcctgaatcgcctagacggaaaaccatttgatgatgcagaccaaaggctcttcgaggcattcgtcatattctgtgggcttggcatcaacaataccatcatgtacgatcaggtcaagaaaagctgggctaagcaaagtgtcgccctagacgttctgagttaccatgccacctgttccaaggctgaagtcgacaagttcaaggcagcaaacatacctctggtgagcgagctcgcgatcgacgatatccattttgatgacttttccttggacgttgacgctatgatcacagccgctctgcgcatgttcatggagttgggtatggtacagaagtttaaaatcgattatgagacattgtgccgatggctactgacagtgaggaaaaattacaggatggttctgtaccacaactggcgccacgcatttaacgtgtgccagcttatgtttgccatgttgactaccgcggggttccaagacattctgacagaggtcgaaatactagcagtaattgtggggtgcctgtgccatgacctggaccatagagggacaaataacgctttccaggcaaagtccggatcagcattggcccagctgtatgggacctctgctaccttagaacaccaccactttaaccatgcagtgatgatcctacagtcagagggtcataacatttttgcaaatttaagctctaaggaatattccgacctgatgcagctactcaaacagagcattctggccacagacttaacactgtactttgagcgtagaacggagtttttcgagctggtgtccaaaggcgaatacgattggaatataaaaaaccatcgggacatcttccgctcaatgctcatgacagcatgtgatctcggggctgtaaccaagccttgggaaatctcccgccaggtagctgagctcgtcactagcgaattcttcgagcagggtgacagagagcggctggagcttaagctgacacccagtgcgatctttgataggaataggaaagatgaacttccacggcttcagctggagtggattgactctatatgcatgccactgtaccaggctctcgtaaaagtaaatgtgaaattaaagcctatgctggattccgttgccactaatcggtctaagtgggaggagctccaccaaaagcgccttctggccagtacggcttcctcctccccagcctcagtaatggtcgcaaaggaagacaggaactag

SEQ ID NO: 128480 - DNA, 393 bp, synthetic construct
  misc_feature 1..393: note = Description of Artificial Sequence: Synthetic coding sequence
  source 1..393: mol_type = other DNA
atgccaattagaagtagtgacggggagatcatcggggtggctcaagccatcaacaagatccccgagggggcccctttcaccgaggacgatgagaaagtgatgcagatgtatctccccttttgtggaatagccatttccaacgcccaactcttcgccgcgagccggaaagaatacgagcgcagccgagccctgttggaagtagtcaacgatctgtttgaggagcagaccgacctggaaaagatcgtaaagaaaataatgcacagagctcaaacgctgctgaaatgcgaacggtgctccgtgctgctgctcgaggacatcgagtccccagtggtgaagtttactaaaagctttgaactaatgtcgcccaagtgcagtgccgatgctgagaactag

SEQ ID NO: 128481 - DNA, 1728 bp, synthetic construct
  misc_feature 1..1728: note = Description of Artificial Sequence: Synthetic coding sequence
  source 1..1728: mol_type = other DNA
atgcagatgtacctgcccttttgtgggattgccatctccaacgcacagctgtttgccgcatccagaaaggagtacgagagaagtagggcactactagaagtggttaacgatctgtttgaggagcagactgacctggaaaaaatagttaagaaaattatgcacagagcccagacactgttaaagtgtgagcgctgcagcgtactgctccttgaagatattgagagtccggtggtgaagttcaccaagtcctttgagctgatgtcaccgaagtgctcagccgatgctgaaaattctttcaaggagtcaatggaaaaatcatcttactccgattggctcatcaacaactctatcgcagagctggtggcaagcaccggactgccagtgaacatatctgacgcttatcaggaccctaggtttgacgcagaggcggaccagatttctggattccatatcagaagcgtgctctgtgtccctatttggaactccaatcatcaaattatcggggtcgcccaggtcttgaatcgactggatggaaagccctttgatgatgctgatcagaggctgttcgaagcttttgtcatcttttgcggtttagggatcaacaacaccatcatgtacgaccaggtaaagaaaagctgggccaagcagagcgtggcgctggacgtgctgtcgtatcacgccacgtgctctaaggcagaggtggacaagttcaaggctgccaacatccctctagtttctgagttggcaattgacgacatccattttgacgacttcagcctcgatgttgacgccatgattaccgcagcactgcgtatgttcatggaactgggaatggtgcagaagtttaagatagactacgagacactctgcaggtggctgctgactgtcagaaaaaattacagaatggttctttaccacaattggcgccacgctttcaacgtctgccagctcatgtttgctatgttaaccacagctggattccaggacatcctgacagaggtggagattttggctgttatcgtcggatgtttgtgccacgacctcgatcatagaggtaccaataatgcctttcaagctaaatctggatcggctctggcacagctgtacggcacctcagctacactggagcaccaccacttcaaccacgctgtaatgatcctccagtccgagggacataatatttttgcaaacctcagttccaaggagtactccgatctaatgcagctcttgaagcagtcaatcctcgctacagaccttacgctgtatttcgaacgacgtacagagttctttgaactggttagcaaaggagagtacgactggaatataaagaaccaccgggatatcttccgctcaatgctgatgaccgcatgcgatttgggtgctgtgacaaagccttgggaaattagcaggcaggtcgccgaactggtcacttcggaattttttgagcagggggatagagaacgcctggagctcaagctgacgccatcagctatctttgataggaacaggaaggacgagctccccaggttacagctggaatggatcgatagcatttgcatgcctttataccaagctctcgttaaggtgaatgtgaagctaaagcccatgctggattcagttgcaacaaatcgctccaaatgggaagaactacatcagaagagactgttggcctcaaccgccagcagctcacctgcatcagtgatggtggctaaagaggataggaactag

SEQ ID NO: 128482 - DNA, 375 bp, synthetic construct
  misc_feature 1..375: note = Description of Artificial Sequence: Synthetic coding sequence
  source 1..375: mol_type = other DNA
atgttgatgacggcatgcgacctgggcgccgtgactaagccatgggagatcagtcggcaggtggctgaactagtcactagcgaattctttgagcaaggagaccgcgaacgactcgaactgaagcttaccccttcggcaatttttgaccgaaaccggaaggacgagttgccccgattgcaactggagtggattgactctatctgcatgccgttataccaggctctcgttaaggtgaatgtcaaattgaagcccatgcttgactccgttgccacaaacagatctaagtgggaggaattgcaccagaagaggctcttggcatccacagcgtcaagctcccccgcctctgttatggttgccaaagaggaccggaattag

SEQ ID NO: 128483 - DNA, 1638 bp, synthetic construct
  misc_feature 1..1638: note = Description of Artificial Sequence: Synthetic coding sequence
  source 1..1638: mol_type = other DNA
atgggaagctcggcaaccgagattgaagaactggaaaatactacattcaagtacctgactggcgaacagacagaaaagatgtggcagagattaaagggaatcctgaggtgtctcgtgaagcagctagaaagaggagatgtcaatgtggtcgacctgaagaaaaatatagagtacgctgcctcagtgctggaggcagtctacatcgacgagactagaaggctcttggacacagaagacgagctgagtgacatccagacggatagcgttccttcagaagtgagggactggcttgcgagtacttttactcgtaagatgggaatgaccaagaaaaagcccgaggaaaaacctaagtttaggtctattgtgcacgccgttcaggccggtatcttcgtcgagcggatgtaccgcaagacatatcacatggtcggtctggcctaccccgcagctgtcatagttaccctcaaggacgtggacaaatggtcattcgatgtcttcgcgctgaatgaggcctccggagagcactctttgaaattcatgatatacgaactgttcacgaggtacgatctcattaaccggtttaagatccccgtgagttgcctgataaccttcgcagaagctctggaggtggggtattccaagtacaagaacccctatcataacctgatccacgcagcagatgtgacccaaactgtgcactacatcatgctgcacacgggcatcatgcattggctcaccgagctggagattctggccatggttttcgcagctgcaattcacgactacgagcacactgggacaaccaacaattttcacatccagaccaggtctgacgtggcaatactgtataatgacaggagtgtgctggagaaccatcacgtgagcgctgcctataggctaatgcaagaagaagaaatgaacattctgataaatttgagcaaggacgattggcgcgacctgcggaacctggttattgaaatggtactgagtacagatatgtcgggccattttcagcagatcaaaaacatcaggaactcactacagcagcccgaaggaatcgacagggctaaaacaatgtccctaatcctgcacgcagccgatatttcccaccccgctaaaagttggaagctgcattacaggtggaccatggcccttatggaagagtttttcctccaaggggacaaagaagcagagctgggcctgcctttcagtccactatgcgatcgtaagagtactatggtggcgcagtcccagattggctttattgattttatcgtcgagcccacctttagtctgctgaccgacagcacggaaaaaattgtgatcccactgattgaggaagcctcaaaggccgaaacctcttcctatgttgcctcaagcagtactacaattgtagggcttcatattgctgatgcacttcggaggtccaacactaagggaagcatgagcgacggttcatactcacccgattacagcctggcagcagtggatctcaagagctttaagaacaatctggtcgacattatacagcagaacaaggaaagatggaaagaattggctgcccagggtgaaagcgatctccataaaaactctgaggatctcgtcaacgccgaggagaagcacgatgaaacacatagttag

SEQ ID NO: 128484 - DNA, 1536 bp, synthetic construct
  misc_feature 1..1536: note = Description of Artificial Sequence: Synthetic coding sequence
  source 1..1536: mol_type = other DNA
atgggcaagaagattaacaaactcttctgttttaactttctcgtgcagtgtttcagaggaaaatccaagcctagcaaatgtcaaattcggaagaaggtcaagaatcatattgagaggttgctcgataccgaggacgaattgagcgacattcagacagactccgtgcccagcgaagtaagggactggttagcgagcacatttactcgaaagatggggatgaccaagaagaagccagaggagaagcccaagtttaggtctatcgttcacgctgtccaagccgggattttcgtagaacgcatgtatagaaaaacttaccacatggtcgggctggcatatccagctgctgtaatagtcaccttgaaggacgtagataagtggtcttttgacgttttcgccctgaacgaggcctccggcgagcattccctgaagtttatgatctacgagctgtttactcgctacgacttgatcaataggttcaagatcccagtctcgtgtctcattacattcgccgaggcgctggaggttgggtactccaagtataagaacccataccacaacctcattcatgctgcagatgtgacacaaacggtccattacattatgttacatacaggtatcatgcattggttaacggagcttgagattctggctatggtcttcgcggctgcaattcacgattacgagcatactgggaccaccaacaactttcacatccagacgcgttctgatgtggccatcctatataatgatagaagcgtattggaaaatcaccacgtctcggcagcctatcgactcatgcaagaggaggaaatgaacatcttgataaacttgagtaaagatgactggagagacctgaggaatcttgtaatcgaaatggttctgagcacggacatgagcggacacttccagcaaatcaaaaatattcgtaactcactgcagcagcccgaaggcattgatcgagctaaaaccatgagcctgatcctgcatgccgccgatattagccaccccgccaaaagctggaaactacactatagatggacgatggctcttatggaggagttctttctgcaaggggacaaggaagctgagctggggcttcctttctcaccactatgtgaccgaaagagcactatggtggcccagagtcagattgggttcatcgacttcatagtggaaccaacattctccctacttactgatagtactgagaaaatcgtgatcccgttaatcgaggaagcttccaaagctgagactagtagctatgtggctagttcatcaaccaccattgtcggcctgcatattgccgatgcgctcaggcggtcaaacactaaaggctcgatgtcagatggatcctattccccagactacagcctcgctgcagtggatttgaagtcttttaaaaataacttggtggatataatccagcagaacaaagagcggtggaaagaactggccgcacagggggagtccgacctccacaaaaacagcgaggacttggtgaacgctgaagagaagcacgacgaaactcacagctag

SEQ ID NO: 128485 - DNA, 1560 bp, synthetic construct
  misc_feature 1..1560: note = Description of Artificial Sequence: Synthetic coding sequence
  source 1..1560: mol_type = other DNA
atggatgatcacgtgactattagaaagaaacatctgcagaggccaatcttccgactccggtgtctggtcaagcagttagagagaggcgacgtgaatgtagtagatctgaaaaagaacattgaatacgctgcttccgtactagaagcagtgtacatcgatgaaaccaggcgcctactggatactgaggacgaattatccgacatccagaccgactcagtaccatctgaggttcgtgactggcttgccagcactttcacccggaagatgggcatgaccaaaaagaaaccagaggagaaacctaagtttagatcgatcgtgcacgctgttcaagccggcatttttgttgaaagaatgtaccgaaagacttaccatatggtcggcctggcatatcccgcagccgttatagtgacactgaaagacgtcgataagtggtcatttgatgtgttcgctctgaacgaggcctcgggtgagcactcattaaaattcatgatttacgagctatttaccaggtacgatctaataaatcgcttcaagatcccagttagttgtctcatcactttcgccgaggcactggaagtagggtattccaaatataaaaacccctatcacaacttaatccatgctgccgatgttactcagaccgttcactatattatgctgcacaccggaatcatgcattggcttacagagcttgagattctggccatggtatttgccgctgctatccatgactatgagcataccggaacgacaaacaactttcatatccagacacgatccgacgtggccatcctatacaatgatcgtagcgtactggagaatcaccatgtgagcgctgcgtaccggctgatgcaagaggaggagatgaacatcctaatcaacctaagcaaggacgattggcgagacctcagaaacctcgtcattgaaatggttctgagtacagacatgtcagggcattttcagcagattaaaaacatccggaacagcttgcagcaacctgaaggtattgatcgggccaagacaatgagtctcatcctgcatgccgccgacatttcccacccggccaaatcctggaaactgcattataggtggaccatggcattgatggaagagttcttcctccagggagacaaagaggccgaactcggtctccctttctccccactgtgcgaccgaaagtccaccatggtagcccagtcacagatcgggtttatcgatttcatcgttgaacccacgttttctctgcttacagatagtacggagaagattgtgatccccctgattgaggaggccagtaaggccgagacatccagctacgtagcaagttcttctactaccatcgtaggcttacacattgccgatgccctaaggcgtagtaacactaagggctctatgtcggatggcagctactcccctgactatagcttggcggccgtggatctgaagagctttaaaaacaatctcgtggatatcattcagcagaacaaagagcgctggaaagaactggctgcacaggaggccagaaccagcagccagaaatgcgagtttattcaccagtag

SEQ ID NO: 128486 - DNA, 1608 bp, synthetic construct
  misc_feature 1..1608: note = Description of Artificial Sequence: Synthetic coding sequence
  source 1..1608: mol_type = other DNA
atgggctcgagcgcgacagaaatagaagaactcgagaataccacgttcaagtatttaaccggtgagcagactgaaaagatgtggcagagattgaaaggcatcctgcgctgcctggtgaagcagctagagcgcggcgatgtgaacgtggtggacttgaaaaaaaatatcgaatatgcggcttcggtcctggaggctgtatatatcgatgaaacccgcagactcttagataccgaggacgaactgagtgacatccagacagactctgtgccatcagaagtccgcgactggttggctagcacattcaccaggaagatgggcatgaccaagaagaaacctgaggaaaagcccaaatttcgaagcatcgttcatgctgtccaagctggcatctttgtggaacgcatgtaccgcaaaacttaccacatggtcggccttgcttaccccgctgcagtgatcgtaaccctgaaagatgtggataagtggtcatttgatgtctttgcactgaacgaggcttccggcgagcactccttaaaattcatgatttatgaactgttcacccgctacgatttgatcaaccggttcaagattccggtcagctgtcttatcacctttgcagaggctttggaagtgggctatagcaagtacaagaacccctaccataacctcatccatgccgctgacgtcactcagacggtccactacatcatgctgcacactggtatcatgcactggctgaccgagctcgagatcctggctatggtgttcgcagccgcgattcacgactatgagcataccggcacaactaataacttccatattcagaccagatccgatgtggcaatcctctataatgaccgcagtgtactcgagaaccaccatgtatcggccgcatatcggctgatgcaggaagaggaaatgaatattcttatcaatctgagcaaggacgattggagagacctccgcaaccttgtgatcgagatggttttgagtactgatatgtctggacatttccagcagattaagaatatccgaaatagcctgcagcagccggagggtattgatcgcgcaaaaacgatgtctctgatactgcacgctgcagacatctctcacccagcaaagagctggaaactacattacaggtggactatggcccttatggaggagttttttctccagggcgacaaagaggccgaactgggccttcctttctcgccgctgtgtgatcgtaagagcactatggtggcacagtcacagattgggttcattgatttcatcgtggaaccaacgttttctcttctgaccgatagcactgaaaagatcgtcattccattaattgaggaggcatcaaaagcagagacgagttcgtatgtggcgtcaagttccactactatcgtggggctgcatatcgcagatgccctgcgccggtccaatactaaggggtccatgtctgacggctcctattctcccgactattctcttgccgccgttgatctgaagagttttaagaataatctggtggacatcattcaacaaaacaaggagcgatggaaggaactggccgcccaagaagcgcgtacaagctctcagaagtgcgaattcatccaccaatag

SEQ ID NO: 128487 - DNA, 1590 bp, synthetic construct
  misc_feature 1..1590: note = Description of Artificial Sequence: Synthetic coding sequence
  source 1..1590: mol_type = other DNA
atggatgaccatgtgacaatcagaaagaagcatttacagcgacctatttttcgcctgcgctgccttgtgaaacaattagagcgtggagatgttaacgtggtcgatctcaagaaaaacatcgagtacgctgccagcgtgctggaggccgtgtatatagacgaaacaaggaggctcctggacaccgaggacgaattgtcggatattcagacggattcggtcccttcagaggtgagggactggttggcctcaacttttacgagaaagatgggcatgaccaagaagaagcctgaagagaaacccaagtttcggtccatcgttcatgccgtgcaggctggcatctttgttgaacgtatgtacagaaaaacatatcatatggtggggctggcttacccggcagcagtcattgtcactctcaaggatgtggacaaatggagctttgacgtgttcgctctgaatgaggcgagtggcgaacattcgctgaagttcatgatttacgaactgttcacgcgatatgacttgatcaatcgatttaaaattccagtgtcatgtctgataacctttgccgaggccctggaggtggggtattctaagtacaaaaatccatatcataacctcatacacgccgctgatgtcacccagacagtgcattacattatgctgcatacggggataatgcattggctcactgagctcgagattttggccatggtttttgccgcagctatccacgactacgaacacacggggacgaccaataactttcacatccaaaccaggagtgacgtggccattctgtataatgacaggtccgttctggaaaaccaccatgtatcagccgcgtatcgactcatgcaagaagaggagatgaatattctgatcaatctgtccaaggacgattggcgagatctcaggaacctggtaatagagatggtcctcagcacagacatgagtggccacttccaacagatcaagaacattcggaacagcctacaacagcccgaggggatcgatcgcgccaaaacaatgtcactgatcctgcacgccgctgatataagtcatcctgctaagtcctggaaactccactaccggtggacaatggccctgatggaggagttctttctccagggggataaggaggcagagctcggactgcccttcagccccctgtgtgacaggaagagtactatggtagcccagtcccaaatcgggttcatcgacttcattgttgaaccaacgttcagtctgttgaccgacagcacagagaagattgtcatacctctcatcgaggaagctagcaaagctgaaacttcctcctacgtcgcttccagttcaaccacaattgttggactgcacatcgctgatgcattgagaagatccaacacaaagggaagtatgtctgacggttcatactcaccagattatagcctcgcagcagtggacctaaagagcttcaaaaataaccttgtcgacataatccagcagaataaagagcgatggaaggagctcgccgctcaaggagagtcggatctgcacaagaattccgaggacttggttaacgccgaggagaaacatgatgagacacacagctag

SEQ ID NO: 128488 - DNA, 1608 bp, synthetic construct
  misc_feature 1..1608: note = Description of Artificial Sequence: Synthetic coding sequence
  source 1..1608: mol_type = other DNA
atggggtcttccgctaccgagatagaggagctggagaacaccacatttaaatacctgactggggagcaaaccgagaagatgtggcagaggctgaagggaatcttacgatgtctggtgaagcagctcgagcgtggggacgtcaatgtagtcgatctgaaaaagaacatcgagtacgccgctagcgtgctagaagccgtatacatcgacgagacaaggcgactgctggacaccgaagatgagctcagtgatattcagaccgattctgttccaagcgaggtcagagactggctggcctccaccttcacccgtaagatgggcatgaccaagaaaaagccagaggagaagcctaagtttcgaagtattgtccacgctgttcaggctggcatctttgtggagagaatgtatcgtaaaacttaccacatggtaggtctggcttaccccgcggccgttattgtgactctcaaagacgtggacaagtggagttttgatgtcttcgccctcaacgaggctagcggtgaacattcactaaagtttatgatttacgagctattcacaaggtacgacctgataaatagattcaagataccggtttcttgcctgattaccttcgccgaagccctggaggtaggctactctaaatacaaaaatccataccacaacttaatacacgctgccgacgtcactcagacggtacactacataatgctccacactggcatcatgcattggctgacagaattggaaatcctggctatggttttcgcagctgcgatccacgattacgagcacacagggactaccaacaactttcacatacagacgcgttccgatgtggcaatactctacaacgaccgatcagtcctggaaaaccaccacgtatccgcagcgtacagactcatgcaggaagaggagatgaacatcctaatcaatctgagcaaggacgattggcgggacctgcggaaccttgtgatcgagatggtgcttagtaccgatatgtctggccactttcagcagatcaaaaacataagaaattcactgcaacagccagaaggcatcgaccgggctaagaccatgtccctcattttacacgctgcagatatctcccatccggcaaagtcttggaaactacactatcgctggaccatggcactgatggaagaatttttcttacagggcgataaagaagcagaattgggattgcctttcagtcccctgtgtgacaggaagtcaacaatggtggcccaatcgcagattggttttatagacttcattgtagagccaacattctccctgctcaccgattctactgagaagatcgtgataccactcatcgaagaggccagcaaagcggagacaagttcctatgtcgcttcaagcagcactactattgtgggtcttcacatcgctgatgctctccggcgctcgaacacaaaaggctcaatgagcgatgggtcttatagcccagactattctctagctgccgtggacctgaaatccttcaagaataacctcgtggatatcattcaacagaacaaagagcgctggaaagagcttgcggcacaggaagctcggacttcatcacagaagtgtgagttcattcatcagtag

SEQ ID NO: 128489 - DNA, 1638 bp, synthetic construct
  misc_feature 1..1638: note = Description of Artificial Sequence: Synthetic coding sequence
  source 1..1638: mol_type = other DNA
atggggagcagtgcgaccgaaattgaagagctggaaaacaccactttcaagtatctaacaggcgaacagaccgagaagatgtggcaacggctgaaaggaattcttcgctgcctggtcaaacagctcgagcgcggagacgtgaatgtcgtggacctgaagaagaacatcgagtacgctgcctcagtccttgaggctgtctatatcgatgaaactagaagacttctggacaccgaagatgaactaagcgacatccagaccgactccgtaccatctgaggtgagagactggttagcctctacttttacgcggaaaatgggtatgacaaaaaagaaacctgaagaaaagccaaagttcagaagcattgtgcacgccgtgcaggccggcatctttgtggaacgcatgtaccggaagacataccacatggtagggttagcgtaccctgcagccgtcatcgtgaccctcaaggacgtggacaagtggtcctttgatgtgttcgcactcaacgaagcttccggtgagcactccctgaagttcatgatttacgaactgttcacccgttacgatctaattaataggttcaagatccccgtttcctgtctaataacattcgccgaagcactcgaagtcggctatagcaagtataagaacccgtaccacaaccttatacacgcggccgatgtgacccagacagttcactacattatgctccacaccggtatcatgcactggttgaccgagctcgaaatactggccatggtctttgccgccgcaatccacgattatgaacatactggaaccaccaacaactttcacatccaaactagatctgatgtcgccatcctatacaacgatcgctcagtcctggagaaccatcatgtgagtgccgcatacagactgatgcaggaggaagaaatgaatattctcataaacttgtctaaggatgattggagggacctacggaacctggtgatcgaaatggtgctgtccactgatatgagcggtcatttccaacagatcaagaatattcgcaattcactccagcagcccgagggcatagaccgtgccaaaacaatgtcactgatcctgcatgctgccgacatctcccatccagcgaagtcttggaaactgcactaccgatggaccatggctttaatggaagagttttttctccagggtgacaaggaggccgaactcggcctccccttttcacctctctgcgatcgaaaatcaaccatggtagctcagagccagatcggctttattgacttcatcgtggaacctacgttctctctgctcacagatagcacggaaaaaattgtgatcccgcttatagaggaagccagcaaagccgaaacttcctcttacgtggcctccagctctactactattgtggggcttcatatagccgacgcactgcgtcgttccaatacaaagggatctatgtccgacgggtcttacagcccagactacagtcttgccgctgttgacctcaaaagttttaagaacaatctggtggatattattcagcagaataaggagcgatggaaagagttagctgcccaaggcgagagcgatttgcataagaattccgaagatctagtgaacgctgaagaaaaacatgatgaaactcattcctag

SEQ ID NO: 128490 - DNA, 1659 bp, synthetic construct
  misc_feature 1..1659: note = Description of Artificial Sequence: Synthetic coding sequence
  source 1..1659: mol_type = other DNA
atgggatcctccgcaactgaaatcgaagagcttgagaatacaactttcaagtacctgactggggagcagacagaaaagatgtggcagcgactcaaaggcatcctgaggtgtctcgtgaaacagcttgaaaggggggacgtgaacgtggtggatctaaaaaagaacatagagtatgccgcctcggttcttgaggcagtgtatatcgacgaaactagaagacttctagataccgaagacgaactttccgacatccaaacagacagtgtgccatcagaggtccgagactggctcgcctcaacctttacacgcaagatgggcatgaccaaaaaaaagccggaggagaaacccaaattcaggagtattgtgcatgctgttcaagctggtattttcgtggaaagaatgtatcgcaagacatatcacatggtgggcctggcttatcctgccgccgtgattgtcaccctgaaagacgtggataaatggagtttcgatgtatttgcactgaatgaagcttccggggagcatagcctcaagttcatgatttacgaactgttcaccagatatgacctgatcaaccgcttcaagatacctgtcagctgtctgatcacctttgctgaagctttagaagttgggtactctaagtataaaaacccctatcataatctgatccacgctgccgacgtgactcagaccgttcattacatcatgttgcacactggcatcatgcactggcttacagagttggaaatcctggccatggtcttcgctgccgctatccatgactacgagcacacaggaacaactaacaattttcatatccagacacgaagtgacgtcgctatcctatacaacgacaggtctgttttggagaatcatcacgtgagtgccgcctataggcttatgcaggaagaagagatgaacattctgattaacttgtcaaaggatgactggagggaccttagaaacctggtgattgagatggtcctgagcacggatatgagcggacattttcagcagatcaagaatatccgcaactcattgcaacaacctgagggaatcgaccgggctaaaaccatgtctctgattctgcacgcggccgatatttctcatccggctaagagttggaagctccattataggtggactatggcgctgatggaggagtttttccttcagggcgataaggaagccgaactaggactaccattttccccattgtgtgaccgcaaaagcactatggtagcccagagtcagataggcttcatcgattttatagtggagccaactttttctctgctgactgattcaacagaaaaaatagttatccccttgatagaggaggcatcaaaggctgaaactagcagctatgtcgcctcttcatctaccactattgttggacttcacatcgcagacgccctacgccgcagcaacactaaagggagcatgtcggatggaagctactctcctgactatagtctggccgctgtcgacctgaaaagctttaagaataatctagttgacatcattcagcagaacaaggaacgctggaaagagttagctgcccagggtagcgtggtctatgaagccttactcccttcattgagtgtatttacttcgccgcttcgagtgtggatcacctcatcccggttccttctgctctag

SEQ ID NO: 128491 - DNA, 1326 bp, synthetic construct
  misc_feature 1..1326: note = Description of Artificial Sequence: Synthetic coding sequence
  source 1..1326: mol_type = other DNA
atgggaatgaccaagaagaaacctgaagaaaagccgaagtttcgtagcatcgtacacgctgtgcaggcaggaatctttgtggaaagaatgtaccgtaagacctaccacatggttggcctggcgtacccagccgctgtcatcgtgacgctgaaagacgttgataagtggtcattcgacgtgttcgcattaaatgaagcgtccggggaacactccctcaaatttatgatatatgaattgttcacccggtacgacttaataaatcgctttaagatacccgtcagctgcctcataactttcgctgaggcattggaggtgggctatagtaagtacaagaatccctatcacaatttgatccatgctgcagacgtgacgcagaccgtgcactacattatgctccacacagggatcatgcactggctgacagagctggaaatactagctatggttttcgccgccgcgattcacgactacgagcatacgggcaccacaaataacttccacatccagactagatcagatgtggccatattgtacaacgataggtctgtgctggaaaatcatcatgttagcgcagcataccgcctgatgcaggaggaggagatgaatatcctgatcaatctgtctaaggacgattggcgggatctgaggaatctcgttatcgagatggtgctgtcaaccgatatgagcgggcattttcaacaaatcaaaaacatcagaaactccctgcagcagccagagggaattgatcgtgctaaaacaatgagcctgattttgcacgccgcggatatctcccacccagccaagagctggaaactccattaccgatggacaatggctctcatggaggaattttttctgcaaggagataaggaagcagagctgggactgcctttcagtcctctgtgtgatcgtaaaagcacgatggtggctcagtctcagatcggctttatagattttatcgtggaaccaaccttctccctgcttacagactctactgagaaaatcgtgatcccactgattgaggaggcctccaaggccgaaacgagtagctatgtggcgtcctcctcaacaaccatcgtagggctgcacatagccgacgccttgcgccgaagcaatacgaaaggctcaatgtccgatgggtcctactcacctgattattctctggcagccgtcgacctgaagtcattcaagaacaacctcgtcgatataatccaacagaacaaagagaggtggaaagagctggctgcacagggtgagtcagatttgcacaagaactcggaggacctagtcaacgctgaagaaaagcacgacgaaacccatagctag

SEQ ID NO: 128492 - DNA, 1611 bp, synthetic construct
  misc_feature 1..1611: note = Description of Artificial Sequence: Synthetic coding sequence
  source 1..1611: mol_type = other DNA
atggaactcagtccgcggagccccccagagatgttagaagaaagtgactgccccagtcctctagagctgaagtcggcgccctctaagaaaatgtggatcaaactgagatcccttctgcgctatatggtgaagcagctggaaaacggcgaaattaacatcgaggagctgaaaaagaacctcgagtacaccgcctcacttctcgaagcagtgtacattgacgaaacgcgacaaattctggatactgaggatgagttacaggaacttaggtcagatgctgtgccaagcgaggtgcgtgattggctcgcttctaccttcactcagcaggcccgggcaaagggacggcgggcagaggagaagcctaaatttcggagcattgtgcacgcagtacaagcaggcattttcgtagagcgcatgttcaggcggacctacacttctgtgggcccaacctactctactgccgtgcttaactgcctcaagaatctggatctctggtgttttgacgtcttctccctgaatcaggctgcggacgaccatgctctcaggaccatagtgtttgaactgctcactcggcataatctaatctctcggtttaaaatccctactgtcttcttgatgtcttttttggacgccctggagaccggctatggcaagtataaaaatccgtaccacaaccaaatccatgccgcagatgtgactcagaccgtgcactgctttttgttgcgaaccggaatggtgcattgcctgtcagagatagaactgctggctatcattttcgcggctgcaatacacgattacgagcatactggcacaaccaattctttccacattcagacaaaatcagagtgcgccatcgtgtacaacgataggagtgttcttgagaaccaccacatttcctctgtgttccgattgatgcaagatgacgagatgaacatctttataaatctcacaaaagatgagttcgtggaactcagagcacttgtgatcgagatggtactagcgacagatatgtcttgtcatttccagcaggtgaaaaccatgaagactgccctgcagcagctggagaggattgataagcccaaggcactgagcctgctgctccatgccgcggatatcagccatcctaccaagcagtggttggtccatagtaggtggaccaaggccctgatggaagagttcttccgacagggggacaaagaagccgagctgggcctgccattcagcccgctctgtgaccggacctccaccctggtggcccagagccagatcggctttatcgattttatcgtcgaaccaaccttctcagtgttgacagacgtggctgaaaagtccgttcagcccctcgctgatgaagacagtaaatccaagaatcagccgtcattccaatggagacagccgtcgctggacgtcgaagtcggagacccgaacccagacgtcgtgtcattccgtagtacttgggtcaagcggatccaagagaataaacaaaagtggaaagagagagccgcctccggcatcacaaatcagatgagtattgatgagctgtcaccttgcgaggaagaagcccctccttcacccgcggaggacgagcataatcaaaatggaaacttagactag

SEQ ID NO: 128493 - DNA, 1488 bp, synthetic construct
  misc_feature 1..1488: note = Description of Artificial Sequence: Synthetic coding sequence
  source 1..1488: mol_type = other DNA
atggtgaagcagctagaaaacggcgaaattaacattgaggagctgaagaaaaacctggaatataccgcctccctgttagaagcagtgtacattgatgaaaccaggcaaatcctggatacggaagatgaactccaggagcttcggagcgacgctgtcccgtccgaggtccgtgactggctcgcatctacctttacccagcaagctcgagcgaagggaagaagagccgaggaaaaacctaagtttcggagcatagtgcacgcagtgcaagccggaattttcgtggaacgtatgttcagacgcacctatacatctgtcggacccacctattctacagcggtgttgaattgcctgaagaatctcgatctttggtgctttgacgttttcagcctgaatcaggccgctgacgaccatgcactgcgcaccatcgtgttcgagttgctcacccgccataacctgatatcaaggtttaaaataccaacagtttttttgatgtcctttctagacgcgctggagacagggtacggaaaatacaagaatccctaccataatcaaatccatgctgcagacgtgacacagactgtccactgcttccttctgcgcactgggatggttcattgtctcagcgagattgaactcctggcaatcatcttcgctgccgccattcacgactacgaacatacgggtaccaccaacagctttcatattcagaccaagtctgagtgcgccattgtgtacaatgacagatccgtccttgaaaatcatcacatttcaagcgtgttcagattgatgcaggacgatgagatgaacatatttattaatctgacaaaagatgagtttgtcgagctgcgcgcactggtgatagagatggtgttagcaactgatatgtcctgccatttccagcaggtgaagacaatgaaaaccgcactccaacagcttgaaagaatcgataaacccaaagccctctcactgctgctccacgccgcagatatctcccacccgactaagcagtggctggtgcattcgcggtggaccaaagcacttatggaggagttctttaggcaaggcgacaaggaggcggaactgggactccctttttctccgctctgcgatcgtacaagcactctcgtcgctcagtcccagattggattcatagacttcatcgtggagcctacgttctcagtactcacagacgttgctgaaaaaagtgtgcaaccacttgcagacgaagattccaagtcaaaaaaccagccgagcttccaatggcggcaaccctccctggatgtagaagtgggtgatccaaacccggacgtggtaagctttagatctacatgggtcaagagaatccaagagaacaagcagaagtggaaagagagagctgcctctggaatcacgaatcagatgtccatcgacgagctgagtccttgcgaagaggaagctcctcccagccccgccgaagacgagcacaatcaaaatggcaatctcgactag

SEQ ID NO: 128494 - DNA, 1551 bp, synthetic construct
  misc_feature 1..1551: note = Description of Artificial Sequence: Synthetic coding sequence
  source 1..1551: mol_type = other DNA
atggctaatcccgtgccagtgcaaaggagccacctgcagggccccattttacgcctgagatacatggtgaagcaactagagaacggggagattaatatagaggagcttaagaaaaacctggaatatacagcttctctgctggaggccgtatacatcgacgaaaccagacagatcctcgacaccgaggacgagctgcaggaacttcgctctgatgctgttccatctgaggtccgcgactggctggcgagtactttcacacagcaggcacgcgcaaaagggagaagggccgaagagaaacctaagttccggtcaatcgtgcacgccgtgcaagcagggatcttcgttgaaagaatgtttaggcgcacctatacaagcgtaggacccacctactctacagcagtgttgaattgtcttaagaacttggacctttggtgctttgatgtcttctccctgaatcaggccgcggacgaccacgctctaagaaccatcgtgttcgagctcctgactagacataatctcatctcacgcttcaagatccctaccgtattcctgatgagttttcttgacgccctggagaccggctacgggaagtacaagaatccttaccataatcagatccacgcagccgacgtgacacagactgtccactgctttcttcttcggaccggcatggtccactgtctcagcgaaattgaactgttggcgatcatctttgctgctgccatacacgattacgaacacaccggaaccacgaattcttttcatatacagaccaagtctgagtgtgcgatcgtgtataatgatcgtagtgtcctggaaaatcatcatatctcctctgttttccgcctaatgcaagacgatgaaatgaacatttttattaatctgacaaaagacgaattcgtggagcttagggccttggtgatcgaaatggtccttgctactgatatgtcttgccattttcagcaggtgaagaccatgaagaccgcgctccagcagcttgagcgcattgacaaaccaaaagccctcagcctgttactgcacgccgccgacatctcacaccccaccaagcaatggctagttcattcacgatggaccaaggccctcatggaagagttctttcgccagggggacaaggaggcggaactcgggctgcccttctctcctctatgtgacaggaccagcacactggtggcacaaagtcaaataggttttattgactttatcgttgaaccgactttctcagtgctgaccgatgtggctgaaaagagcgtgcagccccttgcagacgaggatagcaagagcaaaaaccaaccgagtttccaatggagacagccttccctggatgttgaagttggagaccctaaccccgatgtggtatcattcagaagcacatgggtcaaaagaatccaggaaaacaagcaaaaatggaaggaacgagctgcttccggcatcacaaatcagatgtctatcgacgaactctctccctgcgaggaggaggctcctccttccccagcggaggacgaacacaatcaaaacggtaatctcgactag

SEQ ID NO: 128495 - DNA, 2310 bp, synthetic construct
  misc_feature 1..2310: note = Description of Artificial Sequence: Synthetic coding sequence
  source 1..2310: mol_type = other DNA
atgacagatgctggtaatcgaaaggaaggatttaaaaagtgccgcagcgccactttctctatcgacgggtacagcttcaccatagtcgcgaacgaggccggtgacaagaacgcccggcctcttgcccggtttagtcgatcaaaaagtcagaactgcctgtggaactccctgatcgatgggctgacggggaacgtcaaggaaaagcctagaccgactattgtgcatgacccacggcccccggaagagatactggctgatgaattgccgcagctagacagttctgaggtgctggtgaagaccagctttagactgcgcagcctggtgaaacaactggaacgtggtgaagcaagtgtcgttgacctgaagaaaaatctggagtacgccgctaccgtcctcgaaagtgtgtacatagacgagactcgccgtctgctcgatactgaggacgagctcagcgatatccaaagtgacgctgtgcccagcgaggtcagggactggctggcatccaccttcacccgccagatggggatgatgcttcgccgctcagatgagaaaccacgtttcaagagcatcgtacacgccgttcaggcgggcattttcgtcgaaaggatgtatcgccggaccagtaatatggtcggcctttcatacccaccagctgtgattgaggctctgaaggacgtagataaatggtccttcgatgtgttttcgctaaatgaagcctccggcgatcatgccctcaagtttatcttctatgaattgctgaccagatacgatttaatctcgcggtttaaaatccccattagcgcccttgtatcttttgtcgaagccctggaagtgggttactctaaacataaaaatccataccacaatctgatgcacgccgctgacgtgacacagaccgtgcattatttgctgtacaaaacaggcgtggctaactggctaactgagctggaaatctttgcaatcatcttctctgcagctatacacgattacgaacacactgggaccactaataatttccacatccagaccagatctgacccggctattttgtacaacgatcgatctgtgctggaaaatcaccatctgagtgccgcttataggctgctacaggacgatgaggagatgaatattctcatcaatctttctaaggatgattggagagagtttaggacgctggtgatcgaaatggtgatggccaccgatatgtcctgccactttcagcaaattaaggctatgaaaaccgctctgcagcagccagaggctattgaaaaacccaaggcattgagcctgatgttgcatacagctgacatttcccaccctgccaaggcttgggatcttcaccatcgatggacaatgtcccttctggaagaattcttccggcagggcgaccgggaagctgaattgggtctgccattctcacctctgtgtgaccgaaaaagtactatggttgcccagtcccaggtgggcttcattgattttattgtggagcctaccttcaccgtgttgaccgacatgactgagaaaattgtcagtcccctgattgacgaaacgagccagaccggcgggacaggccaaaggaggagctcacttaacagtatctcctcctccgatgccaagcgcagcggcgtgaagacatcaggttctgaaggttctgcccccatcaataactccgtcatcagtgtcgattataagagctttaaggccacctggaccgaagttgtacacataaatagagaacgctggcgtgctaaggtccccaaggaggaaaaggctaagaaggaagccgaagaaaaggcccgactcgctgcagaggagcagcagaaagaaatggaagcgaagtcccaggccgaggaaggagctagcggtaaggctgagaagaagactagcggcgaaacaaagaaccaagtcaatgggacgcgcgccaataagtcggacaatccacgcggaaaaaactctaaggctgaaaaatcatcaggcgaacagcagcagaacggggactttaaggacggtaaaaataagaccgacaagaaggatcactccaacatcggtaacgacagtaagaagaccgatggaacaaaacagcgatcacacggcagcccagctcccagcacatcaagtacatgtcggctgaccctgccagtgatcaagcctccactgcggcatttcaaaaggcctgcatatgcgtcttcttcttatgcccccagtgtgtccaagaagacagatgaacaccctgcgaggtacaagatgctggatcaacggatcaaaatgaaaaaaattcaaaacatctctcataattggaatcgtaaatag

SEQ ID NO: 128496 - DNA, 2130 bp, synthetic construct
  misc_feature 1..2130: note = Description of Artificial Sequence: Synthetic coding sequence
  source 1..2130: mol_type = other DNA
atggaatcgcccaccaaggaaatcgaggagtttgaaagcaactcactcaagtacttgcagcccgagcagatagagaagatttggcttaggctgagagggctgaggaaatataaaaaaactagccaacggctccggtcactggttaaacagctcgaaaggggcgaggcttcagtggtggacctgaagaagaatctggaatacgccgcaacagttctggagagtgtgtacatcgatgagacccgacggctgctggataccgaggatgagttgtcagacatccagagcgacgcggtcccaagtgaagtgcgagactggcttgcctcgacctttaccagacaaatggggatgatgttacgcagatcagatgaaaagccccgtttcaagtctatcgtgcatgccgtccaggctggcatattcgtggagagaatgtatcgcagaaccagcaatatggtggggctttcctatcctcccgccgtgatcgaggccctgaaagacgttgacaaatggtcttttgatgtattctcactaaacgaggcaagcggtgaccatgccctgaaatttatattctatgaacttcttactcgatacgatctgatcagccgcttcaaaattcctatttctgcacttgtctcgtttgtggaggctctggaagtgggctatagtaaacacaagaatccctaccacaaccttatgcacgcggccgacgttacccagacagttcattacttactgtacaagaccggcgtggccaactggcttactgagcttgagatctttgccattatcttttcagctgctatccacgactatgagcataccggaacaactaataattttcacatacagacacggtcggaccctgccatcctttacaacgaccggagtgtgctggagaaccaccacctgtcggcagcgtaccgcttactgcaggatgatgaggaaatgaacatcctgatcaacctttccaaggacgactggagagagtttaggactctggtgattgaaatggttatggccaccgatatgtcttgtcactttcaacagatcaaggcaatgaaaactgctctccagcagccggaagccatcgagaagccaaaagccctgagcctcatgttgcatacagccgacatctcccaccccgctaaggcttgggatctccaccatcggtggaccatgagtctgttggaggagttctttcggcagggtgacagagaggccgagctgggacttcctttttctcctctgtgcgatcgtaagagcaccatggtggctcagagtcaagtgggtttcatagattttattgtcgaacccacctttactgtgctgactgatatgacggagaagatcgtttcccctttgatcgacgaaactagccagacaggagggacaggccagagacgatcgtctcttaattctatctcttcgagcgatgcgaaaagatcaggagtgaagacgtccggatccgagggtagcgccccaattaacaactccgtaattagtgtagattataaatcattcaaggccacctggacagaagttgtgcatatcaacagggaaagatggagggccaaggtgcccaaagaagagaaagccaaaaaggaggcagaggagaaagccagactggctgcagaagagcaacagaaggaaatggaagcaaaatcccaggctgaggagggagcttccggcaaagctgaaaagaagaccagcggtgagaccaaaaaccaggtgaacgggacgagagctaataagagcgacaaccccaggggaaaaaacagtaaggcggaaaagagctccggagagcagcagcagaatggcgattttaaagacggcaaaaataagacggacaaaaaggaccactctaatatcggtaatgactctaagaagactgatggcaccaaacagagaagccatgggtcccccgctcccagcacttcttctacttgccgtcttacattaccagtcatcaagccgccactcagacatttcaagcgacccgcctatgcctctagcagttacgcaccctcagtgtctaagaagaccgacgagcatcccgcacggtacaagatgctcgatcagaggatcaaaatgaaaaaaatccaaaatatcagccacaactggaaccggaagtag

SEQ ID NO: 128497 - DNA, 1905 bp, synthetic construct
  misc_feature 1..1905: note = Description of Artificial Sequence: Synthetic coding sequence
  source 1..1905: mol_type = other DNA
atggaatctcccacgaaggaaattgaggaatttgaatccaactccctcaagtacctgcaacccgaacaaattgaaaagatatggctgagacttagggggctgcgcaagtacaagaagacatcccagaggctgcgcagtttggtgaagcagctggaaaggggtgaggcctctgttgtggacttaaaaaagaacctggagtacgcggccactgtccttgagtccgtatacatcgatgagacaaggagacttcttgataccgaagatgaattaagtgacatccagtctgatgccgtcccatccgaagtcagggactggctggcgagtaccttcactcgacagatggggatgatgttacgtagatccgatgaaaagccccgcttcaaaagcattgtgcatgcggtgcaggctgggatttttgttgagcgcatgtatcggagaacaagcaatatggttggtctttcctatccaccggccgtaattgaggctctaaaagatgtggacaaatggtccttcgatgtcttttccctgaacgaggctagcggcgatcacgccttaaagttcatcttttatgaactgctgacaaggtacgacctcattagcagattcaaaatcccgatttcagccctcgtgtcgtttgtggaagccctcgaggttggctatagcaaacacaagaatccataccacaaccttatgcatgcagccgatgtcacacagacggtgcattacctgctgtacaagacaggcgtcgcaaactggctgacagagctggaaatatttgctatcatattctccgcggcgattcatgattacgaacacacggggactacaaataatttccatatacaaacccggtctgaccccgctatcctgtataacgatcgctcggtgctggagaaccaccacctgtccgccgcatacaggctactacaggacgatgaggaaatgaacatcctgatcaacctcagtaaagacgactggagagagtttagaacactcgtaatcgaaatggtgatggcaacagacatgtcctgccactttcagcagattaaagccatgaaaactgcgcttcagcagccggaggcaatcgaaaaacccaaagcactgtcgctcatgctgcacacagctgacatctcccaccccgcaaaggcctgggatctccaccaccgctggactatgagcttgttagaggaatttttccggcagggagacagggaggccgagctggggctgcctttttcaccgctgtgcgataggaagagcactatggtggcccagtctcaagtcgggttcatcgactttattgttgaacccacctttaccgttctgacagatatgacggaaaagattgtatcaccactcatagatgagacatcgcagactggcggcacaggacagcgaaggtcttcgcttaattcaatctccagcagtgatgccaaacgaagtggagtcaaaacctctggttcagagggttctgcccctattaataattccgtcatatctgtggactacaagagcttcaaggcaacatggacagaggtggtccacataaatagagaacggtggcgggcgaaggttcctaaagaagaaaaggcaaagaaggaggccgaggagaaggcccgactcgccgccgaagaacagcagaaggaaatggaggctaaatcacaggcggaggaaggtgccagtggaaaagcagaaaaaaagacctcaggggagacgaaaaaccaggtgaatggaactagagccaacaagtccgacaaccccagaggaaagaattcgaaagcagagaagtctagtggcgagcaacagcagaatggcgatttcaaggacggaaaaaacaagaccgacaaaaaggaccacagtaatatcgggaacgattctaaaaaaacagatgactcacaggaatag

SEQ ID NO: 128498 - DNA, 1905 bp, synthetic construct
  misc_feature 1..1905: note = Description of Artificial Sequence: Synthetic coding sequence
  source 1..1905: mol_type = other DNA
atggagtccccaacaaaagagatagaggaatttgagtctaactctctgaagtatctccaaccggagcagatcgagaagatctggctcaggctgcgtggtctcagaaaatacaaaaaaaccagccagcgactgagatctctggtcaaacagcttgagcgcggagaagcgtccgtggtggacctgaaaaagaaccttgagtatgcggcaaccgtgctcgagagcgtgtatatcgatgagacacggcgtttactggacactgaggatgagttgtccgacatccagagcgatgccgtgccttctgaggtccgcgattggctcgccagtacattcacacgacagatgggcatgatgcttcgtagatcagatgagaaacctcggtttaagtcgattgtacacgctgtgcaggcaggcatttttgtcgaacgaatgtatagaaggaccagcaatatggtcggcctgtcttaccccccagcagtgattgaggcgcttaaggatgtggataaatggtctttcgatgtcttttcacttaatgaggcttccggggaccatgccctgaaattcattttctatgaattgcttacccggtatgaccttatttcacggtttaaaataccgatttccgccctggtcagttttgttgaggcccttgaggtcgggtattccaaacataaaaacccttaccacaacctaatgcatgccgcagatgtgacccaaaccgtgcactatttactgtataagaccggcgttgccaactggttgaccgaactagagatctttgcgataatctttagcgccgctatccatgactatgagcatactgggacgactaataacttccacattcagactcggagtgacccagccatcttgtacaacgatcggtccgtgctcgagaatcaccacctgagcgctgcatatagattactgcaggatgacgaggaaatgaacatactcatcaacctatcaaaggatgattggagggaattcaggaccctggtgatcgagatggtgatggccacagatatgtcgtgtcacttccaacaaatcaaagcgatgaaaaccgccctgcagcagcccgaagctatagagaagccgaaagctttgtccctcatgctgcacaccgccgatatctctcatcctgcaaaggcatgggacctgcaccaccgttggaccatgtcgctcctagaggaattcttcaggcagggggaccgggaggcagagttggggctgcctttctccccgctttgtgaccggaaatcaactatggtggcccagagtcaggttggctttatcgacttcattgtagagcccacatttacagtactgaccgacatgaccgaaaagattgtcagccctctgatcgatgagacttcccagaccggtggcacaggccagcggagatcctcgctgaactctattagtagctcagatgccaagcggtcaggggtcaagacgtccggaagtgaaggaagcgcccccataaacaactctgttatatctgtggattataagtcttttaaagctacgtggaccgaagtggtgcatatcaatcgtgagagatggagggctaaagttcccaaggaggagaaagcaaagaaagaggccgaggaaaaggcccgcctggctgccgaagaacaacagaaggagatggaggctaaaagtcaagccgaggagggtgcctccggcaaagcagaaaagaaaactagtggggaaacgaagaaccaggtgaatggaacccgcgccaacaaaagcgataaccctaggggtaaaaacagcaaggcagagaagtctagtggggaacaacagcagaacggagattttaaggacggaaagaataaaactgacaaaaaagatcattcaaacattggcaacgactccaagaagaccgacgatagtcaagagtag

SEQ ID NO: 128499 - DNA, 141 bp, synthetic construct
  misc_feature 1..141: note = Description of Artificial Sequence: Synthetic coding sequence
  source 1..141: mol_type = other DNA
atggaatcccctacaaaagagatagaggagttcgagtcaaattcgctcaaatacctgcagccagagcagatcgaaaagatctggctgcgtctcagaggactgagaaagtataaaaagacgtctcagcgcctcaggtcatag

SEQ ID NO: 128500 - DNA, 2130 bp, synthetic construct
  misc_feature 1..2130: note = Description of Artificial Sequence: Synthetic coding sequence
  source 1..2130: mol_type = other DNA
atggaatctcccacaaaggagatcgaagaatttgagtccaacagtcttaaataccttcagcctgaacagattgagaagatttggcttcggctacgaggcctgcgaaagtataagaagacaagccagcgcttgcgatccttggtgaagcagctcgagagaggcgaggcatccgtcgtggacctgaaaaagaatttggagtatgccgccacagttttggaatcagtgtacattgacgagacccgccgcctgctcgacaccgaggacgagcttagcgatattcagagcgatgccgtgccctctgaagttcgtgactggctggcatctacgttcacacgccagatgggtatgatgctgcggcggagtgatgagaagccaaggttcaaaagcatcgtgcacgcagtgcaggcaggaattttcgtggagcggatgtatcggcgcacctccaatatggtaggactgtcatatcctcccgcagtgattgaggcactcaaggatgttgataaatggagctttgatgtgttttctctcaacgaggcaagcggagatcacgccttaaagtttatcttctacgaactcctgaccagatatgatctgatatcgagatttaagatccccataagcgcgctggtgtctttcgttgaggcattggaggtcgggtatagcaagcacaagaatccataccataatctcatgcacgccgccgatgtcacccagaccgtgcactatcttctgtataagacgggagtggccaactggctgaccgagctcgaaattttcgctattatattcagcgcagccatccatgattacgagcacacggggaccacaaataactttcacattcagacaaggagcgatcctgctattctttacaatgaccggtcagtgttggaaaatcatcacttgtccgccgcttaccgcctgttacaagacgatgaagagatgaacatcctaatcaacctgtccaaggacgactggagggagttccgaactctggtaatcgagatggtgatggccactgacatgtcatgtcattttcagcaaatcaaggccatgaagaccgcgttgcagcagccagaggcaatagagaagcctaaggccctgtccctgatgcttcatactgccgatatttctcatcccgctaaagcctgggacctgcaccaccgatggaccatgtctctgctggaggagttcttccgccagggggacagggaagcggaactggggttacctttcagcccactgtgcgatagaaaaagcactatggtcgcacagtctcaggttggcttcatagactttattgttgagccaaccttcactgtgttaactgatatgaccgaaaagattgtgagcccgttgatcgacgagacaagtcagactggcggcacaggccagagacggtcatcactcaacagtataagcagctctgatgcgaaaagaagcggggtcaagacctctggttctgagggctcagccccgatcaacaacagcgtcatctccgtggactacaagtcctttaaagccacctggacggaggttgtgcacatcaacagggagcgctggcgcgctaaagtccccaaggaagaaaaagccaaaaaggaggctgaagagaaggcaaggttggccgctgaggagcagcagaaggagatggaagcgaaatcacaagctgaggagggggcctccggcaaggctgaaaagaaaacttccggcgagactaagaaccaggtgaatgggacacgggccaataagtccgataacccccgcggaaagaatagcaaagccgaaaaaagctctggggagcagcagcaaaatggggacttcaaggacggcaagaacaaaaccgacaagaaggaccacagcaatatcgggaatgattctaagaagaccgacgggactaagcaacgcagccatggctctcccgccccttcaaccagttcaacatgtagacttacgctgccagtgattaagccaccactgcggcacttcaaaaggcccgcctatgcctcaagctcctacgcacctagcgtttctaagaaaacagacgagcatcctgccagatataagatgctcgatcagagaatcaaaatgaagaagatacaaaacatcagccacaattggaaccggaaatag

SEQ ID NO: 128501 - DNA, 3339 bp, synthetic construct
  misc_feature 1..3339: note = Description of Artificial Sequence: Synthetic coding sequence
  source 1..3339: mol_type = other DNA
atgcgccgggatgagagagacgcgaaggcaatgaggtccctgcaaccaccagacggcgcaggcagccctcccgagtctctgcgtaatgggtatgtgaaatcctgcgtgtcaccactgcgccaagatcctccaagaggcttcttcttccacctgtgcagattctgtaacgtcgaacttagaccacctccggcatctcctcaacaacctcgcaggtgctcgcccttctgtagggcccgcctgagcctcggtgcacttgctgccttcgtcctggctctgctcctgggggcagaaccagagagttgggcggccggtgccgcttggttacgcacactgttgagcgtttgttcacacagtctctctccactgtttagcattgcatgcgctttcttttttctaacatgctttctaacacgaacgaaaaggggacccggcccaggtcggtcctgtggaagttggtggttgctggcactccccgcttgctgttatctgggggacttcctggtctggcagtggtggagctggccttggggggacggagatgcaggcagcgctgctcctcacacaccgcctgaggcagcagcaggacgactgcttctagtgcttagctgtgtgggactgctgctgaccctggcccacccactgaggctgcggcactgcgtgctcgtgctgctgcttgcctctttcgtatggtgggtgagcttcaccagcctcggttcattgccctctgctttacggcccctcttaagcggtctggtcgggggcgcaggatgcctgttggccctaggactggatcatttcttccaaattcgcgaggcgccactgcacccgagactgtcatcagctgccgaagagaaagtgccagtgatccgaccgcgccgtcggtcatcatgtgttagtctcggagagacagccgcaagctactacggttcctgcaaaatattcagacgaccatccctgccttgcatcagcagagagcagatgatcttgtgggattgggacctaaaacaatggtataaacctcattaccaaaattccggtggtggtaacggcgtcgatctgagtgtacttaatgaggcccggaatatggtgtccgatctgctgacggatccatccctacctccacaggtgatcagctccctacggtccatctcctcacttatgggggctttcagcggctcatgtagacctaaaataaaccccctgacacccttccccggattctacccgtgcagcgagattgaagacccagcagagaaaggcgaccggaagcttaacaaggggctaaaccggaatagtctgccgacccctcagctcagacggtcctctggcacatccggactgctcccagtggaacaaagcagccgatgggaccggaacaatggcaagcgaccgcaccaagagtttggcatctctagccagggctgctacctgaatggtcccttcaattccaatctgctgacaatacccaaacagaggtcctcttccgtttccctgactcaccacgtcgggctgcgacgcgccggtgttctgtccagcctttcaccagtgaactcttctaaccatggccctgtcagcacggggagtctgaccaacagatctccaatcgaatttccggacacggccgactttctgaataagccttctgtcatcctgcagagaagcctgggaaatgcccccaacactcctgacttttaccagcaactgaggaattccgactcaaatctgtgtaactcttgtggacaccagatgctgaaatatgtgtccacctcagaaagtgacggtacagattgttgctcagggaagtcgggagaggaagaaaatatattcagcaaggaatcctttaagctgatggagacccagcaggaggaagaaaccgaaaagaaggacagtcggaagctttttcaggaaggcgacaagtggctgactgaagaagctcagtccgaacagcagaccaacattgagcaggaggtcagccttgatctgatcctggtggaagaatacgattctctgatcgaaaagatgagcaattggaactttcctatcttcgaactggtcgagaagatgggtgagaagtccggacgcattctttctcaggtgatgtacacactcttccaggacactgggcttttggagatcttcaagattcccacgcagcagtttatgaattactttcgagccctggaaaacggctacagggatataccttatcacaatagaatccatgctacggacgtactgcatgccgtctggtacctcacgacccgccccgtgccaggcctccagcagatccacaatgggtgcggaacggggaacgagaccgatagcgatggcaggataaaccacggacggatcgcgtacatctccagcaagagttgctccaaccctgatgaaagctatggctgcctctcgagcaacattccggctctggagctgatggcattatatgttgcggccgctatgcacgattacgatcaccctgggcgcacgaacgcgttccttgtggccacaaacgctcctcaagccgtgctctataacgatcggagcgtgctggagaaccaccacgctgctagcgcctggaacttgtatctgagcaggcctgagtacaactttctcttgcacctggaccacgttgagttcaagagatttcggttcttggtaatagaagcaattttggccaccgacttaaagaagcattttgatttcctggccgaatttaatgcaaaggccaatgatgtcaactccaacgggatcgagtggtctaacgaaaacgatagactcctcgtctgtcaagtgtgcattaaactggctgatatcaatggacccgcaaaggtccgggatctgcacctcaagtggacagagggaatcgtgaacgagttctacgaacagggtgacgaagaagcaaacctcggcctgcctatctccccctttatggaccggtcatccccgcagcttgcaaagcttcaagaatcttttataacgcatattgtgggccccctgtgtaatagctatgatgctgcaggactgcttccagggcagtggctggaggcagaagaagacaacgacaccgaaagtggcgacgatgaggatggcgaagagttggatacagaggatgaggaaatggaaaacaatttgaatcccaaaccaccaaggagaaaaagcagaagaaggattttctgccagctcatgcatcacctgactgaaaatcataaaatctggaaggagatagtagaagaggaggaaaaatgtaaagctgatgggaacaaactgcaagtcgagaactcttcgctgccccaggctgacgaaatccaggtgatcgaggaagccgacgaagaagaatag

SEQ ID NO: 128502 - DNA, 3186 bp, synthetic construct
  misc_feature 1..3186: note = Description of Artificial Sequence: Synthetic coding sequence
  source 1..3186: mol_type = other DNA
atgcgccgggacgagcgagatgcaaaagcaatgcgcagtctgcagccacctgatggagcaggaagcccacctgagtcccttcgcaacgggtatgtgaagtcctgtgtttcaccgctccgtcaagacccccctagaggatttttcttccacttgtgccgcttttgcaacgttgaactgcgtccccccccagcatcgccccagcagcctcggaggtgcagcccgttctgccgggccaggctgtctctaggggcacttgctgccttcgtcctagctctgctgctgggagcagagcccgaatcctgggctgcaggcgcggcctggctgcgaaccctgctgtccgtctgctcacactctttatcgcccttattcagcatcgcatgcgcttttttttttctgacgtgttttcttacaaggacgaagagaggccctggaccaggacggtcctgtggtagctggtggttgctggcactgcctgcctgctgttacctgggcgacttcttggtctggcagtggtggtcgtggccatggggtgatggagacgccggatccgcagctcctcatactccacccgaagcagctgcaggacgactgctgcttgtgctcagttgtgtggggttgctgttgactctagcccacccgctgcgcttgagacattgtgtcctggtgctgcttctggcctcttttgtgtggtgggtgtcttttaccagcctgggatcactgccaagcgccctgaggcccttgctctccggactggtaggaggcgccggctgtttactggccctgggtcttgatcacttcttccagatccgcgaggcaccactccatccccggctgtcttctgcagctgaagagaaagttcccgtgattagaccccgccgccggtcctcctgcgtgagcttaggagagaccgctgccagctattatggaagttgcaagatcttccggaggccctcccttccctgcatctcccgcgagcagatgattctgtgggattgggatctgaagcagtggtacaagccacactaccagaattccggcggaggtaatggtgtggatctttccgtgcttaatgaggccagaaacatggtgtccgacctgctgactgacccgtccctcccaccacagggcctgaataggaacagtctacctaccccgcagctgaggcggtcatctggcacttctggacttctgccagtcgaacagagcagccggtgggacagaaataacgggaaaaggccccaccaggaattcggcatatcctctcagggctgttaccttaacggcccttttaactcgaatctcctcacaatcccaaaacagcgcagcagtagcgtgtctctgactcaccatgtcgggctcagaagagccggtgtgctgagttcactaagtcctgtgaattcgtccaaccacggccctgtatctacaggatccctgacaaacaggagccctatcgaattccccgataccgctgattttctaaacaagccctcagttattcttcagaggtctctcgggaacgcacctaatactccagacttctaccagcagcttcggaattctgatagcaatctgtgtaacagctgcggtcatcagatgctgaaatacgtgagtacaagtgaaagcgatggcaccgactgctgctctggaaaatctggcgaagaggagaatatattttccaaggaatcgttcaagctgatggagactcagcaagaggaggaaaccgaaaaaaaagatagcaggaagcttttccaagagggcgataagtggctgaccgaggaggcccagtccgagcaacaaactaacatcgagcaggaagtcagcttggatctcatcttggttgaggagtatgattccctcatcgaaaaaatgagtaattggaactttcccatatttgaattggttgagaaaatgggagagaagagcggacgtattctgtcgcaggtcatgtacaccctgttccaggataccggcttattggaaatcttcaagatcccgactcagcaattcatgaattatttccgcgctctagaaaacggctatagagatataccatatcacaatcgcattcatgctacagatgtcctccatgcagtgtggtatttgacaacccgacctgtccccggtctgcagcagattcacaacgggtgtggtacaggtaacgagactgacagcgacggccggatcaatcacggtcgcatcgcttatatttcgtcaaagtcttgctcaaatcccgatgaatcgtacggctgtctgtctagcaacatcccagcactggagctcatggctctctacgtcgccgccgcgatgcatgactatgatcacccagggcgtacaaacgcttttctcgtagccacaaacgcgcctcaggcagtgctgtataatgaccgatccgtactcgaaaaccaccacgccgcgagcgcctggaacttgtacctcagccggcccgagtacaacttcctcctgcatctcgaccatgtcgaatttaaacgctttcggtttttggtgatcgaggcaatcctagccaccgacctgaagaaacacttcgactttctggcagaattcaacgcaaaggccaatgatgtgaactccaatggaatcgagtggagtaatgaaaatgaccgcttgttagtatgtcaggtctgcatcaaacttgccgatatcaatggtcctgctaaagttagggatttgcacctcaagtggactgaagggattgttaatgagttttatgagcagggagacgaagaggctaatctgggtctgccgatctcacccttcatggatcgcagctcacctcagttggcgaaattgcaagagtcattcatcacacatatcgtgggacccctgtgcaacagctatgatgcagccggcctgctaccgggtcagtggctggaggccgaggaggataacgacacggaaagcggggacgacgaagacggcgaagaacttgatacagaagatgaggagatggagaacaacctgaatccaaagcccccacggcgaaagtccaggcgccggatcttttgtcagcttatgcaccacctaactgagaaccacaagatctggaaggagattgttgaggaggaagagaaatgcaaggccgacggaaataagttgcaggtggagaactcttctctcccccaggcagatgagatccaagtaatcgaggaggcggacgaagaagagtag

SEQ ID NO: 128503 - DNA, 2583 bp, synthetic construct
  misc_feature 1..2583: note = Description of Artificial Sequence: Synthetic coding sequence
  source 1..2583: mol_type = other DNA
atggcaaggccacgcggccttggtcggatcccagaactgcagctggtggccttccccgtagccgtggctgcggaggacgaggcttttttgcccgagccgttggcacccagagcccctagacgtccccggtcgccccccagctcgcccgtgttcttcgccagcccctcccctacctttaggcgaaggttaaggttacttagatcttgccaggatcttggcagacaggcatgggctggcgcggggttcgaggcagagaatggccccactccttcccccggccggtcccctctagattctcaggcatctcccggactagtcctccacgcaggcgctgctacctctcagagacgagaatcctttctttaccgctcggactccgactacgacatgagtccaaagacaatgtcacgcaactcttcggtgaccagtgaagcccatgccgaggacctgatcgtgacccctttcgcccaggtgctggcgagtttaagatccgttagatccaactttagcctcctgaccaacgtgccagtcccaagcaacaaaagaagcccactcggaggacctactcccgtgtgcaaagcaactctctccgaagaaacctgccagcagttggcccgagagacactggaggaattggactggtgcctagagcagctcgaaaccatgcagacataccggtccgtgtccgagatggccagccacaagttcaaacgcatgctcaaccgagaactgacacatctcagcgagatgagcaggagcggtaaccaggtgtctgaatatatatctaccacctttttggataaacagaacgaagtggaaatcccttccccaaccatgaaagaacgtgagaaacaacaggctcccaggccccgtccaagtcagccaccaccacctccggtaccccatcttcagccgatgtcacagatcactggtctgaagaaacttatgcatagcaatagcctgaataatagcaacatcccccgctttggcgttaagaccgatcaggaggagctcctggcccaggagctcgagaatctcaataaatggggactgaacattttttgcgtgagcgattatgccggcggacgtagtcttacctgtatcatgtatatgatttttcaagagcgcgacctgctaaaaaagttcaggattcccgtcgacaccatggtcacctacatgctgaccctggaggatcattatcatgctgacgtcgcataccataattcactccacgccgccgatgttctccagtcaacacacgtgctcctcgcgacgccagctttggatgccgtcttcacagatcttgaaatcttggccgcactcttcgctgccgctatacatgacgtggatcaccctggtgtatctaaccagtttctgatcaataccaacagcgagctggccctgatgtataacgacgaaagtgtgctggagaatcaccacctagccgtaggcttcaaactgctccaggaagacaattgcgatatcttccagaacctttcaaagagacagcgtcagtccctgcgaaaaatggtgattgatatggttctggctactgacatgagcaaacacatgaccctgctcgcagatctcaaaaccatggtcgagacaaagaaagttacaagttctggggttctgctcctcgataattatagtgataggatccaggtattgcgaaatatggtccactgtgcagatctgagcaatcccaccaaaccgttggagctgtacagacagtggaccgatcgaattatggccgagttctttcagcagggcgatcgagagagggaacgcggcatggaaattagcccgatgtgcgataaacacactgctagcgtggagaaaagtcaagtgggtttcatagactacatcgtgcaccctctgtgggagacttgggccgatcttgtgcaccccgatgctcaggagatcttggacaccttggaggacaatagagattggtattattcggctatcaggcagtctccatccccccctccggaagaggagagtagggggcccgggcatccccctctgcctgacaaattccaatttgagcttaccctagaagaagaagaggaggaagagatttccatggctcagattccctgcacggcacaggaggctttgaccgcacagggcctgagtggtgtggaggaggctctagatgccacaattgcttgggaggccagccccgcccaagagagcctggaggtcatggctcaagaagctagtctggaagctgagctcgaggcagtttatctgacccaacaggcacaatccacgggtagtgcacctgttgctcccgatgagttttcctcccgcgaggaattcgtcgtggccgtatcacactctagcccctcagcactggcactgcagagtccactgttgcccgcctggcgcacactgtccgttagtgagcacgcgcctggattgcccggactgcccagtacagccgcagaggtggaagcacagagagaacaccaagcggccaagcgtgcctgctcagcttgcgccggcaccttcggggaggatacctccgctctcccggcccccggtggcggcggcagcggaggcgaccctacctag

SEQ ID NO: 128504 - DNA, 1944 bp, synthetic construct
  misc_feature 1..1944: note = Description of Artificial Sequence: Synthetic coding sequence
  source 1..1944: mol_type = other DNA
atgccactggtggatttcttttgtgaaacctgctccaaaccatggctagtcgggtggtgggatcagtttaaacgtatgctgaatagggagctcacgcatctgtccgagatgtctcgatcagggaaccaagtgtctgagtacatctcaactacatttctggacaagcagaacgaggtggagatccctagcccaactatgaaggaacgcgaaaagcagcaggcaccgagacctaggcctagccagcctccccctcctcctgttccgcacttgcagccgatgtcacaaattacaggtctgaaaaaattgatgcactcaaactcccttaacaactctaacatccccaggttcggagttaaaacagaccaggaagaattgctggcccaggaactagaaaatctcaacaaatggggtcttaatattttttgcgtgagcgattacgccggcgggcggtcactgacttgcataatgtacatgatattccaggagcgcgacctcctcaagaaatttagaattcccgtggatactatggttacctatatgctcaccctggaggatcattaccatgccgatgtcgcatatcataacagtctgcacgcagcggacgtcctgcagagtacccatgtactgctcgctacacctgccctagacgccgtgttcacagatttagagatcttagccgctttattcgccgccgctatccatgatgtagatcatcccggagtatctaaccagtttctgatcaatactaattccgaactcgcactgatgtacaacgacgaaagtgtgctcgaaaatcaccaccttgccgttggattcaagctacttcaggaagataactgcgatatcttccagaacttatccaaacgccagcgtcagtctcttcgtaagatggtgattgacatggtgctggccactgacatgtctaagcacatgaccctactggccgatctcaaaacaatggtcgaaaccaagaaggttaccagtagcggcgtgctcctgctggacaactattcagatcggattcaagtcctccgaaatatggtgcactgtgctgatctgtctaatcctactaagcccttggagctgtaccggcagtggactgatcgcattatggctgagttctttcaacagggagacagagaaagagagaggggcatggagatctcacccatgtgcgataaacacacagcgtcggtcgagaaatcgcaggtcgggttcattgactatatcgtgcatcccttgtgggaaacctgggccgacttggtgcatcccgacgcccaggaaattctggatactctcgaagataaccgagactggtactacagcgcaattcgacagtcacccagccccccacctgaggaggaatccagaggtcctggacacccacctctgccagacaaattccaatttgagctcactctcgaggaagaggaggaagaagagatttcaatggcgcagattccttgcaccgctcaggaagctctcaccgcacagggcttatcgggagtggaggaggccctcgatgcgaccatcgcttgggaagcgtcacctgcccaggagtcactcgaggttatggcgcaggaagcatccctagaggctgaactggaagccgtgtatcttacccagcaagctcagagcaccggaagcgccccagttgctcccgatgaattctcctcacgagaggaattcgtcgtcgccgtaagccatagttctcctagcgccttggctctgcagagtccccttctccccgcctggagaactttgagcgtctcggagcacgcaccgggacttccaggtcttccaagtaccgccgcagaggtcgaggcacagcgagagcatcaggctgccaagagagcctgttccgcgtgtgccggcaccttcggggaggacacttccgcattgccagctccaggcggcggtggttccggaggagatcctacctag

SEQ ID NO: 128505 - DNA, 2661 bp, synthetic construct
  misc_feature 1..2661: note = Description of Artificial Sequence: Synthetic coding sequence
  source 1..2661: mol_type = other DNA
atggagccgccgacagtgccgtctgagcgaagcctttctctgtccctgcctggtccacgggagggacaggcaacgctcaagccgccgcctcagcatctgtggaggcagccccgtaccccaatccgtatccagcagcgagggtacagcgactcggctgagagagcagagagagagcgccagcctcatcgtccaatcgagcgagccgacgccatggacaccagtgacaggccagggctgcgcaccacacggatgtcatggcccagttccttccacggcacagggactggcagtggcggtgccggagggggctcgtcacggaggttcgaagctgaaaacggtcccactccgtcacccgggcgttcgccactggactcacaggcctcccccggactggtgttgcatgcaggtgccgctacgtcccagagaagggagtcatttctttatcgatcagacagcgattacgatatgtctccgaagaccatgtcgcggaacagcagcgtaacctccgaggcccacgctgaggacctaatcgtcacccccttcgcacaagtccttgcaagtctgagatcagttagatctaacttcagtctgttgacaaacgtacctgttcccagcaacaaacgctctccgctcggcggtcccacacctgtctgcaaagccactctttcggaggagacgtgccaacagctggcccgcgagacgttggaagaacttgattggtgcctcgagcagctggagacaatgcagacgtaccggtctgtctctgagatggcctctcataaatttaaacgaatgctgaaccgcgaattgacccacctatccgaaatgagtcggtcagggaaccaggtgtccgagtatatcagcacgaccttcctggataagcaaaacgaagtagagatcccaagcccaacgatgaaagagagagagaaacagcaagcgccaaggccgcgacccagccaaccacctcctccgcccgtaccccacctccagcccatgtcccagatcacaggcctgaaaaaattgatgcacagtaattctctcaacaacagcaacatcccaaggttcggcgtcaagaccgaccaagaggaactactagcccaggaattggaaaatcttaacaagtggggcctcaatattttttgcgtctcagattacgctggggggcgaagtttgacctgcatcatgtatatgattttccaggagagggatctgctgaaaaagttccgaatcccagtggatacgatggtgacctatatgctgaccttagaggatcactaccacgcagatgtggcataccacaattccctgcacgccgctgatgttctacagtcaactcatgtgttgctcgctacacctgcacttgacgctgtcttcactgacctggagatcctggctgctctgtttgccgctgccatccatgacgttgaccatcctggagtgagcaaccagttcctgattaatacgaatagcgaactagccctcatgtataatgacgaatctgtcctagaaaatcatcatttagcggttggtttcaagctcttgcaggaggacaattgcgacatcttccaaaatcttagtaaaagacagcgccagagtcttaggaagatggtgatcgatatggtactggcaaccgacatgtccaagcatatgacactccttgcagatctgaaaaccatggttgagacaaaaaaagttacaagcagcggcgtgctgctgctggacaactactcagacagaatccaggtgcttagaaacatggttcactgcgccgatttatctaaccccacaaaacctctggagctttatcgccagtggacggacagaattatggctgagtttttccagcaaggagatagagagagagagcgaggcatggaaatctctcctatgtgtgataagcatactgctagtgtcgagaaatcccaggtgggcttcatcgactacatcgttcacccactttgggagacatgggctgatctggtgcatcctgatgctcaggagatccttgacactcttgaggacaatagggattggtactactcagccataagacagtcgccgtcgccccctccggaggaagaaagcagggggcctggtcatcccccccttccagacaagttccagttcgaattaactctggaggaagaggaagaggaagagatcagcatggctcagatcccatgtacagcccaggaagctctgaccgcccagggcctgagtggcgtggaggaagcactagatgccaccatcgcttgggaggcgtcccctgcccaggaatcactagaagttatggcccaggaggcgtctctcgaggccgaactggaggccgtgtatctgacgcagcaggcccagagcacaggctctgccccagttgccccagacgagttctcttctagagaggaattcgtcgttgccgtttcacacagctctccaagcgcgctggctctgcaaagtcctctgttacccgcctggcgtactctgtccgtctctgagcatgctcctggcttgcctggactgccttctaccgcagcagaagtagaggcccagcgagagcaccaggcagccaagcgggcgtgctctgcctgtgccggtacctttggagaagacactagtgccttgcccgcaccaggcggcggcggatctgggggtgatcctacctag

SEQ ID NO: 128506 - DNA, 972 bp, synthetic construct
  misc_feature 1..972: note = Description of Artificial Sequence: Synthetic coding sequence
  source 1..972: mol_type = other DNA
atggtcttgccctctgatcagggatttaagctgctgggcaacgtgctccaaggcccagaaccataccgcctgcttacttccggactacgattacatcaagagctcgagaatctcaacaaatgggggttgaatatcttctgcgtcagcgactatgcggggggccggtcgctgacatgcattatgtacatgattttccaagaaagggatctgctaaaaaagttcagaatcccagtcgataccatggtgacctatatgctgactcttgaagatcactaccacgccgatgtggcctaccacaacagcctccacgccgccgacgtgctgcagtccacccatgttctcttggctaccccagccttagatgccgtgttcaccgatctggagattctggccgcgcttttcgcagctgctattcacgacgtcgatcatccaggcgtatctaatcagttcctgattaacactaacagcgaattagccctgatgtacaatgatgagtccgtgttggagaatcaccatctggctgtgggcttcaagttactacaggaagataattgcgacatttttcagaacctttccaagcgccagcgacagtcgctcaggaagatggttattgacatggtattggccaccgatatgtctaagcatatgacccttttggcagacctgaagactatggttgaaacaaagaaagtgaccagctcgggggtcctcctcttggataactattccgaccggatccaggtcctgaggaacatggtccactgcgccgatctaagcaaccccacgaagccccttgagttatacaggcagtggacggaccggatcatggccgagttcttccaacagggagacagagagagagagagaggaatggagatttctcccatgtgtgacaagcacacagctagtgtcgaaaaaagccaggtgcaggcccgcggcatcgacgggcgagcgcagggagaattctattag

SEQ ID NO: 128507 - DNA, 2595 bp, synthetic construct
  misc_feature 1..2595: note = Description of Artificial Sequence: Synthetic coding sequence
  source 1..2595: mol_type = other DNA
atgaaacggtccaggtcagccctgagcgtggccgggaccggtgacgaaaggtctcgggaaacccccgagagcgaccgggctaacatgctcggggcagacctgaggagacctcgtcgacggctaagtagcggacctgggctgggctgggctcaacctgagccctccgatcctggggtccctttaccacctagacctacgactttgccacttctgattcctcccagaatcagcatcacccgggctgagaacgactcttttgaggctgaaaacggacccaccccttcacccggaagatcccccctcgattcacaggcttccccaggcctggtgctgcatgccggagcagccacctcacagcggcgggagagcttcctctacagaagcgactccgactacgatatgagccctaaaaccatgagcagaaactcttcagtcacttccgaggcgcatgctgaggatttgatagtgacacccttcgcgcaagtactagcctctctccggagcgttcggagcaacttcagtttgttgactaatgtgcctgtaccaagcaataaacggagccccctgggcggacctactccggtgtgcaaagcgacacttagcgaggagacgtgtcagcaactggcaagggaaacactggaggaactggactggtgcctcgagcagcttgaaacaatgcaaacatatcgtagcgtctccgagatggcaagccataagtttaaaaggatgctcaatcgagaactcactcacctcagcgagatgtcccgctcagggaaccaggtctcagagtatatttctacgacatttctggataaacagaatgaggtcgaaatcccctcccctaccatgaaagagagagagaagcagcaagccccccggccaagacctagccaaccgcctccaccccctgtgccacaccttcagcctatgagccagatcacgggtctcaagaagttgatgcatagtaacagcctcaacaacagcaatattccacggtttggcgtgaaaacggatcaggaggagctcttggcgcaggagctcgagaacctgaataagtggggcttaaacatattctgtgtatcagactacgccgggggacgatccctgacttgtatcatgtacatgatattccaggagcgggatttgctgaaaaagttccgaatcccagtcgataccatggtcacttacatgctgacattagaggaccattatcacgccgacgtcgcctatcataactccctgcatgcagccgacgttctgcagtccacacacgtgctgttagccactcctgcgcttgatgcagtgtttaccgacttggaaatccttgccgcgctgttcgctgctgcaatccacgatgttgaccacccaggcgtaagcaaccagttcctcatcaataccaattccgagctggccttaatgtacaatgacgagagtgtgctggagaaccaccacctggccgttggatttaagctgcttcaggaggataattgtgacatatttcagaacctgagcaagcgccaacgtcaaagcctcaggaagatggtcattgatatggtgctcgccacggatatgtcgaaacacatgacactgctcgcagatctgaagacgatggttgagaccaaaaaggtgacttcctctggagtcctgctgttggacaactatagcgatcgcatccaggtgcttcggaatatggttcactgcgctgatctgtcaaaccccacaaagcctttggagctttataggcagtggactgacagaattatggccgagttttttcagcaaggtgatagagaaagagaaagggggatggagatttcccccatgtgcgacaagcacactgcgtctgtggagaagtcccaggttggttttatcgactacatcgtgcatcccttgtgggaaacctgggccgacctggtgcatcccgacgcccaggaaatccttgatacactagaggacaatagagactggtactatagcgccatccggcaatccccaagtcccccccccgaagaggagtcccgcggccccggccacccaccgttgcccgacaagttccagtttgagctgacattggaggaagaggaggaggaagagattagtatggcccaaataccatgcaccgcccaagaggctctgaccgcccagggtctcagcggagtggaggaagccttagatgcgaccattgcttgggaagcgagcccagcacaggagtcactcgaggtgatggctcaggaagcatcccttgaagccgagctcgaagccgtatatctcacgcagcaggcgcagtccactgggtcagcccctgttgcacccgacgagttcagctcccgcgaggagtttgtcgtggctgtcagtcattcaagcccgtcagctttagcgctgcaatcaccccttctccctgcctggaggactttaagcgtctcggagcacgcgcctggcttacccggcctccctagcaccgccgcagaagtggaggctcaaagagaacatcaggcagctaaaagggcctgctccgcatgtgcgggaaccttcggcgaggatacttcagctcttcctgctcccggaggcgggggcagtggtggagatcccacttag

SEQ ID NO: 128508 - DNA, 309 bp, synthetic construct
  misc_feature 1..309: note = Description of Artificial Sequence: Synthetic coding sequence
  source 1..309: mol_type = other DNA
atggtggagaccaagaaggtgacaagcagtggggttctgttgctggataattactctgatcggatccaggttctgcgcaatatggtgcactgtgccgatctgtccaaccccaccaagccactggagttatataggcagtggaccgatagaattatggccgagttcttccaacagggtgacagggagagggaacgcgggatggaaattagccctatgtgcgacaaacatacggcaagcgtggagaaatcccaggtgggttttatcgactatatcgtccaccccctgtgggaaacctgggctgatctgtag

SEQ ID NO: 128509 - DNA, 2478 bp, synthetic construct
  misc_feature 1..2478: note = Description of Artificial Sequence: Synthetic coding sequence
  source 1..2478: mol_type = other DNA
atgcgcagtggcgctgcacctcgcgcaaggccacgtcccccggccctcgcactgccacctactggtccagagtcattgacccacttcccattttcagatgaagatacaaggcggcaccctcctggtcgtagcgtgtctttcgaggctgaaaacgggccaacgcccagccctggaaggagtcccctggatagccaggctagccctggcctggttctgcacgccggcgctgctacgtctcagcggagagagtcgtttctctacagaagcgattcagactacgatatgagcccgaaaacgatgagtcgaaattcctctgtgacgagcgaagctcacgccgaagacctgattgtcacacccttcgcacaggtgctggcctcattgcgatctgtcagatctaatttttccctgcttactaacgtgccagtgccttccaacaagcggtcgcccctgggcggacctacacctgtttgcaaggctaccttaagcgaagaaacatgtcaacagctggcccgcgagacactggaggagctcgattggtgcctggaacaactggagactatgcagacctacaggagcgtctcagagatggcatctcataagttcaagcggatgctgaaccgggaactgacgcacctctccgagatgagcaggagtgggaaccaggtgtcggaatacatttcaactaccttcctagataaacagaacgaggtcgaaattccgtcgcccaccatgaaggaacgggagaaacaacaggctcccagacccaggccttctcagccccctcctccccccgtgcctcaccttcagcctatgagtcagattactggcctaaagaagcttatgcatagcaactctctaaacaatagcaatattccgcgatttggggtcaaaaccgaccaggaagaactgctcgcgcaggagctggaaaatttaaataagtggggtttaaatatcttttgcgtgtctgactatgccggtggcaggagcttgacctgcatcatgtatatgattttccaggagcgagacctcctgaagaagttccgtatacctgtggacacgatggtaacctacatgcttacactggaggatcactaccacgccgatgtcgcttatcataatagcctccacgctgccgacgtgctgcagtcaactcacgtcctgctcgccacccccgctctggatgccgtgtttacagacctggagatcctggcagcactgtttgcagccgccattcatgacgtagaccacccgggggtttccaaccagtttctgatcaatacaaacagcgagctggccctcatgtacaatgacgaatccgttctcgagaatcatcatctggccgttggctttaagctccttcaagaggataactgcgacatcttccaaaacctatctaagcgtcagcgccagagcttgaggaaaatggtaatagatatggtactggcgactgatatgagcaagcatatgactctcttggcagacctgaagacaatggtggagaccaaaaaagtcacttctagcggagtcctgctcctcgacaactatagcgatcgaatacaggtgttgaggaacatggtgcactgcgctgatctttctaatcctacaaaacccctggagctgtaccgacagtggaccgatcgcattatggccgaattcttccagcagggggatcgcgagagggaacgcgggatggaaattagccctatgtgcgataagcacactgcctctgtcgagaagtctcaggtgggcttcattgactacatcgtgcacccactctgggaaacctgggccgatctggtacatcccgacgcccaggagatcctggatacactggaagataaccgagactggtactatagtgccattagacagtccccttcccctcccccagaggaggaaagtaggggacctgggcaccctcccctgccagacaagtttcagtttgagttgacccttgaagaagaagaagaagaagaaatatctatggcccagattccatgcaccgcacaggaagctctcacagcccagggtctgagtggggtcgaggaggctctggatgctaccatcgcatgggaagctagccccgcacaggaatctttggaagtgatggcccaagaagcttctttggaggccgagctggaggccgtgtacttgacccagcaagcacagtcaacaggctctgcccccgtcgctcctgacgagtttagttctcgggaagaatttgtcgtggccgtttctcactcatcgccaagtgcactggccctacagtccccactgcttcccgcgtggagaaccctgtccgtgagcgagcatgctccgggcctcccgggcttgccaagcacggcggcggaagtggaggcacaacgggagcaccaggcagccaagagggcgtgctctgcctgtgcagggactttcggtgaggatacgagcgcattacctgcccccgggggcgggggctcgggtggggatccgacatag

SEQ ID NO: 128510 - DNA, 2211 bp, synthetic construct
  misc_feature 1..2211: note = Description of Artificial Sequence: Synthetic coding sequence
  source 1..2211: mol_type = other DNA
atgaaaaaatctaggagcgtgatgacggtaatggctgacgataatgtaaaggattactttgagtgctctctgagtaaaagctactcctcaagtagtaatactctggggattgacctgtggcgggggcggcgctgttgcagcggtaatctgcagctgccaccgttgagtcagcggcagagtgaaagggcccgaaccccagagggcgatggtatttcacgccccaccactctgccattgacgacgctgcccagtatcgcaattaccactgtctctcaggagtgcttcgacgtggaaaacggcccatcaccgggacgaagccccttggacccacaggcctcctctagcgccggtctggtgctgcatgcaacctttcctggccactcccagcggagggagtcctttctgtaccggtccgacagtgactacgatttaagccccaaagccatgagtcggaattcgtccctcccctcagagcaacacggtgatgatttgatagtgactccctttgcgcaggtactggcctctctgaggtccgtgcggaacaatttcacgattcttactaatcttcacggcacctccaacaaacgatcccctgccgcctcacagccccccgtctctcgagtgaaccctcaggaggaaagctaccagaaactggctatggaaacactggaggagttagattggtgtttggaccagctagaaaccattcaaacgtacagatcagtcagtgagatggccagcaataagtttaaacgcatgttaaatcgggagctcacgcatctgtcggagatgtcgagaagtgggaaccaggtctctgagtatatctcaaatacattcctggataaacaaaacgatgtggagataccttcacctacccaaaaggatcgagaaaagaaaaagaagcagcaactgatgacacagatttcaggtgtaaagaagctaatgcatagctcttccttgaataacacatccatctctaggtttggcgtaaatacagaaaacgaggaccatctggcaaaagaacttgaggatctcaacaagtggggcctcaacatcttcaatgtcgcgggctactctcacaaccggccacttacttgcattatgtatgccatcttccaggagcgagatttgctcaagacatttaggatcagcagcgatacctttatcacctacatgatgacgctggaagaccactatcactcagacgtggcgtaccataatagtctccacgctgccgacgtcgcgcagagcacgcatgtgctgttgtcaacacccgccctggatgccgtcttcacagatctggagattttggccgcaatctttgctgccgcgattcatgacgtcgaccatcctggcgttagtaaccagttcctcattaatacaaattccgaattagcgctgatgtataatgatgaatctgtcctggagaaccaccatctggccgttggatttaagctccttcaggaggaacattgcgatatatttatgaacctgacaaagaagcagcgccaaacactgaggaagatggtgatcgacatggtcctggctacagacatgtctaagcacatgtctctgctggccgacctgaaaaccatggtagagaccaagaaggtcacatcaagtggagtcctgctgctggacaactatactgaccgcatccaggtgttgaggaacatggtacattgtgccgatctgtctaatcctactaagtccttggagctgtaccgacaatggacagatcggataatggaggagttctttcagcagggggataaggagcgcgaaaggggaatggagatctctccaatgtgcgataagcacaccgcctctgttgaaaagtcacaagtgggtttcatcgattatatcgtacacccgctgtgggaaacatgggctgatttggtgcagccggacgcgcaggatattctcgacacactggaagataatcgcaactggtaccagagcatgattcctcagagtccaagccctcctttggacgaacagaatcgggactgccagggcttaatggagaagtttcagttcgagctgactctggacgaggaagactccgaaggccctgagaaagaaggtgagggtcattcatatttctctagcaccaaaactttatgcgtgatcgatccagagaaccgcgactctctgggggaaacagatatcgatatcgcgaccgaagataagtcacccgtcgatacgtag

SEQ ID NO: 128511 - DNA, 2211 bp, synthetic construct
  misc_feature 1..2211: note = Description of Artificial Sequence: Synthetic coding sequence
  source 1..2211: mol_type = other DNA
atgaaaaagagcagatccgtaatgactgtgatggccgacgataatgtgaaagactattttgagtgctctctgagcaaaagctactctagttccagtaatactctgggcatcgatctgtggcgcggccgcagatgctgttcgggaaacctgcaattgccccctctatctcagagacagtccgagcgtgcgcgaactccagagggagacggtatttctagaccaaccactctgccattaaccacactgccctctatcgcaattaccacagtctctcaggaatgttttgatgtcgagaatgggcctagccccgggcggagtccactggatccccaggcctcgtcatccgcgggactagtactgcatgcgacttttcccggccatagtcagaggcgcgagtcgttcctttatcggagcgactccgattacgacctttcgcctaaagccatgtcccgaaattcttcccttccctcagagcagcatggggacgacttaattgttacgccgtttgctcaagtgttggcttcacttaggtccgtaaggaataattttaccatcctgactaacttgcacgggacctccaataagcgaagtcctgctgcaagccagcctccagtgtcacgagtaaaccctcaggaagagtcttatcagaagctcgcgatggagactcttgaggaactcgactggtgtctggaccagttggagacaatacagacatacaggtccgtttccgagatggcttccaacaaattcaagaggatgctcaacagggaattaacccacctttctgagatgtctcgctccgggaatcaggtgtcagaatacatttctaatacctttctggataaacagaatgatgtggagattccctcacctactcagaaggacagagagaaaaagaagaagcagcagctaatgacgcagattagcggcgttaagaaactcatgcactcttcctccctgaacaatacctcaatctcaaggttcggggtaaacaccgagaacgaggaccatctggcaaaggagttggaggatctgaacaaatgggggctcaatatctttaacgtagcaggctactcgcataaccggccactgacctgcatcatgtatgccatattccaggagcgagacctccttaagaccttcaggattagctctgacacttttatcacgtacatgatgactctggaagatcactaccactccgacgtcgcttatcataattctctacacgctgctgacgtggctcagtccacacacgtgctgctttcaacaccagctttagatgctgtctttaccgacttggaaatactggcagcgatcttcgccgcagcgattcatgatgttgaccatccaggggtctctaaccaattcctcatcaatacaaattctgagctggcactgatgtacaacgacgagagcgtactagagaatcatcacctggcagtgggatttaaacttctccaggaggagcactgtgacatcttcatgaacctcaccaaaaagcaacggcagactctgcgtaagatggttatcgatatggtgctcgctaccgatatgagcaaacacatgagcttgttggccgacctcaaaactatggtcgaaaccaagaaggtgacaagcagtggagttctgctgttggacaactatactgatcgcatccaggtgctgcggaacatggtccactgtgccgacctgtccaacccaaccaaatccctagagctctaccgtcagtggacagaccgaattatggaggagttctttcagcagggtgataaggaacgagagcgggggatggagatcagccctatgtgtgataagcatacagcctcagtagagaaatctcaggtgggatttatcgactacatcgttcaccccctgtgggaaacttgggctgatttggtccagcccgatgcacaggatattctcgatacactggaagacaatagaaactggtaccagtcaatgattccgcagtctccgagtccccccctggatgagcagaacagagactgtcaaggcctgatggaaaagttccagttcgagctcaccttggacgaggaagatagcgaaggaccagagaaggagggcgaaggtcatagctattttagttctacaaaaacgctgtgtgtgatagaccccgaaaatagggactctttgggggaaacagacattgatatagccacagaagacaagagtccggtggatacatag

SEQ ID NO: 128512 - DNA, 1695 bp, synthetic construct
  misc_feature 1..1695: note = Description of Artificial Sequence: Synthetic coding sequence
  source 1..1695: mol_type = other DNA
atgaaggagcatggagggaccttttcttccacaggaatatcaggggggtccggcgactcggcaatggatagcctacagccattacagcctaattatatgccagtctgtctcttcgccgaggaatcctaccagaaacttgccatggagactcttgaggaactggattggtgtctggaccagctggaaaccattcagacatacaggagtgtgagtgaaatggccagcaataagtttaagcgcatgctgaatagggaacttacccacctgtcagaaatgtccagaagcggaaatcaggtttcagaatatatttctaatacattcctggacaagcagaatgatgtggaaattcccagccctactcagaaggatcgcgaaaaaaagaagaagcagcaactgatgactcaaatcagcggcgtcaagaaactcatgcactcctcttctctgaataacacctctatttctaggtttggagtcaacaccgagaacgaagatcacctggcaaaagagctcgaggacctcaacaagtggggtttgaacattttcaacgtggcaggatattcacacaataggcccctcacctgtattatgtatgctatcttccaggagagggatttgcttaagacatttcggatcagctcggacacttttattacatacatgatgacactcgaagaccactatcatagcgatgttgcataccataactctctgcacgccgccgatgtggctcaatcaacccatgtcttgctgagcactccagccttagatgcagtctttacagatctggaaattctcgctgccatctttgccgctgctatccacgacgtcgaccatccaggagtctctaatcagtttctaatcaacacaaattccgagttagctttaatgtacaatgacgagtccgtgctggagaatcatcacctggcagttggcttcaagcttctccaagaggagcactgtgatatttttatgaatctcacaaagaagcagcgacagactctgcgcaagatggtcatcgacatggtgctggcgaccgatatgtccaagcacatgtcgcttctcgcagatctcaaaaccatggttgaaactaaaaaagtgaccagcagcggtgtgctgctcctggacaactatactgaccgaatccaggtgttgcggaatatggttcactgcgccgacctgtctaaccctacgaagtcgcttgagttgtatcgccaatggactgacagaatcatggaagaatttttccagcaaggggataaggagagggagagaggcatggaaatctcccccatgtgcgacaagcacacagcaagcgtggagaagtctcaggtgggctttatcgattatatcgtacatccactgtgggagacatgggcggacctcgtacagcctgatgctcaggacatcttagacaccctggaggacaaccgcaactggtatcagtccatgatccctcaatccccatcgccaccccttgacgaacagaatagggactgccaaggcctgatggagaaattccaattcgagctgacactggatgaagaagactctgagggtcctgagaaggagggtgagggccattcttacttcagctccaccaagacactctgcgttattgatcctgagaatagggatagtctaggcgaaaccgatatagacatagccacggaggataagtcaccagtggatacctag

SEQ ID NO: 128513 - DNA, 2211 bp, synthetic construct
  misc_feature 1..2211: note = Description of Artificial Sequence: Synthetic coding sequence
  source 1..2211: mol_type = other DNA
atgaagaaatcgcgctccgtgatgaccgtgatggccgatgacaacgtcaaggactactttgagtgcagcttgagcaagagttactccagctcaagcaatactttgggaatagatttgtggagaggacggaggtgttgtagcggaaatctgcagttaccaccgttatctcagcgccaatcagagcgggcccggacacctgaaggtgacggcatttcacgccccacaacactccccctgacaaccctgccgtccatcgctataacaacagtcagtcaagaatgcttcgatgtggaaaatggcccctcccctgggaggtctcccttggatccacaggccagcagctctgctgggcttgtccttcacgccacatttcccgggcattcgcagaggagggagtcctttctgtatcgctccgactctgactatgatctctccccaaaagcaatgagccgaaattctagtctgccctccgagcaacacggcgacgatttaattgtgactcccttcgcccaagtgctcgcctcccttcgatccgtcagaaacaatttcacgatcttgaccaatttgcacggcacaagcaacaaacggtcaccagccgctagccagccaccagtgagcagggtgaacccgcaggaggagtcgtaccagaagttggcaatggagacactggaagagttagattggtgcttggatcaactcgagaccatccagacttaccgctctgtctccgagatggcctcaaataagttcaaacggatgctaaaccgggagttaacgcacctgtctgaaatgagccgcagcgggaaccaggtgtccgagtacatttccaatacttttctggataagcagaacgacgtagaaattccctctccaactcagaaggacagggagaaaaagaagaaacaacagcttatgacccagatatcgggagtgaaaaaactgatgcactcctcgagcctaaataacacctcaatcagccgattcggcgttaacaccgaaaacgaggaccaccttgccaaggaactggaggaccttaataagtgggggctcaacatttttaacgtggccggctattctcacaaccgcccccttacctgcataatgtacgccatcttccaggaacgcgatcttttaaagacctttaggatttctagtgatacgtttatcacgtacatgatgacactcgaagaccactatcactctgacgttgcctatcataattctcttcatgccgcggatgtggcgcagtctacacacgtactcttgtccactcctgctctggacgccgtgttcactgatctggaaatcctggcagccatattcgctgctgcaattcatgacgtggatcaccctggagttagcaatcaattcttaattaacacaaattccgagctcgccctgatgtacaatgacgagtccgtgctggagaaccatcatctagctgtggggtttaaattgctccaggaggagcactgtgacatcttcatgaacttgactaaaaagcaacgacagacactgcggaagatggtgattgacatggtgttagccaccgacatgagcaagcacatgtccttgctagccgatctgaagacaatggtggaaacaaaaaaagtgacatccagtggagtgcttctactggacaattacaccgatcggattcaggtacttagaaacatggtacactgcgcagatctgtcgaatcctacaaaaagcctggagctctaccgacaatggaccgacaggattatggaagagttttttcagcagggcgacaaggagagagagagggggatggaaatctctccgatgtgtgacaaacacaccgcctctgtggagaagtcgcaggtggggttcattgactacatcgtgcatccactgtgggagacatgggccgatctggtgcagccagacgcccaggatatcctcgataccctggaggacaataggaattggtaccaaagtatgatcccgcagagcccctcccctcctctcgatgagcagaaccgggactgccaggggcttatggaaaagtttcagtttgagctgacccttgatgaagaggatagcgagggccccgaaaaggagggcgaggggcattcgtacttcagcagtacgaagacactctgtgttatcgatcccgagaaccgcgactctttgggggaaacagatatcgatatagctactgaagataaatcacctgtcgatacttag

SEQ ID NO: 128514 - DNA, 2166 bp, synthetic construct
  misc_feature 1..2166: note = Description of Artificial Sequence: Synthetic coding sequence
  source 1..2166: mol_type = other DNA
atgaccgccaaggattcaagcaaggagctgacggcgtccgaacccgaagtgtgtattaaaacctttaaagaacaaatgcatctggagttagagcttccacgtttgcccggaaaccgccccacatcccctaagatatcaccccggtcttctccaaggaactccccttgcttctttcggaagcttctcgttaacaagtctataagacagaggcgcagatttaccgtagcccatacctgcttcgacgtggagaatgggccatctccagggcgatctccactggacccacaggcatcatccagcgcagggcttgtgttgcatgcaacctttccaggtcattcacagcgacgggagtccttcctatacaggagcgacagtgactatgacctgagccccaaggctatgtccaggaatagctcgcttccctccgaacagcatggcgacgacctaatcgtgacaccctttgcgcaggtcctggcctccttgcggtctgtgcgaaacaattttacaattttaaccaatctccacgggacctccaacaagagatcccctgcagcctctcagcccccagtatctcgggtaaacccccaggaggagagttatcagaagttagctatggaaactctcgaggagctggattggtgcctggatcagctcgagaccatacaaacatacagatccgtgagcgagatggcgtctaataagttcaaacggatgcttaatcgcgaactgacgcacctgagcgaaatgtctaggagcggaaatcaggtgtccgaatatatttcgaacaccttcctggataaacagaatgacgtggagatccccagccctacccagaaagaccgcgaaaaaaagaaaaagcagcagctaatgacccaaatctctggcgtcaaaaagttaatgcatagctccagcctgaacaacaccagcatttccaggttcggagtaaacaccgagaacgaggaccacctggccaaggaactagaggacctaaataagtggggcctgaacatcttcaatgtcgcaggttacagtcacaatcgacccctgacgtgtatcatgtacgcgatttttcaggaacgggacctattaaaaacctttcgtattagcagcgatacttttataacatacatgatgacattggaagatcattatcactctgacgttgcctaccacaattccctccacgcagctgacgtggcccaatcaacccacgttctcctttctacccccgctctggacgctgttttcacggatctggagattctggcggctatcttcgcagcagcaatccatgatgtggaccaccctggagtctctaatcaatttctcattaatacaaacagtgagctcgctctaatgtacaacgacgagagcgtgcttgaaaaccatcatctggccgtggggttcaaactgttgcaggaggaacattgtgacatctttatgaatctaactaagaagcagagacaaaccctgcgaaaaatggtcatcgatatggtcttagccaccgacatgagtaagcatatgtctcttttagcggatctcaaaactatggtggaaactaagaaggtcacctcatcaggagtcctattgttggataattacaccgataggatccaggtgctgcgcaacatggttcactgtgccgatctgtccaacccaaccaagtctctggagttataccgccagtggactgatagaatcatggaggaattttttcagcaaggcgataaggagcgtgagcggggcatggaaatttccccaatgtgtgacaagcatacagccagcgttgaaaaatcacaggtaggtttcatcgattatatagtgcacccgctttgggagacctgggccgatttggtacagcccgatgcccaggacatcctggatacactggaggataataggaactggtaccagtctatgatcccgcagagccccagtccgccattagacgagcagaatcgcgactgtcagggcctgatggagaaattccagttcgaactgactttggacgaggaggattctgaaggtcccgaaaaagaaggcgagggacatagctacttcagctcgactaaaacactgtgtgtgattgacccagaaaatcgcgactccctgggtgaaactgatattgacattgctaccgaggataagtctccagttgacacatag

SEQ ID NO: 128515 - DNA, 2043 bp, synthetic construct
  misc_feature 1..2043: note = Description of Artificial Sequence: Synthetic coding sequence
  source 1..2043: mol_type = other DNA
atgcagggccctccagcccccgcgcccgtacccgggcccggatcaccaaggggaagccctaggggaagccccggtctgtttaggaagcttttggtgaatcagagcatccggctccagaggcgatttacagtcgcccatccactctgcttcgatttagagaacggtttatcttgtggccgtagagcactcgatccacagtcttcaccaggcctgggtagaattatgcaggcacccgttccgcattcccagaggcgagagagttttctctacagaagcgattcagactacgaactctcccccaaagccatgagtcgaaattcttccgtggcgtccgacttacatggagaggacatgatcgtcacgccattcgcacaggtgctggcttcactgcggaccgtgcggagcaacgtagctgccctcgctaggcagcaatgcctgggagccgcaaagcagggtcccgtcggcaacccaagctctagtaaccaactgccccccgcagaagataccgggcagaaactcgcactggagaccctcgacgagcttgactggtgtctggatcaactcgaaacccttcagacacgacattccgtcggcgagatggcaagcaacaagtttaagcgcatcttgaatcgggagctgactcatttatctgagacgagccgcagcggaaatcaggtatcagaatacataagccgcacttttcttgatcagcagactgaagtggagctccctaaggtgacggctgaggaggcaccgcagcccatgtctaggatctccggactgcatggcctgtgtcactctgcgtctctgagtagcgctacagtgcctcgatttggggttcagaccgatcaggaggagcagcttgctaaggagctcgaagacaccaataaatggggccttgatgtgttcaaggtggctgaactgtctgggaacagaccactcacagctatcatattcagtatctttcaggaaagggacttattaaagacctttcaaattcccgcggatacacttgcaacctatctgctgatgctggagggccactaccacgctaacgtagcctaccacaactccctgcatgctgccgatgtcgcgcagtccacccatgtcctgttagctacccccgcactagaagctgtctttaccgatctggagattctggccgccttattcgcatcagctattcatgacgtggatcaccccggcgtttctaaccagttcctcatcaataccaactccgaactcgcattgatgtataacgatgctagcgtattggaaaaccaccacctggccgttggcttcaaactgttacaggcggaaaattgtgatatttttcagaatctcagcgccaaacagagactctcactgcggcggatggtgatcgatatggtgctggccacggacatgtccaagcacatgaatctgctggctgacttgaaaaccatggtggaaacgaagaaggtgacctccttgggagtactactgctggacaactattccgaccgaatacaggtcctacagaatttggtacactgtgcagacttatctaaccccacaaagccgcttcctttataccgccagtggacagaccggattatggcagagttcttccagcagggtgaccgtgagagggagtcaggattggacataagccccatgtgtgataaacacacagcttctgtggaaaagtcacaagtaggtttcatcgactatatcgcccacccactttgggagacttgggcggatctggtccatcccgacgcccaggatttgctcgacacgttagaagataatcgagaatggtatcagtctaaaattccacggagtccgtcagatctgactaatcccgagagagacggtccagaccggtttcagtttgagctgactctggaggaagccgaagaggaggatgaggaggaggaagaggaaggagaagaaaccgcgcttgctaaggaagccttagagttgcccgataccgaactgctgagccctgaggccggcccagatcccggagacctccctctggataaccaaagaacgtag

SEQ ID NO: 128516 - DNA, 1281 bp, synthetic construct
  misc_feature 1..1281: note = Description of Artificial Sequence: Synthetic coding sequence
  source 1..1281: mol_type = other DNA
atggcttctaacaaattcaaacgcatattaaaccgggagctcacccatttgtcagagacatcgaggtctggaaaccaggtctcagagtatatcagccggacatttttggaccagcagaccgaggtggagctcccaaaggtgacagccgaggaagccccgcaacctatgtctcgcatttccgggttacacggactctgtcactcagccagtctgtcttcagcgaccgttcctagattcggcgtgcagaccgatcaggaagaacagctggccaaggagttagaggataccaacaagtgggggctggacgtcttcaaggtggccgagcttagtggcaaccggcccctgactgccataattttctctatcttccaagcagtgttcaccgacctggagatcctggccgccttgtttgcctcagctattcacgatgtggaccatcctggggtcagtaaccagttcttaataaacactaacagcgaactggcactgatgtacaatgacgcttccgtactcgagaatcaccatctggccgttgggttcaagctcctgcaggctgaaaactgcgatatttttcagaacctttctgcgaagcagcggctgtcactgcggcgcatggtgatcgacatggtcctggccaccgacatgtcaaagcacatgaatctgctagctgacctgaaaactatggtagagacaaagaaggtgacctcactgggcgtgctcctgctggacaattattctgataggattcaggtacttcagaatcttgtgcactgcgccgacctaagcaatcccaccaaaccccttccgctgtacaggcagtggaccgatagaattatggctgagttcttccagcagggggatagggagagggaatccgggttggatatttctccaatgtgcgataaacacaccgctagcgtggagaaaagtcaagtcgggtttatcgactatatcgctcatcccctctgggaaacatgggccgacctggttcatccagacgctcaggatctgcttgacaccctggaggataatcgcgagtggtaccagtctaagattcccaggtctccaagtgacctgaccaacccagagcgcgatgggcccgacagattccagttcgaactgaccctggaagaggccgaggaagaagatgaggaagaagaggaggagggtgaagagacagccttggcgaaagaagccttggaactgcccgacaccgagctgttgtctcccgaggccggtcccgatcctggcgacctgcctctggataaccaaaggacttag

SEQ ID NO: 128517 - DNA, 2139 bp, synthetic construct
  misc_feature 1..2139: note = Description of Artificial Sequence: Synthetic coding sequence
  source 1..2139: mol_type = other DNA
atggagaacttgggagtcggagaaggtgcagaggcgtgctcgcgattaagccgatcccgtggtcgacatagcatgacacgcgcccccaaacacctatggaggcaaccacgcaggcctattcggatccagcagcgtttctacagcgatcccgataagagcgccggctgtcgggagcgcgacctaagccctcgtccagagctccgtaaaagtcgcttatcatggcctgtctccagttgcagaaggtttgatctggagaatggtctcagctgtggccgtcgtgcattagacccccagtcctctcccggactggggagaattatgcaggcgcccgtgccacattctcagcgaagggaatcgtttctctacaggagtgattcagattacgagctctccccaaaagccatgtctaggaactcctcggtcgcttccgatctgcatggtgaagacatgattgtgaccccatttgctcaggtgctggcaagtctgcgcaccgtgaggagtaatgtggccgcactggccagacaacagtgccttggcgcagcgaagcaaggtccagtgggaaatccaagtagcagcaaccagctccctccagccgaggatacggggcagaaactggcccttgagacgttagacgaattggactggtgtcttgaccagctagaaactttgcagacccggcactcggtgggcgagatggcatccaataaattcaagcgcatcctcaacagagagctgacacacctgtccgagacctcaagatccggaaatcaggtcagcgaatacatttcaaggacttttctcgaccagcagacagaggtcgagttgccaaaggtaacagccgaagaggctccccagcctatgtcccgtatttctggcctgcatgggttgtgtcatagtgcctccctctcctctgcaactgtgccacgatttggcgtccagacagatcaggaggagcagctcgcaaaagagcttgaggacacgaataagtggggactggatgtgttcaaggtagccgagttgagtggaaatcgtccgctgaccgccatcatcttctctatcttccaggagcgcgatttgctgaaaactttccagattccagccgacactctggcgacctacctcctgatgctggagggtcactaccacgccaatgtggcttaccacaatagtctccacgcggctgatgtggcccagtcgactcatgtcctgcttgccaccccagccctcgaagccgtatttacagatctggaaatcctcgccgccctatttgctagtgctatccacgatgtcgaccatcccggagtgtcgaatcagttcctgattaacaccaactcagagttggcactaatgtataatgatgccagtgtactggagaatcatcacctcgctgttgggttcaagctgctgcaagctgagaactgcgacattttccagaacctcagcgctaagcaaaggctgtctctgagacggatggtgatagatatggtcttggccacagatatgtctaagcacatgaatctgcttgccgatttaaaaaccatggtggagactaagaaggtcacatctctcggggtgcttctcctagacaattacagtgatcgaattcaggttctacagaatctggtgcattgcgctgacttgtctaatcccaccaaacccttgcccctgtatcgacagtggacagaccgcattatggcagaattcttccagcagggggatagagaacgagagtcaggactggacatctctcccatgtgcgataaacacaccgccagcgttgagaagtctcaggtggggttcatcgattacattgcccaccctctgtgggagacttgggccgatctggtccatccagatgctcaggatctgcttgataccttggaggacaaccgcgagtggtatcagtccaagattccccgctcaccctctgatctgaccaacccggagagggatggaccggaccgcttccagttcgaactgacactggaggaagcggaggaagaggacgaagaagaggaagaggagggcgaggagaccgccctggctaaagaggctctagagttgcccgatacggagctcttgtcccctgaggcgggaccagatcccggcgacttaccactggataaccagagaacttag

SEQ ID NO: 128518 - DNA, 1821 bp, synthetic construct
  misc_feature 1..1821: note = Description of Artificial Sequence: Synthetic coding sequence
  source 1..1821: mol_type = other DNA
atgcaggcccctgtccctcactcccagaggcgtgagtcatttctgtatcggagtgactcagactatgagttgtcacctaaggcaatgagccgcaattcatcagttgcttctgacctgcatggagaggatatgatcgttaccccattcgctcaggtattagccagcctccggaccgtccggagcaacgtggccgccctggcaagacagcagtgcttgggtgccgccaagcaggggccagtcggtaacccatcttcatcaaaccaactgccacctgctgaggataccggtcaaaagttggcgctggaaaccctggacgagctcgactggtgtctggatcaactggaaactctgcaaaccagacactcagtgggggagatggcgtctaataagtttaagagaattctcaacagggagctgacccacttatcagagactagcagaagcgggaatcaggtgtccgagtacatttctaggactttcctggaccagcagactgaggtggagctcccaaaagtgactgctgaggaggctccacagccaatgtctagaattagcgggctccacggcctgtgccatagcgcgagcttgagctctgcaactgtgccacgtttcggtgtccaaaccgaccaggaagagcagctcgcgaaggaactggaggatacgaataaatggggactggatgttttcaaagtggcagagctgtcaggcaatcgccctctaaccgccattatcttctcaatcttccaggagagggacctgctcaaaacgttccagataccagcggatacactcgctacttacctgcttatgcttgaaggccactaccatgcgaacgttgcttatcacaattcactccacgccgccgacgtggcccagtccacgcatgtgctgctagccacacccgcactggaagccgtcttcacagacttggaaatcttagccgcactgttcgcgtctgccatccatgatgtagaccacccaggagtgagtaaccaattcctcattaacactaattctgagcttgcactgatgtataatgacgctagtgtgctggaaaatcaccatctcgccgtgggtttcaaactccttcaggcagagaattgcgacatcttccaaaatctgtccgctaaacagaggctctccttgagaaggatggtaattgacatggtcttggccacagatatgtcgaaacacatgaacctgttagcagacctaaagacaatggtggagacaaagaaggtcacgagtctgggtgttctgctgttggacaattactcagaccgcattcaggttctgcaaaatctggtacactgtgctgatctgagcaaccctacaaagcccctccccttgtatcgccagtggaccgatagaattatggccgagttctttcagcagggcgaccgtgaacgggagtctggactcgatattagcccaatgtgtgataagcacacagcatctgtcgagaagtcccaagtcggttttatagattacatcgcccatccactgtgggagacatgggctgacctggtgcatccggatgctcaggatctacttgatactctggaagataacagggaatggtatcagtctaaaattccaaggtctccctcggatcttacgaatcctgagcgggacgggcctgacaggtttcaatttgagttaacgcttgaggaggctgaagaggaggacgaagaggaagaagaagaaggtgaagaaacggcactagcaaaggaggccctggaactgccggacacggagctgctaagccctgaagccgggcccgaccctggagatttacctttggataatcagaggacctag

SEQ ID NO: 128519 - DNA, 2376 bp, synthetic construct
  misc_feature 1..2376: note = Description of Artificial Sequence: Synthetic coding sequence
  source 1..2376: mol_type = other DNA
ggcacccaggccggccttcggtccggcgcccctagcgggcataggcagctattgggggtcggacccaccttgtccccatctagcaccttctaccggttctcaacatcaggtgcggactcatccagtctcagccctcccctccctgccctcggcagaacgcgggaacagactctcctgggggcccgtagtagggggagggtcctcctaccagccattcccgaccccttcctatggcgaatggagaacttgggcgtgggggagggagcagaggcctgttcccggttgtcacggtctcgtggccgccactctatgacacgagcccctaagcacctttggaggcagccgagaaggccaatacggatccagcagagattttactccgatccagataagtcagccggctgccgggaaagggacctgtcaccccgtcctgaactgaggaagagtcgcctctcatggccggtctccagctgcagaagatttgacctggaaaacggattaagctgtgggaggcgtgccctggacccccagtcttcccctggcctgggccgaatcatgcaagcgccagtcccccattcccaacggcgcgagtcatttctctacagatccgacagtgactacgagctctcccccaaggctatgagccggaattccagcgtagccagcgacttgcacggcgaagacatgatcgttactccttttgcccaggttctggcctccctccggacagtgcggtctaacgtggccgcccttgctcggcagcagtgcctgggtgcagccaagcagggcccagtgggaaacccatcctcatcaaaccagctgccacccgctgaggacaccggccagaagttagctctagaaacattggacgaacttgattggtgcctggaccagctggaaacactgcagacccgccactccgttggcgaaatggcctccaacaaattcaaaagaattcttaaccgcgaattgacacacctgagcgaaacctcgcgttccggcaaccaggtttccgagtacatctctaggacattcctggatcaacaaacagaagttgaactcccaaaagtgactgctgaggaagcgccacaaccaatgtcacgcatttctggtcttcacggcctctgtcatagtgcatccctctcctccgctactgttccccgatttggcgtgcagaccgaccaggaggaacagttggccaaagagctggaagacacaaataaatggggactggacgtgtttaaagtagccgagttgtctggtaatagaccacttaccgccattatcttcagcatatttcaggaacgggatctccttaagacattccagatccctgccgacaccctggcgacctacctgctcatgctagaaggccattaccacgctaacgtggcctatcacaattctctgcacgcagctgacgttgcgcagagcacccacgtcttgctggccacaccggccctggaagccgtcttcactgatctagagattctggccgcactcttcgcgtcagcaatccacgacgtcgaccaccctggggttagcaaccagtttctgattaacaccaactcagagctggctcttatgtacaatgatgcgagcgtgcttgaaaaccaccacctagcagtaggtttcaagctgctgcaagccgagaactgcgacatctttcaaaacctcagcgctaaacaacgtttgtccctgagaagaatggtgatcgatatggtcctcgccaccgatatgtcgaagcacatgaatctcttggcggatcttaagaccatggtcgaaactaaaaaggttaccagccttggcgttctcctgcttgacaactacagcgatcgcattcaggtgttgcaaaacctggtgcactgcgcagacctgtcgaaccccacaaagcctctcccattgtaccgacagtggaccgaccgcatcatggcagagttttttcaacaaggtgatagggaaagagaatccggccttgacattagccccatgtgcgacaagcatactgccagtgtggaaaaaagtcaggtagggttcatcgattatatcgcccacccactatgggagacatgggccgatttggtacacccagatgcccaggacttgttggacactctcgaggacaatagagagtggtatcagagcaaaattccaagatcccctagcgatttgactaatcccgaacgcgatggacccgatcgatttcagttcgaactgacactcgaagaagccgaggaggaggacgaagaggaagaggaggagggagaggagaccgcactggctaaggaggcccttgagctgccggataccgagctcctcagcccagaggcagggcccgacccaggagatctgcccctcgacaaccagagaacctag

SEQ ID NO: 128520 - DNA, 2103 bp, synthetic construct
  misc_feature 1..2103: note = Description of Artificial Sequence: Synthetic coding sequence
  source 1..2103: mol_type = other DNA
gctgtgcagaagcggagccgcgccgcgggagccaggtcaagtctgcacgctgtgttggctatgcaggggccacctgctccggcacctgtgcctggaccagggtcgcctcggggttccccccgcggaagtccaggcctcttcaggaaactgctcgtcaaccaaagcatcaggctacaacgtagattcactgtcgcccaccctctgtgtttcgaccttgaaaacggcctcagttgcgggcggcgcgcactggaccctcagtcgagccccggactgggcaggatcatgcaggcccctgtgccacattcacagcgccgggagtcattcctgtacaggtccgatagcgactacgagctctctcctaaagcgatgtcaaggaatagttcagttgcaagtgacctccatggggaggacatgatcgtaacccctttcgcgcaggtcttggcctctctgcgcaccgtcagaagtaatgtggctgctttggcacgtcagcagtgtttgggagccgcaaagcaggggccagtgggaaatcctagctcatctaatcagctgccacctgcggaagatacagggcagaagctggcacttgaaactctggacgaacttgactggtgtttggatcagcttgagacactccagacccggcactcggtaggtgagatggcatcaaacaaatttaaacgcatattaaaccgtgaattaacacatctttcagagacctcccggtccggtaatcaggtatctgagtatattagcagaacgttcctggaccagcaaaccgaggtggagctgcccaaagttactgctgaggaggctccacagcccatgagccggatttctgggctgcacggcctctgccactccgcctcactgagctcggccactgtcccacggtttggggtgcagacagatcaggaagaacagttggcaaaagaactcgaggatacaaacaagtgggggttggacgtctttaaggtcgcagagctgtccgggaatcggcccctaacagctattatcttttccatctttcaggagagagatctactgaagacgttccagatcccagctgatacactagccacatatcttctcatgctggaaggccactatcatgccaatgtcgcatatcacaacagtctgcatgccgccgacgtggcgcagtctacacacgttttgctcgcaacaccagccctggaggctgtctttactgatctggaaattctagctgctctgtttgcaagcgccatccatgacgttgaccaccctggagtatctaatcagtttctcattaacacaaactcggaactggctctgatgtacaatgatgcgtccgtcctcgagaatcatcacttggccgtgggtttcaaactcctgcaggctgaaaactgtgatatcttccaaaacctgagcgccaaacaacggctgagccttaggcggatggtgatcgacatggtgctggccacagatatgtccaagcatatgaatctcctggcggatctgaagaccatggtggaaacaaaaaaggtgaccagtctgggggtactgctgctggataattactcggatcggattcaagtattgcagaatctggtgcattgcgctgacttgtccaaccctactaagccattgcctctctaccgccagtggaccgatcggattatggccgaattcttccaacaaggagaccgcgagcgcgaatctgggttggatatttctcctatgtgcgataagcataccgcgagtgttgagaagtctcaggtggggtttatcgactacatagcacacccactgtgggagacatgggctgatctcgtgcaccctgacgcccaagatctactggacacattggaagataaccgggaatggtaccagtctaaaatcccaaggtcgccctctgatctgaccaaccccgaacgagacggtccagacagattccagttcgagttgactctggaagaggctgaggaagaagatgaagaggaggaggaggagggggaggagacggcgctcgctaaggaagcgctggagttgcccgacactgagcttctgagtccagaggctggacccgaccctggcgacctccctctggataatcagagaacgtag

SEQ ID NO: 128521 - DNA, 1446 bp, synthetic construct
  misc_feature 1..1446: note = Description of Artificial Sequence: Synthetic coding sequence
  source 1..1446: mol_type = other DNA
atggcttccaataaatttaagcgcatacttaatcgggagttgacgcatctgagtgagacaagtcggtctggcaaccaagtcagcgagtatatctcccgcaccttcctcgatcagcagaccgaggtggaacttccgaaagtcaccgccgaagaggctccacaacctatgtccaggatttcgggtctgcacggcttatgccacagcgcaagcctgtcatccgccacagttcccaggttcggggtccagaccgaccaagaggaacaactcgctaaggagctcgaggataccaacaagtggggcctcgatgttttcaaagttgctgaattaagcggcaaccgccctctgactgccattatcttcagcatatttcaggagagagatttattgaagaccttccagatccctgctgacacactggcgacctacctcttgatgctggagggccattaccacgccaacgtcgcttatcacaattcgttacatgcagcggacgtcgctcaatctacgcacgtcctcttagccaccccagccctcgaagccgtgttcacagacctggagatcctcgccgctctgttcgcctctgctatccatgacgtggatcaccccggagtctccaaccagttcctcattaataccaactctgaactcgccctaatgtacaacgatgcttctgtgctggaaaaccatcacctggcggtcggctttaagctactgcaagccgaaaattgcgatatatttcagaacctgtctgcgaagcagaggttgagcctaaggcgaatggttatcgacatggtactggccaccgatatgtcaaagcacatgaatctccttgccgatctgaaaaccatggtggaaactaagaaggtgacctcactcggcgttctactgctggataattactcggatcgaatccaagttctccaaaacttggtccactgtgctgacctctccaacccaactaaaccattacctctctatcgccagtggactgaccgcatcatggcggaattttttcagcagggagaccgagagcgggaaagtggtctcgatatatcaccaatgtgtgacaaacataccgcttctgtcgagaaatcccaggtgggttttatcgactacatcgctcatcccctctgggagacatgggcggatcttgtgcacccggacgcacaagacctgctcgatacactcgaagataacagggaatggtatcagtctaaaattccgcggagcccgtctgacttgactaacccggaaagggatggccctgatcgctttcagtttgaacttaccctggaggaagctgaggaggaggacgaggaggaagaggaggagggcgaggagacagctttagcgaaggaggcgcttgagctgcctgataccgaacttctgtctcctgaggccggccctgaccccggagacctgccccttgataaccaaaggacgtag

SEQ ID NO: 128522 - DNA, 2466 bp, synthetic construct
  misc_feature 1..2466: note = Description of Artificial Sequence: Synthetic coding sequence
  source 1..2466: mol_type = other DNA
atgcagagatataggggtagacagacggtatttggcgctggggttctcgggggggtctcctcagcaccctcattcaatacgcccagtcccagatctagccccctgttctacccgagtgccccttccggccaccgccagctgttgggagtaggcccgacactgtcaccctctagtaccttttaccgattctcaacgagcggcgcagacagctcttcactatcccctcccctacccgcactgggcaggacccgggagcagacgctgcttggagcacggtctcgcgggcgagtgttgctgcctgccatacccgatcccttcctgtggagaatggagaacctgggggtgggcgaaggtgctgaagcgtgttcccgcctgtcccggagtcgggggcggcacagcatgactagagctcctaaacacctatggcggcagccccgcaggccaatccgcatccagcagcggttctactcggaccctgataaaagcgccggatgtcgcgagagggatctgtctccacggcctgaactacggaagagtcgtctctcctggccggtgtcttcatgtaggagatttgacttggaaaacggcctgagctgtggaaggcgggcactcgacccacaatcatcaccagggctcggaaggatcatgcaggcacccgtgccccactcacaaagacgggaatccttcttgtatagatctgattcggactatgagctaagcccgaaggccatgagcaggaactcatcagtggcaagcgacctgcatggggaggatatgatagtcacaccctttgcgcaggtcctggctagtttgcgtacagtcagatctaacgtggctgcactggcccgtcagcagtgtctgggagccgccaaacagggtccagtcgggaacccgagctcttccaaccagctgcctcccgccgaagacactgggcagaagctcgcccttgagacactagatgagcttgactggtgtcttgaccagctggaaacactgcagacccggcactctgttggagagatggctagtaataagttcaaacggatcctcaaccgagagcttactcatctgagtgagacgagtcggtctgggaaccaagtctccgaatacataagtcggacattcctcgaccaacagacggaggtcgagctccccaaggtgaccgccgaagaggctcctcagccaatgagtcgaatctcaggtcttcatggtttatgccactccgcatcgttaagtagtgcaaccgtcccccgattcggagtgcagaccgatcaggaggagcaactcgccaaggagctggaagacacaaacaaatgggggctagacgtatttaaagtggctgagctatctggtaatcgccccttgaccgcaatcattttttctatctttcaggaaagggatctcttaaagacttttcaaatacccgcagataccctggcgacatatttgctgatgctggaaggccactaccatgccaacgtggcttaccacaatagtctgcatgccgcagatgtagcacaaagtactcatgtgctgctggccacgcctgccctggaggccgtgtttactgacctcgagatcctggccgcactgtttgccagtgccatacacgatgtcgatcatcctggagtgagtaaccagtttctgatcaacactaattccgagctggccctgatgtacaatgacgccagcgtgctggagaatcaccacctcgccgtaggcttcaaactgctacaggccgaaaattgcgatatcttccagaacctgtcagccaaacaaagattgtctctgcgcaggatggttatcgatatggtcctggctacagatatgtccaagcacatgaatctccttgcagacttaaaaacaatggtggagactaagaaagtcacctctcttggggttctcctgctcgacaactattcagaccggatccaggtattacaaaatcttgtgcactgcgcagacctcagcaatcctactaagccattgcctctgtacaggcaatggactgacagaatcatggcagaattctttcaacagggtgatagggagcgtgagagtggtctcgacatcagcccaatgtgtgataaacataccgcatcagtcgaaaaaagccaagtcggatttatagactacattgcacaccctctgtgggagacgtgggccgaccttgtgcaccctgatgctcaggacctcctggacaccctggaagacaacagggaatggtaccaatccaagatacccagatcgccctcagatctgacaaaccccgaaagagacggcccagatcggtttcagtttgaactcacccttgaagaagccgaggaagaggatgaggaggaagaggaggaaggcgaagagacggcgttggccaaggaggcgctggagttgccggacacagagcttttgtcacctgaggcaggaccagatccaggcgatttgcctctcgacaaccagcgaacgtag

SEQ ID NO: 128523 - DNA, 1557 bp, synthetic construct
  misc_feature 1..1557: note = Description of Artificial Sequence: Synthetic coding sequence
  source 1..1557: mol_type = other DNA
ccgctgagaatcagaccattactccctaccgcatatcacctgctccctactgggcctgggcaatcagcagacaggtccgagcagcgggggggaccctgcccacccgcaatgccccgatcctctcaatttaaaaggatcctgaatcgggagctgacacacttatctgagacttcgcgctccgggaatcaagtgtcagagtacatcagtagaacctttctggatcaacaaaccgaggttgaactgcccaaggtgactgctgaagaagcaccacaacctatgagtcggatctcaggtttgcacggtctgtgtcattctgcttcactgagctctgccactgtgccccggtttggggttcagacagatcaggaggaacagctagctaaggagctcgaggatacgaataagtgggggctggatgtgttcaaagtggcagagctgagtggaaatagaccactaactgcgatcattttcagcatcttccaggaaagagacttactcaaaaccttccaaatccccgccgacacactcgccacgtacttattgatgctggaaggccactaccatgcgaatgtcgcctatcacaacagccttcatgctgccgacgtggcccagagcactcatgtgctactggcaacacccgccctagaggctgtcttcacagacctcgagattttagccgcacttttcgcaagtgcaattcacgacgtcgatcacccaggcgtctcaaatcagttcctgattaacactaattctgaactcgctctgatgtataatgacgcctctgtgctggagaaccatcacctggcggtgggcttcaaactgttacaagccgagaattgcgacatttttcagaatttgtccgcaaagcaacgcttgagccttcggcgaatggtcatcgatatggtgctggccacagacatgagcaagcacatgaacctgctggccgatctgaaaactatggtggaaacaaagaaagtgacctctctcggagtgctgctgttggataactattcagaccggattcaagtactgcaaaacctagtccactgcgctgatctgagcaaccctacaaaaccccttccgctttaccgccagtggactgatcgcataatggcagagttcttccagcaaggtgaccgcgagcgggagtccggcctagatatctcccctatgtgcgataaacacacagcctccgtagagaagtcccaggtgggcttcattgattatattgcacaccctttatgggaaacctgggctgacctcgtacatcccgacgcccaggaccttctggataccctcgaggataaccgcgagtggtaccagtccaagatccctcggtcacctagcgaccttaccaaccccgaaagagacggccccgatagatttcagtttgaactgacactcgaggaggcagaagaggaagacgaggaagaagaagaggagggcgaggagacagctctagcgaaagaagcgttggagttgcccgatactgagctcctgtctccagaagctggtccggatcctggcgacttgccgctggacaatcagaggacttag

SEQ ID NO: 128524 - DNA, 6723 bp, synthetic construct
  misc_feature 1..6723: note = Description of Artificial Sequence: Synthetic coding sequence
  source 1..6723: mol_type = other DNA
atggagcaaacatggacacgcgattactttgctgaagatgacggcgaaatggtgccccgcactagccacaccgccgctttcctgagtgatactaaggacaggggccctccggtacaatctcagatctggagaagtggtgaaaaggttcctttcgtacagacatacagccttagggccttcgaaaaacctccgcaggtgcagactcaagccttgcgcgattttgagaagcacctgaacgaccttaagaaggaaaacttcagcctgaaactgcgtatctattttctcgaagaaaggatgcagcagaaatatgaggccagccgcgaagacatctataagcgtaacatcgaactcaaagttgaagtggagtctctaaagagggaactgcaagacaaaaagcagcacttggataaaacctgggcggacgtggagaacctaaactcacagaatgaggcggagctgagacgccaattcgaggagcgccagcaggaaactgagcacgtttacgagttgttagagaataaaatccagttactgcaggaggagtcgagactagccaagaacgaagccgctcggatggcagctctggtggaagccgaaaaggagtgcaatttggagctctccgaaaaactcaaaggggtcaccaagaactgggaggacgtgcccggtgatcaggttaagccagatcagtacaccgaggccctggctcagcgagacaagcgcatcgaggaactcaaccaaagtttggcagcccaggaaagattggtggagcagctcagccgcgagaagcaacagttacttcatctgctggaggagccaacctctatggaggttcagcccatgactgaagagctcctcaagcagcagaaactcaatagtcacgagactacgatcacccaacagagcgtcagtgactcacacttggccgagcttcaagaaaagatccaacaaaccgaagctactaacaagatcctacaggaaaaattgaatgaaatgagctatgagctgaagtgtgctcaggagtcttcacagaagcaggacgggaccattcagaacctcaaggaaaccctgaagtcgcgagagagagaaacagaggaactataccaggttattgagggccagaacgacacaatggccaagcttcgcgagatgctgcatcagtcacagttggggcaacttcactcttcggaaggcacatcccctgcccagcagcaggtggctttgctcgatttacagtccgctctgttttgctcccagctggagatccagaagcttcagcgggtcgtgcgccagaaggagcgacagctcgccgatgccaaacagtgtgtgcagttcgtggaagccgcggcccacgaatctgagcaacagaaagaggcgtcatggaaacacaatcaggagttaagaaaggcactccaacagttgcaagaggaactgcagaacaagtcccagcagttaagagcctgggaagctgagaagtataacgaaattagaacacaggaacagaacattcagcaccttaatcattctctcagtcacaaagaacaactgctgcaggaatttagagagctgcttcaataccgtgacaactcggacaaaacccttgaggcgaatgagatgctgctggaaaaacttcgccagagaattcacgacaaggcggtcgccctggagagggcaatcgacgagaaattttcagccctggaagaaaaagaaaaggagctgaggcagctgaggttggctgtgcgcgagcgcgatcacgatcttgagcggttacgggacgttctgtcttccaatgaggcaactatgcagagtatggagtcccttctgcgagctaagggacttgaggtagagcaactgagtaccacatgccagaatctgcagtggttgaaagaagagatggaaactaagttctctaggtggcaaaaggaacaggaatccattattcagcaattgcagacttcattgcatgataggaacaaagaagtcgaagacctgtctgcgactttactgtgcaagctggggccaggtcagagcgagatcgctgaggaactgtgtcaaaggctgcagcgtaaggagcgaatgctgcaagatttactatccgaccggaacaagcaggtgttggaacatgagatggagatccagggactgctccagagcgtgtctaccagagagcaggaatcacaggccgcagccgagaaacttgtgcaagccctgatggagagaaacagtgagttgcaggctctccgacagtatctgggaggacgcgacagtcttatgtcccaggccccaatcagcaaccagcaggcagaagtgactccgacgggctgtctgggaaaacagacggatcaggggagcatgcagattccttccagagatgattcaacgagcctgacagccaaggaggacgtctccatccctcggtctacgctcggcgatctcgacactgtcgccggcctcgaaaaggagctcagtaatgccaaagaggaactggaattaatggccaagaaagagagggagtcccagatggagctgtctgccttgcaatccatgatggctgtgcaagaagaggagctgcaggttcaggctgctgacatggaatcgttgacacggaacattcaaatcaaggaggatttaattaaggacctgcagatgcagcttgtcgacccagaagatattcccgcaatggagagactaacccaggaagtgcttctgcttagggagaaagtcgcatcagtggaatcccaagggcaggagatcagtggtaacagaagacagcaattgctcctcatgctggagggactcgtagatgagcgctctcgcttgaatgaggcactccaggcagagaggcagttatacagctcactcgtgaaatttcacgcgcatcccgagagctcggagagggatcgaaccctccaggtggaactcgaaggtgcacaagtcctgcgctccagactggaagaagtacttggcaggtcacttgagcgcctgaaccgcctagaaacactagccgctatcggaggtgccgctgctggggacgatactgaggacacatccacggagtttactgacagtattgaagaagaagcagcgcatcattcccaccagcaacttgttaaggtcgccttggagaagtccctagccacggtggaaactcaaaacccatcctttagccctccctcacccatgggtggtgattccaaccgatgcttgcaggaggaaatgctgcatttacgcgccgagtttcatcaacacctggaagagaagcgtaaagcagaagaggagcttaaagagctgaaggcccagatagaagaggccggattcagctcggtgagccatatacgaaatactatgttgagtttgtgtttggaaaatgccgaactgaaggaacaaatgggagaggcaatgtctgacgggtgggaaatcgaggaagataaggagaaaggagaactcgataatcagagtcaaccccgggatccagggccccagtcagccttctcgctgcccgggtcgacccaacacctccggtcacagttaagccagtgcaagcagaggtatcaggatttgcaggagaagttgctcttgagcgaagctaccgtgttcgcccaagccaatgagctggaaaagtatagagtgatgttgactggcgaatctctggtcaagcaggacagtaagcaaatacaggtggaccttcaggatttgggctatgaaacttgcggacgtagtgagaatgaggcagaacgggaggagactacctccccagagtgtgaggaacataattctctgaaagaaatggtactgatggagggcctgtgctctgagcagggacggcggggttcaactttggcctcatccagcgagcgtaaacctctagaaaatcagttgggaaaacaggaggaatttcgtgtgtacggaaagtccgagaatatacttgtgttgaggaaagacattaaagacctaaaagctcagctccagaacgctaataaggtgattcaaaacttgaagtcaagggtgcggtccctctcagtcacatccgattacagcagctcattagaacggccttggaagctcagggccgtgggcactctcgagggatcatctcctcattctgtcccagacgaggacgagggctggctgagcgatggaactggcgcattttatagtccaggcctccaggccaagaaagatttggaatcacttatccagcgcgtgagtcagctggaagcgcagctaccaaagaatggtctcgaggaaaagctggcagaagaactacgttccgcttcatggcctggcaagtatgactccctcatccaggatcaagctcgggagctatcatatctccgtcagaaaatccgagagggccgcggaatttgctacctgatcacacgacacgcgaaggataccgttaagtcattcgaagatctgttacgcagcaatgacattgactattatctcggacagtcgttccgggaacagttggcccagggatcacagcttacagagcggctcaccagcaaactctcaaccaaggaccacaaatcagaaaaggaccaggcaggactggagcccctggccctgaggctttcacgggaactacaggagaaggagaaagtgatagaggtgctgcaggccaagctcgatgcccgtagtttgaccccatcaagcagccatgctctgtccgattcacacagatccccctcgtcaacgtcgtttctgtctgacgagttggaggcctgcagtgacatggatatagtctctgaatacacccattacgaagagaaaaaggcctcacctagccactctgactccatccatcactccagccatagtgcagtacttagcagcaagccctcaagtacttcagcatcccaaggcgctaaggcagaatccaattccaacccgatttcactgcccacaccccaaaacacccccaaggaggccaaccaagcgcatagcggagccagcactgtaccccctgcttctacagctaccctgctgtccaatgatctggaagccgacagtagttattatctgaactcagctcagccacactcccctcctcgcggcaccatcgaactggggagaatcctcgaaccaggatacctaggctcctccggaaaatgggatgtgatgagaccccaaaagggatcagtctccggtgatttgtcttctgggagcagtgtctaccagctgaattcaaaacctaccggtgcggatctgctcgaagaacaccttggtgaaatccgaaatcttaggcagagactggaggagagcatctgtattaatgatagactgagagagcaactcgagcacaggctgacttcaacagctaggggacggggaagtacaagcaacttttatagccagggactggaaagcattccccaattgtgcaacgagaatcgggtgctgagagaggacaataggagactgcaggcccagctctcacacgtctctagggaacatagtcaggagactgaatccctgcgggaggcactgctgtcctctagaagccatctgcaggagctggagaaggagctcgaacatcaaaaggtggagaggcagcagctgttggaagatctgcgggagaaacagcaagaggtccttcactttcgagaggagaggttgagtttgcaagaaaacgattcacgtcttcagcataaactggtcctcttacaacagcaatgcgaagagaaacagcagctctttgagtctctccagagcgagctgcaaatatacgaagcactctatgggaatagcaaaaaagggctgaaggcctactcgcttgatgcctgccatcagatccccctatcaagtgatctgagtcacttggtggcagaggtgcgggcccttaggggacagctggagcagtccattcagggcaataattgtttgaggctccagctccagcaacagttagagtccggcgctggaaaagccagtctttcacccagctccatcaaccagaactttcccgccagcacggatccgggtaataagcaactcttgctgcaagactcggcagtatccccaccagttcgggacgtgggcatgaactcaccggcattggtgtttccatcaagcgctagctccacccccggatccgaaacccccatcattaaccgtgcgaacggcctcggactcgacacatcacccgtgatgaagaccccaccgaagctcgagggtgatgcgaccgacggttcgtttgccaataaacacggtaggcacgtcattggtcacattgacgactattcagccctgcgacagcaaatcgccgaggggaaactgttagtcaaaaagatcgtttcgctggttcggtctgcgtgcagcttcccaggtttagaggcacaggggaccgaggtgcttgggtcaaagggtatccacgaactgcgctcatctacatctgccctgcaccacgcactcgaggaatccgcctctctactaacaatgttctggagggcagcattaccatcaactcatatccctgtgctgcccggcaaagtgggtgaatctacggaacgggaacttcttgagttgaggacaaaggtctccaaacaggaaagactcttgcagtctaccactgagcatctcaagaatgccaaccagcagaaggaatctatggagcagttcatcgtttctcagctcacaagaacccatgacgttctgaaaaaggcccgcactaatttggaagtcaaaagtctgcgggcattgccttgcaccccagcactatag

SEQ ID NO: 128525 - DNA, 3399 bp, synthetic construct
  misc_feature 1..3399: note = Description of Artificial Sequence: Synthetic coding sequence
  source 1..3399: mol_type = other DNA
atgaaggaaatatgtaggatttgtgcacgtgaactgtgtgggaatcagcgccgctggattttccacaccgcttccaagctgaacctccaggtcttgctcagccatgttctgggaaaagatgtgcctagagacggaaaggcagaatttgcttgttcaaagtgtgcattcatgctcgacagaatctacaggtttgacactgtcattgcccgaatagaggccctgtcgattgagaggctgcagaagctgttgctcgaaaaggatcggctgaagttttgcatagcctcaatgtatagaaaaaataatgatgactctggcgcggagattaaagctggcaatgggaccgtggatatgagcgtcctgccagacgcccgctatagcgcgttgctgcaggaagactttgcatactctggctttgagtgttgggtggaaaatgaggatcaaatccaggagccacacagctgccacgggtcagaaggtcctggaaatcgacctcggagatgccggggatgtgctgccttgcgcgttgctgacagcgattatgaggccatctgcaaagttcccagaaaggtggctagatctatatcctgtggcccaagctccagatggtctactagcatctgcaccgaggaaccggctttatcagaggttggacctcctgacctggcgtcgaccaaagtccctccggatggcgagagcatggaggaagagacacccggaagcagcgtggaatcactcgacgccagcgtgcaggcatctccccctcagcaaaaagacgaagaaaccgaaagatctgccaaggagctgggaaaatgcgactgctgttccgacgatcaggctccacagcacggatgtaatcataaattagaactggcactgtcaatgataaagggcttagattacaaaccaatccagtctccccgggggagccggctgcccatccctgttaaatccagtctacccggtgcaaagcctggtcctagcatgacagatggcgtgtccagtggatttttaaaccgcagtctgaagcccctctataagaccccagtgtcctaccccctagagcttagtgatctgcaggagctttgggatgacctctgcgaggactacttgcctctaagggtgcagcctatgaccgaagaactgctgaagcagcaaaagctcaattcccacgagactactattacacaacaatccgtttcagatagccacctggctgaactccaagaaaaaatacagcagaccgaggccacaaacaaaatcctgcaggaaaaactgaacgaaatgtcctacgagctgaagtgcgcccaggaatcttcacagaaacaggacggtacaatccagaacctgaaggagacactgaagagccgagagcgcgagacagaagagctgtatcaggtgattgagggacagaatgacaccatggccaaactgagagaaatgctgcatcagtctcagttgggccagttgcactcctcggaaggcacctccccggctcaacagcaggtcgcccttctcgatctgcagagtgccctcttctgttcccagctcgagattcagaaactgcaacgcgtcgtacgccagaaggaaagacaactggctgacgcaaaacagtgtgtgcagttcgtcgaggctgccgcacacgagagcgaacaacaaaaggaggcaagctggaagcacaatcaggagctgaggaaagctctacagcagctgcaggaggaacttcagaataagagtcaacaactgcgggcttgggaagctgagaagtataacgaaataaggacccaggagcagaacatacagcacctcaatcacagtctatcccacaaggagcagctcctgcaggagttcagggaactgctccagtaccgtgacaattcagacaaaacgctagaggccaatgaaatgctgctggaaaagctcagacaaagaattcacgataaggctgtggccctggagcgggctatagacgagaagtttagtgcccttgaagaaaaagaaaaagagctgcgtcagcttaggttggctgtgcgcgagagggatcacgacctggagcggctgagagacgtcctgagtagcaacgaggcaacaatgcaaagtatggaatctttacttcgtgctaagggattagaagtcgaacagttaagtaccacatgccagaaccttcagtggttgaaggaagagatggaaaccaaattcagtcgctggcagaaagaacaagagtctatcatccagcagctacagacatcattacatgatcgtaataaagaggtcgaagacctctctgccactttgttgtgtaagctgggcccaggtcagagtgagatcgccgaggagctctgccaacggctccagcgcaaggagcgtatgttgcaggatctgctcagcgatcggaataaacaggtcctcgaacacgaaatggagatacaaggcctgctgcagagcgtgagcacaagagaacaagagagtcaggctgctgccgaaaaactggtccaagccctcatggagcggaattctgagctgcaagcgctccggcagtacctgggtgggagagatagcctgatgtcacaggctcctattagcaatcagcaggccgaggtgaccccgacaggctgtcttggaaagcagaccgatcagggaagcatgcagattcccagtcgcgacgactctacctcgctcactgccaaggaggacgtgtccattccgcgcagtaccctgggcgatcttgacaccgtggccggccttgaaaaagaactgagcaatgctaaagaggaactggagttgatggccaagaaagagcgagagtcccagatggaactgagtgcgctacagagcatgatggcagtgcaagaagaggagctgcaggttcaggcagccgacatggaatcattgacccgtaacattcaaatcaaggaggacttgatcaaggatctgcaaatgcaacttgtggatcccgaggatatacccgctatggagcgactgacccaggaggtcttactcctgcgtgaaaaggtggcctctgtcgaaagtcagggccaggagatctccggtaaccgaagacaacagctactgctgatgttagagggcttggtcgatgaacgctcacgcctcaacgaggccttgcaggctgaacgccagttgtatagttcactagtgaagtttcatgcccaccctgaaagcagcgaacgagacaggacgctccaggtagagctggagggggcccaagtgctgcgctccagactcgaagaagtcctgggtcggtcactcgaacggctgaacagactcgagacgctggctgccattggtggggctgcggcaggagatgacacagaggacactagtaccgagtttacagattcaatcgaagaggaggcggcccaccattcacaccagcagctgtag

SEQ ID NO: 128526 - DNA, 522 bp, synthetic construct
  misc_feature 1..522: note = Description of Artificial Sequence: Synthetic coding sequence
  source 1..522: mol_type = other DNA
atgtcaaacggctacaggaccttgagtcagcacctcaacgaccttaagaaggaaaacttttcgctaaagttgcgaatatatttcttggaagagagaatgcagcaaaagtatgaagcatctcgggaagacatctataagcgcaacatcgaactgaaggttgaggtggagagtctgaaaagagagcttcaggacaagaagcagcaccttgataagacctgggctgatgtggaaaatttgaattctcagaacgaggctgagctgaggaggcaattcgaggagaggcaacaagagaccgagcatgtttatgagctcctggagaacaaaattcaactgctccaagaagaatctcgcttagcaaaaaatgaggcagctaggatggcggcactggtggaagctgaaaaggagtgcaatctcgagttgtctgaaaaacttaaaggtgtgacgaagaattgggaggacgtccctggggaccaggtcaagccagaccagtacacagaggcccttgctcagagggacaagtag

SEQ ID NO: 128527 - DNA, 933 bp, synthetic construct
  misc_feature 1..933: note = Description of Artificial Sequence: Synthetic coding sequence
  source 1..933: mol_type = other DNA
atgaaagggacagactccggcagttgctgcaggagacgttgcgatttcggctgctgctgtcgtgcctccagacgtgcccattatacgccctatcgcagcggcgatgctacaaggactccacaatcccctcgtcaaactcctagtcgcgaaagaaggcgacctgagcccgcgggctcttgggccgccgcagccgaggaggaagaagccgctgccgccgccactccatggatgcgagattacttcgctgaggatgatggcgagatggttccccgtacgtctcataccgcagccttcctgagcgatacaaaggaccgcggaccacctgtgcaaagtcagatctggaggtccggtgagaaagtgccgtttgtgcagacctattcactgcgggcatttgaaaagccccctcaggtgcaaacccaagctctgcgcgacttcgaaaagcatctcaacgaccttaaaaaggaaaatttttccctcaaattgcgaatttactttctggaagaacggatgcagcagaaatacgaagcgtcaagagaggacatttacaagcgcaacatcgaactgaaggtcgaagtggagagcctcaagcgtgaacttcaggacaagaagcagcacctcgataaaacgtgggcagacgtggaaaacctgaacagtcaaaatgaagctgagctgcggcgccaatttgaggaacgacagcaggagactgagcacgtgtacgaacttctggagaacaaaatccaactgttgcaagaggagtccagactcgctaagaatgaggcagccaggatggccgccttggtggaggccgagaaggagtgcaacctagaactgagtgaaaagttaaaaggagtgaccaaaaattgggaggatgtccctggcgaccaagtgaagccagaccagtataccgaggctctggcacaacgcgataagtag

SEQ ID NO: 128528 - DNA, 2910 bp, synthetic construct
  misc_feature 1..2910: note = Description of Artificial Sequence: Synthetic coding sequence
  source 1..2910: mol_type = other DNA
atgtccaacggatacaggaccttgagccagcacctgaacgaccttaagaaggaaaacttttccctgaaactacggatttattttctggaagagcgtatgcagcagaaatacgaggccagtcgagaggatatctataagaggaacatcgagctaaaggtcgaagtggagagtctgaaacgcgagctccaagacaaaaaacagcaccttgacaagacgtgggccgacgtcgagaacttaaactcccagaacgaggcggagctacggaggcagtttgaggaacggcagcaggaaactgaacacgtgtatgaattactcgaaaacaaaattcagctgctccaggaagagagtcgacttgccaagaatgaagccgcccggatggccgcactggtcgaggccgagaaagagtgtaatctggaactgtcagagaagctcaaaggcgtgacaaagaactgggaagacgtgcctggcgaccaggttaagcccgaccagtacacagaggccttagcccaacgggataagcgtattgaggaactcaaccagagcctggctgcacaggagcggctcgttgaacagctcagtagggagaagcagcagctcttgcatctcctggaggagccgaccagtatggaagtgcagcccatgaccgaggagttactcaaacagcaaaagctgaattctcacgaaactacaatcacacagcagtctgtatccgattcacacttggccgagctgcaggagaagatccaacagaccgaggccaccaacaagatactccaggagaagcttaacgaaatgagctatgaactaaagtgcgcccaggaatccagccagaaacaggacgggacaatccagaacctgaaggagacattaaaaagcagggagagagagactgaggagctatatcaggtgattgagggccagaatgataccatggctaaacttcgcgagatgctccatcagtcgcagctcggtcaactgcactcatcagaggggacctcaccggctcaacagcaggtcgcactcttagatctgcagtcagctttattctgctcgcagttggagattcaaaagctgcaacgggtggttcggcaaaaggagagacagctggccgacgccaaacagtgtgtacagtttgtggaagccgccgctcacgagtcagaacagcagaaggaagcaagctggaaacacaaccaggagctcaggaaagccctccagcagctacaagaagagttgcagaataagtcacagcagctgcgagcttgggaagctgagaaatacaatgagatcaggacgcaggagcagaacatccagcacctcaaccattctttgtcacataaagaacaattgcttcaggagtttagggagctgcttcagtatagagacaactcggacaagactttagaggccaacgagatgctactcgagaaactgcggcaaaggatccacgacaaggccgtcgcattggaaagggcaattgatgagaaattttccgcccttgaggagaaggagaaggaactccggcaacttagactcgcggtgagagagagggatcacgatctggagagactgagggatgtgttaagctccaacgaggcaaccatgcagtcgatggagagtctgctgagagcaaaagggctggaggtggagcaattgtctacaacctgccagaatctgcagtggctgaaggaggaaatggagacaaagtttagcaggtggcagaaagaacaggaatctattattcagcagctgcagacgagcttgcacgatcgaaacaaagaagtggaagatctcagtgctaccctgctttgcaagttagggcccggacagagcgagatagcagaagagctctgccagcgattgcagaggaaggagagaatgctgcaagatctgctatctgacaggaataagcaggtgctcgaacacgagatggaaattcaagggcttttacaatccgtgtcaacaagggagcaggagtcacaggccgcagccgagaagcttgttcaggccctgatggagcgaaattccgagctccaggcacttaggcagtatttaggggggcgggattcccttatgagccaggctccaatatcaaaccagcaggccgaagtaaccccaaccggttgcctggggaaacagacagatcagggaagcatgcagatcccttccagagacgactcaacatctttgaccgctaaggaagatgttagtattccgcgaagcactcttggtgatctggacactgtggcggggttagaaaaagagctcagtaacgctaaagaggaactggagctgatggccaaaaaagagagggaaagccaaatggaattatctgcattgcagtctatgatggcagtgcaggaggaggagctccaggttcaggctgctgatatggagtccctcacccggaacatccagatcaaagaagacctaatcaaggaccttcagatgcagttggtggatcctgaggacatccccgcaatggaacggcttacacaggaagtgctgctgctgcgcgagaaagtagcctcggtggagagccagggacaggagattagcggaaatcggaggcagcaactccttctgatgcttgagggtttggtggatgagaggagcaggctcaacgaggctctgcaggcagagcgacagttatacagcagccttgtcaagttccatgctcaccccgagtcctccgagcgggatcgtacgctgcaagttgagcttgagggtgcccaggttctccgtagccggcttgaagaggtgctgggccgctccctcgaaagactcaaccgcttggagaccctcgctgccatcggaggagccgctgccggggatgatacagaagatacatctacagagtttacggactccattgaagaggaggctgcccatcattcacaccagcaactctag

SEQ ID NO: 128529 - DNA, 2967 bp, synthetic construct
  misc_feature 1..2967: note = Description of Artificial Sequence: Synthetic coding sequence
  source 1..2967: mol_type = other DNA
atgtctaacggctataggactctgtcccagcacctcaatgacctaaaaaaagagaacttctcactaaaactgaggatatacttcctggaggagaggatgcaacaaaagtacgaagcgagccgggaggacatttacaagcggaatatcgagctcaaggttgaggtggaaagcctcaagagggaattacaagataaaaagcagcatctggacaagacctgggctgacgtcgaaaacctcaattcccaaaacgaagctgagttacgtcgacaattcgaggagcgtcaacaggagacagaacacgtgtatgaactgcttgagaacaagattcagctgctgcaagaggaaagtcggctcgctaaaaatgaggccgccagaatggcggcgttggtggaagctgaaaaggaatgcaatctggagctttctgagaagctgaagggagtgactaaaaattgggaggatgtacccggcgatcaggtgaagcccgaccagtacaccgaggcacttgcccagcgcgataagcggatcgaagagctgaaccagtcactagcagcacaagaacgcttggttgaacagctttcacgagagaagcaacaactcttgcatttgctggaggaaccaaccagcatggaggtgcagcctatgacagaagagcttctcaagcaacagaagctgaatagccatgaaactacaattacacagcagtctgtgtcagattcccatcttgccgaactgcaggaaaaaatacaacagacagaggctaccaataaaattttgcaggaaaaactcaatgagatgagttacgaactgaaatgcgcacaggagagttcccagaaacaagatggcaccattcagaatcttaaggagaccctgaaaagccgggaaagggaaaccgaggagctgtaccaagtgattgaggggcagaatgatacgatggccaagcttagagaaatgctccaccagagccagttaggccagttacattcctctgagggaacatctccagcccaacagcaggtagctctccttgatctgcagagcgccctgttttgttctcagttagagatccagaaacttcagagggttgtccggcaaaaggaaagacaattggctgacgctaagcagtgtgtccaatttgtagaagcagctgctcacgagtccgaacaacagaaggaggccagttggaagcacaaccaggagctgagaaaggccctccagcagctgcaagaggaactccaaaacaaaagccagcagctgagggcatgggaggccgaaaaatacaatgagatacggacccaggagcagaacattcaacacctgaatcacagcttatcacataaggaacagctactgcaagagttccgggagctcttgcagtatagagataattccgataagactctcgaggctaacgagatgcttctggagaaactgaggcagagaatccatgataaagcagtggctttagagagagcaatcgacgagaaattttctgctctggaagagaaagagaaggaattacgacaattacggttggccgttcgcgaaagagaccatgacttagaacggttacgagatgtgctctcttctaatgaggcaactatgcagtcaatggaatctctactgagggctaaaggtctcgaggttgagcaactgtccacaacctgccagaacttgcaatggctgaaagaggaaatggagacgaagttcagtagatggcagaaagagcaagagtccattatccagcagctgcagacgtcactccatgaccgtaacaaagaggtcgaggacctctctgctacattactttgtaaactagggcctgggcagagtgaaattgcagaagagctgtgccagcgcctgcaacgaaaggagcggatgttgcaggatctcctgtctgatcgtaacaagcaagttttggagcacgaaatggaaattcagggccttctgcagagcgtctccaccagggagcaggaatctcaagctgctgctgaaaaattagttcaggctttaatggaacggaattctgagttacaggctctaagacaatatcttggcggaagagattccctgatgtctcaagcacctatctccaatcagcaggccgaagtgacaccgacggggtgtttgggcaagcagaccgaccagggctctatgcagatccccagccgcgatgactcaactagcctgacagccaaagaggacgtgtctatccctcggagtaccttgggcgaccttgacacggtggccggactggagaaggagctgagtaatgccaaagaggagctggaactgatggctaagaaagaaagggagagccagatggagttaagcgctctccagtctatgatggcggtccaggaggaggagttgcaggtccaggcagccgacatggaaagtcttacaaggaatattcagattaaggaagacctgattaaggatctgcagatgcagctggtggacccggaggacatcccagcaatggaacggctcacgcaggaggttctcctcctcagagagaaggtggcctcagtcgagagccaggggcaggagattagcggcaaccgtaggcagcagctgcttctgatgttggagggcctggttgatgaacggtcgcggctcaacgaagcacttcaggccgaaaggcagctgtactcctctttagtgaagtttcatgctcatccggaatcatccgagagggaccgtacgttgcaagtggaattggagggggctcaggtgctccggtcaagattggaggaggttctgggcagatctttagaacggctgaataggttggagacccttgccgccattggtggtgccgcggctggggacgacacagaggacacgtctacagagtttaccgattcaattgaggaggaggcagcccatcatagccaccagcaggtgagccagtgccagggtttgggcctccccggctggactgcccactctccaagtgaggtctag

SEQ ID NO: 128530 - DNA, 3396 bp, synthetic construct
  misc_feature 1..3396: note = Description of Artificial Sequence: Synthetic coding sequence
  source 1..3396: mol_type = other DNA
atgaaagaaatttgccgtatctgtgcccgcgagttatgcgggaaccagcggcgatggatcttccacaccgcctccaagctgaacttgcaggttctgttatcccacgtgctgggcaaggatgtgccgagagatgggaaagctgagtttgcttgcagcaagtgcgcctttatgctggaccgcatctaccgcttcgatacagtgatcgcccggatcgaagcgctgagcattgagcggttgcagaaattgctgttggagaaagaccgtctaaagttctgtattgcttctatgtacagaaagaacaacgatgactcaggagctgagatcaaggccggcaacggaaccgtcgacatgtccgtcctgcccgatgccaggtacagcgcactgctacaggaagatttcgcttattccggcttcgaatgctgggtggaaaacgaggatcaaatccaggagccacattcgtgccacggaagtgagggtcccgggaatcgtccacggagatgcagaggctgtgccgcactgagggtggccgattcagactacgaggccatatgcaaagtgcctagaaaagtggccagaagcatctcctgcgggcctagctctagatggtccacatctatctgcacagaggaacctgcgctatcagaagtaggtcctcccgaccttgcctctaccaaggtgcccccagatggggagagcatggaagaagagactccggggagcagcgttgagtcgttagatgcctccgtccaggcatccccgccccagcaaaaggacgaggaaacggaacgttcagctaaagaactcggcaagtgcgattgctgtagtgatgaccaggcaccacaacatgggtgcaaccacaaattagaactggccctcagtatgataaagggcctagactataagcctatacagagcccaagagggtcacgcctcccaatccctgtgaagtcatcgctgcctggcgccaaacccgggccatctatgacagatggggtgtcatcggggttccttaatcgatctttgaaacctctgtataaaacgcctgtgtcctatcccctggaactatctgatctgcaggaactctgggatgatctgtgcgaagattacctgccactgcgggttcagccaatgactgaagagcttttaaaacagcagaaactgaattctcatgagacaaccatcactcagcagtcagtcagtgactcacacctcgccgaattgcaagagaaaatccaacagaccgaagccaccaataaaattcttcaggagaagctcaatgaaatgtcttacgaacttaagtgcgctcaggaaagtagccagaaacaggatggcacgatccagaacctcaaggagaccctaaaatcccgagagagagaaaccgaggaactgtaccaggtaatagaaggacagaatgatactatggcgaagctgagagaaatgctgcatcagtcccagctgggccagctccactcttccgaaggtacatcacccgctcaacaacaggtcgcactacttgatcttcaatctgccctgttttgctcccagttggagatacagaaactgcagcgagtggtgcgccagaaggaacgacagcttgcagatgcaaaacagtgtgtgcagttcgtggaggcggcagcgcatgaatctgagcagcagaaagaggcctcttggaagcacaaccaggagctccggaaagctctacagcagcttcaggaggagctccagaataaatcccagcagcttcgtgcctgggaagctgagaaatataacgagatccgcacccaggaacagaacatccaacacctcaaccacagtttatcccacaaggagcagctgctgcaggaattcagagagttgctacagtacagggataattccgataaaacactcgaggcaaacgagatgctgctcgagaagctgcgtcagaggatccacgacaaggccgtggcactggagagagctattgatgaaaaattttcggccttggaggaaaaggagaaagagctgagacagctgcgcctggctgtccgtgaaagggatcatgatctggaacgactgagggacgtcctttccagcaatgaggctaccatgcagagcatggaatcccttcttagggcaaagggcctggaggttgagcagctcagcactacttgccaaaacctccagtggctgaaggaggaaatggaaactaagttctcacgctggcagaaggaacaggagagcattattcagcagcttcagacttcactgcacgacaggaataaggaagtcgaagatctgtccgcaaccctgctgtgcaaactcggacctgggcagtcagagatagcagaggagttgtgtcagagactccaaaggaaggagaggatgctacaagatctacttagtgaccggaataagcaagtgctagaacatgaaatggagatccagggcctgctgcagagcgtctcaactcgggagcaggaatcccaggccgccgcggagaaactggttcaggccctcatggagagaaattctgagctccaagccctgcgccagtaccttggcggcagagactccctgatgtctcaggcacctatcagcaaccaacaggctgaagtcacacccaccggatgcctgggcaagcagacagatcaaggctctatgcagattccttcccgcgatgattctacaagcctgaccgctaaggaggatgtgagcattccgcgaagtacccttggtgatttggataccgtggctggactcgaaaaggagctttcaaacgcaaaagaggaactagagctcatggccaagaaagagagagaatctcagatggagctctcagctctgcaatccatgatggccgtccaggaagaggagctgcaggtccaggctgccgacatggaatccctgaccagaaacatacaaattaaggaggacctcatcaaggacctccagatgcagttggtcgatcctgaagatatccccgctatggagaggttgacccaagaagttctcctgttgagagaaaaggtggccagcgtggagtcccagggtcaggagatttcaggaaaccgtcggcagcagttgcttctgatgctggaaggcttggtggatgagagaagtcgactgaacgaggccctacaggctgagagacaactgtattccagcctggtcaagtttcacgctcatcccgaaagctcagagcgtgatcgaacgcttcaggttgagcttgaaggtgcacaggtcctgcgcagcaggttggaggaggtcctcggccgctctctagaacgtctgaatcggttggagacattagcagccattggcggtgcggctgcaggcgacgacacagaagataccagtacagagttcaccgactctatagaggaagaagccgctcatcattcacaccagcagtag

SEQ ID NO: 128531 - DNA, 7041 bp, synthetic construct
  misc_feature 1..7041: note = Description of Artificial Sequence: Synthetic coding sequence
  source 1..7041: mol_type = other DNA
atgagcaacgggtatcgtacactgagccagcatctcaacgacttaaaaaaggagaatttcagcctcaaattacgtatctacttcctggaggagcgcatgcaacagaagtatgaggcttctcgagaggacatttataagaggaacattgaactgaaagtggaagtcgagtctcttaaaagagaactccaggacaaaaagcagcacttggataaaacttgggcagacgtggagaacttgaattctcagaacgaggctgaactgcggcgccagtttgaggagcgtcaacaggagacggagcacgtctacgaactactggaaaataaaattcaacttttgcaggaggagtcccgtctagcgaaaaacgaggctgcaaggatggccgcgctcgtggaagctgagaaggagtgcaatttagaactctctgagaagctgaagggtgttaccaagaactgggaggacgtccctggagatcaggtgaagcccgaccagtatactgaggcgctcgctcagagggacaagagaatcgaagagctcaatcagagtcttgcagctcaggaaagattggtagaacagctttctcgagaaaaacagcagctgctccatctgctggaagaacccacatctatggaggtccaacccatgactgaggaactcctcaagcagcagaaacttaattctcatgagaccaccattactcaacagtcggtctccgattctcacttagccgagcttcaggagaagattcagcagacggaagcaaccaacaagatcctacaggaaaagcttaacgaaatgtcttacgaattgaagtgtgcgcaggaatcctctcagaaacaggacggcaccatccagaacctcaaggagacactcaagtctagagaaagggaaaccgaggagctgtaccaggttatcgaaggacaaaacgacaccatggcaaaactccgcgagatgcttcaccagtcccagctgggacagttgcatagctctgagggtacctctccagcacaacaacaagtcgcgctcctggatctgcagtccgcgttgttctgctcccaactcgagattcagaaattgcagcgggttgtgcgtcagaaagagagacagctcgctgatgcaaagcaatgtgtgcagttcgtagaagctgctgcccacgagtctgagcagcagaaggaagcctcgtggaagcacaatcaggaactgaggaaggcgttacagcagctgcaggaggagctgcagaacaagagccaacagttaagggcatgggaagcggagaagtacaatgaaatcagaacccaggaacagaacattcagcatctgaaccattctttatcacataaggaacagcttctccaggaattcagggaacttttgcagtatcgggataatagtgacaaaaccctcgaagcaaacgaaatgcttctagaaaaactaagacagaggatccacgataaagcggtcgcattagagcgagctatcgacgagaagttctctgcccttgaggaaaaagagaaggaattacggcagctgagattggccgtcagggaacgggatcatgatctcgagagactcagggatgtgctcagcagcaatgaggccaccatgcagagcatggagagccttcttcgcgctaagggtcttgaagtggaacaactgtcaacaacctgtcagaatcttcagtggctcaaggaagaaatggagactaagttttctagatggcagaaagagcaggagagcatcattcagcaacttcagacttctctacatgatcgaaacaaagaggtagaggacttgagtgctacactcctttgtaaattaggtccaggccaatcagagattgccgaggagctctgtcagcggctccagcgcaaagagaggatgctgcaggacctgctgagtgatcggaataagcaagtgctggaacacgaaatggaaatccaaggccttttacaatccgtgagcacccgggaacaagaatctcaggctgccgccgaaaagctggtccaagctctgatggaacgcaatagtgagctgcaagcgctacggcagtatctggggggcagagactctctcatgagtcaggctcccatttccaatcaacaggctgaggtgacgcctacaggctgcttggggaaacagacagaccaggggagcatgcagattccttctagagatgattctacctcgctgaccgccaaagaagacgtctccatacctcggagtaccctcggagatctggacactgtcgcgggcctggaaaaagagttgtctaatgctaaggaggaactggagctgatggccaagaaggaacgggaatcccaaatggagctctcggctctccagtctatgatggccgttcaggaagaggagcttcaggttcaagctgccgacatggaatcattaacacgcaacatccagatcaaggaggatttaatcaaagatctacaaatgcagttagtcgatcctgaggatattccagctatggagcgcctgacacaagaagttttgctgcttcgtgaaaaggtggcaagcgtggaatcgcaaggccaggagattagcggtaatcgtcgccaacagttgttgttgatgctcgaggggctagtggacgaacggtcccgactcaacgaggcactgcaagccgagagacagctgtactcatcattggtgaagtttcacgcacatcccgaatcttccgagcgagatagaaccctgcaagttgagttagaaggggcccaagtcctgagatccagacttgaagaagttttgggccggtcgttggagcgtctgaatcggctggagacactggccgctatcggcggcgctgcagccggagatgacacagaagatacttccactgagtttacagattccatcgaggaggaggcggcacatcattctcatcaacagctggtcaaggttgcattggaaaaaagcctggccaccgtggagactcaaaaccctagttttagccccccttctcctatgggtggggattcgaaccgttgtctgcaggaggagatgctccatcttcgtgccgaatttcatcagcacctggaggaaaagcgtaaagctgaggaggaactgaaagagttaaaggcacagattgaggaggctggcttcagctctgtgtcacatattcggaacacaatgctttcgctctgtttagaaaatgccgaactcaaggaacagatgggagaggccatgtctgacggctgggagatcgaagaggataaagaaaaaggggaggtgatggtggaaacggtggtcaccaaggaggggctcagtgagtcgagcctacaggcagaattcaggaaactacaggggaagctcaagaatgctcacaacattataaacctgctgaaagagcaattggttctcagctcaaaggaggggaacagcaaactgacaccggaacttttggtgcatctcacatcaacaattgagcggattaacacggaactcgtcgggtcacccggcaaacatcagcatcaggaggagggtaatgtcactgtgcgccctttccctcgaccacaatctctggacttgggtgctacattcaccgtggacgcccaccagctggacaatcagtctcagccaagagaccccggccctcagtctgcctttagcttgccgggcagcactcagcaccttcgaagtcaactgtcccagtgtaaacaaaggtaccaggacctgcaagaaaaactgttgctgtcggaagctacagtgtttgctcaggctaatgaattagagaaatacagggtcatgctgaccggagagtctctggtgaaacaggactccaaacagatccaagttgatctgcaggatctgggctacgagacttgcggccggagcgaaaacgaggcggagcgtgaagagacaacctcgccagaatgtgaagaacacaacagcctcaaggaaatggtgcttatggaagggttgtgctccgagcagggccgaagggggagtacacttgcctcaagctcagaaagaaagccgttggagaatcagctcgggaaacaggaggagttcagggtctacggaaaatctgagaatattctagttctgaggaaggacattaaggacttgaaagctcagctccagaacgccaataaggtcattcagaacttgaagagtagggtacgctctctttctgtgacttctgattacagctctagccttgaacgcccctggaagctgcgcgccgtgggcacactagaaggaagctctcctcacagcgtcccagatgaggatgaaggatggctgtccgacgggaccggggctttctattctccaggcctgcaagcaaagaaagatttagaatctcttatccagcgagtttctcagctggaggcccagctgcccaagaatggtctagaagaaaaattggccgaggaactacgtagtgcatcatggcctgggaagtatgattccctgattcaggatcaggctcgcgagctgagctacttgagacagaagataagagaagggagaggcatctgttacttgatcacacggcacgcaaaggacaccgttaagtcatttgaggacctcttgcgctccaacgacatagactactaccttggtcaatcctttcgagagcagctggcccagggtagtcagttaacagagaggttgacctccaagctgagcacaaaggatcacaaatcggagaaggatcaggcaggtctagaaccacttgccctaaggttatcccgggagttgcaggaaaaagagaaagttatagaggtccttcaggcaaaacttgacgctagatcactgacacctagcagctcccatgctctaagcgacagtcacaggtccccaagttcgacgagctttctcagcgacgaacttgaggcctgttccgacatggacattgtgtccgagtatacccactacgaggagaagaaggctagtccgtcgcactcggattcgattcaccatagctcacacagtgctgtgctgtcttctaagccaagctcgacttctgctagccagggagctaaggcagagtctaactccaaccctatctctcttccgaccccgcagaataccccaaaggaggccaatcaggcacactccggtttccacttccattccattcccaagctggccagtctgccccaggcccctctgccttcggcccccagctccttcttgcctttcagcccaacaggtccacttctccttggatgctgcgaaacacccgttgtttcactcgccgaggcccagcaggagctccagatgttgcaaaagcaactgggggagtcagcctccacagtgccacccgcgtctacagcaacgctcctctctaatgatctggaggcagacagttcttattacttgaattcagctcaacctcacagtcccccaaggggcacaatcgagcttgggcgcatcctggaaccaggttacctgggaagctcgggaaagtgggatgtgatgcgcccacagaagggctccgtgtctggcgacttgtcatccggctcctccgtgtaccaactaaactccaagcctacaggagccgatctgctagaggaacacttgggagagattcgtaacctcaggcagcggctggaagaatctatatgcatcaatgatcgcctgcgcgagcagctcgaacaccggttaacctcaacagcaaggggtagggggtccacatctaatttctatagccagggactggagagtattccccagctctgcaatgagaatcgagtcctgcgagaggataatcgacgactgcaagcacagttgtcacatgtcagcagagaacactcacaagagactgagtcattgcgcgaagctctacttagctctaggtcgcacttgcaggaactcgagaaagaactggaacaccagaaggtcgagagacaacagctcctcgaagacctgcgggaaaagcagcaggaggtgctccacttccgagaggagaggctcagcctacaggaaaacgactccaggctgcagcacaaactggtactgctacaacagcagtgtgaagagaagcagcagctgttcgagtctctgcagagcgagctgcagatctatgaggccctctatggtaattctaaaaagggtttaaaggcatacagcctggacgcctgccaccagatccccctgagcagtgatctgtcacacctagtggccgaggtacgagccttgagagggcagctggagcaatccattcagggcaataactgccttaggctccaacttcagcagcagttggagtccggcgccggcaaggctagtttaagtccttcgtccatcaaccagaactttcctgcatctactgatccggggaacaaacaattattgctgcaggatagcgccgtgtccccaccggtcagagacgtgggcatgaactccccggccctcgtgttcccgagtagtgcctcctctacgcctggaagcgagactcccattattaacagggcaaacggacttggactggacacatcaccggtcatgaaaacgccaccaaagctagaaggcgatgccacggacggctcttttgcaaataagcacgggagacatgtaattggtcacatagatgattattccgcattaagacagcaaatcgcagaggggaagcttctggtgaagaagatcgtgagcctggttagaagtgcttgctccttccccggtttggaagctcaaggaacggaggttttaggtagcaagggaattcacgagctgagatcgtcaacatctgcgctgcatcacgcactcgaggagtcagcgtcccttctcactatgttctggcgagccgcattacctagcacccatatcccagtactcccagggaaagtaggggagagcacagagcgggaattgcttgaactaaggactaaggtgtcgaagcaggagagactcctacagtccacgaccgagcacctcaaaaatgccaaccagcagaaagagtctatggagcagtttatagtgtctcaactgaccagaacccacgatgtcctcaaaaaggcaaggacaaacttggaagtaaagagtctccgcgctttaccttgcactccagccttgtag

SEQ ID NO: 128532 - DNA, 7089 bp, synthetic construct
  misc_feature 1..7089: note = Description of Artificial Sequence: Synthetic coding sequence
  source 1..7089: mol_type = other DNA
atgtccaacggataccggaccctctcccagcacctgaatgatctgaaaaaggaaaactttagtctcaaacttagaatatacttcctcgaagaaaggatgcagcagaaatacgaggcctccagagaagacatttataagcggaatatcgagctcaaagtggaggtggagagtctgaaacgtgaactgcaggacaaaaagcaacatctcgacaaaacatgggctgatgtcgagaatttaaactcccagaacgaggcggaactgcggcggcaattcgaagaacgccagcaggagaccgaacatgtctatgagttactggaaaataaaatccagctgcttcaggaagaatctagacttgctaagaatgaagccgctagaatggccgccttggtcgaggccgagaaggaatgtaacttggaactgagtgagaagttgaaaggcgtcactaagaactgggaggacgtgcccggtgaccaggtaaagccggatcagtacacagaagcactcgctcagcgggataaacggatcgaggagcttaaccagtcattggcagcccaggagcgtctagtcgagcaactatcaagagagaaacagcagttacttcatcttcttgaagagcccacatcgatggaagtccagccgatgacagaagagttgctgaagcagcaaaagttgaattcacacgagactaccataactcagcagagcgtctccgattcccacctggccgaattacaagagaagatccagcagactgaggccaccaataagatactccaggaaaagctgaatgagatgtcttatgagctgaagtgtgcacaggaatcttcacagaaacaggacggaacgatacagaatctgaaagaaaccctcaagtccagagagagagagacagaggagctctaccaagtgattgagggccagaacgacacaatggcgaagctgagggagatgctgcatcagtctcagctggggcagctgcatagctcagagggaacgtcccccgcccagcagcaggttgccttgctcgacttgcaatccgctttattctgttcccaactggagatccagaagcttcagcgagtggtgcgccaaaaggagaggcaactggccgacgcaaaacagtgtgtgcagtttgttgaggcagccgcccacgaatctgagcaacagaaggaggcatcctggaagcacaaccaagaactacgcaaggctctccagcagctgcaggaagagctgcagaataaatcccaacagctcagagcctgggaagccgagaagtacaatgagataaggacccaagagcagaacatccagcacctgaatcattccctctctcacaaagagcaactgctccaagaatttcgcgagttgcttcaataccgtgacaatagtgacaagactcttgaggccaatgaaatgctgcttgaaaaactgagacagagaatacatgacaaagccgtggcgctcgagcgggctattgacgaaaagtttagcgcattggaggagaaggagaaggaactgagacagctgcggctggcagtgcgtgagcgcgaccatgacctggagagactcagggacgttttgagctctaacgaagctaccatgcagagtatggaatccctcctccgggctaagggattggaagtggagcagctgtccaccacatgccaaaatctgcagtggttgaaggaggagatggagaccaagtttagccggtggcaaaaagaacaggagtccataatccagcaacttcagacaagcctccacgatagaaataaagaggttgaggacctttccgctactctgttatgtaaactggggcccggacagtctgaaatcgccgaggagctgtgtcagcgacttcaacggaaagaacgaatgctacaagatctgctgagtgaccggaataaacaggtgctggagcacgaaatggagatccaaggtctcctgcagtctgtctccactagggaacaagaatcccaggcggcggctgagaagctcgttcaggctctgatggaaaggaattccgagctgcaagcccttagacagtacttggggggccgcgacagcctaatgtcccaggcccccattagcaaccaacaggccgaggtaaccccaacgggttgcctcggcaagcaaaccgaccagggctctatgcagattccctctagggacgacagcacatccttaacagctaaagaggatgtatcaattcctagaagtaccctgggagatctagacaccgtcgccgggctggaaaaggaattgtccaatgcaaaggaggagctggagcttatggctaagaaggaaagagaatcccaaatggagctgtcagcccttcagagcatgatggctgtccaggaagaagagttacaagtgcaggcagcagacatggaatcgctgacccgaaacatacaaattaaagaagacctgatcaaggacctacagatgcagctggtggaccctgaggacatccccgccatggagcgactgacgcaggaggtgctgctacttagagagaaggttgcatccgtggaaagccaggggcaagaaatcagcggaaacaggaggcagcagcttcttctgatgcttgagggtctggtcgacgagcgctcccggttaaacgaagcactccaggcagagcgccagctttactcctcacttgtgaagtttcatgcccatcctgaatcctcagagcgggatcgtacgctgcaggtggagcttgagggggcacaggtcctgcggagtcgtctcgaggaggtgttgggtaggtctctcgaacggctcaaccggctggaaactctggctgccatcgggggtgcagcagctggtgacgacaccgaggatacctctactgagtttaccgatagcatcgaggaagaagctgctcaccattcgcaccagcagcttgtgaaagttgcactggagaaaagtctagctacggttgagacgcagaacccttcttttagccctcccagccccatgggcggcgacagtaatcgttgtcttcaagaagagatgctgcacttgcgcgccgagtttcatcagcacctcgaagagaagagaaaagccgaggaggagctcaaggaacttaaggcccagatcgaagaggctggcttctcaagtgtatctcatatcagaaatacaatgctgtcactgtgtttagaaaatgccgagctgaaggagcagatgggggaggccatgagcgatggatgggagatagaagaggataaggagaagggggaggtgatggtggagaccgttgtgacgaaggaaggtctctcagagtcctccctgcaggccgagttccggaagctccagggcaagctcaagaacgcccacaatatcatcaacttgctgaaagaacagctggtgctaagtagcaaggaaggaaattccaagctcactcctgaattgctggtgcacctcactagtactatagaacgaatcaacaccgaactggtgggatcccctggtaaacatcagcatcaggaagaggggaatgtgacagtgcgaccctttccccgtccacaaagtttggacctcggcgccacattcacagtggatgctcaccaactggacaaccagtcccagccaagggaccccggtcctcaatccgcatttagcttgccaggaagcacacagcacctacgatcgcagctgagtcagtgtaagcagcggtaccaagatcttcaggaaaagttgttattgtctgaagcgactgtttttgctcaggccaatgaactcgaaaaatatagggtaatgttaacaggcgagagtctcgtaaaacaggattcaaagcagattcaagtggacctgcaagacctcggttatgaaacatgcgggaggtctgagaacgaggctgagagggaagaaaccacttcaccagagtgtgaagaacataatagtttgaaggaaatggtactcatggagggactctgttctgagcaaggtcggcggggttccacactcgccagtagtagtgagaggaagcccctcgagaaccaactgggcaaacaggaagagtttcgagtgtatgggaaatcagaaaacattctggtcctccggaaggacattaaggacctgaaagcccagcttcagaacgctaacaaggtcatccagaatttaaagtcccgagtgcggtcactgagtgtgacaagcgattactcttcatctctagaaaggccgtggaagctgcgagccgtggggactctcgagggtagttccccacattctgtccctgacgaggatgagggatggctgagcgatggcaccggagcattctactcacccggcttgcaggctaagaaagacctggaatccctgattcaacgcgtgagtcaactggaggctcagttgcccaaaaatggattagaggaaaagctcgctgaggagttgcgctccgcctcatggccagggaagtacgacagcctcatacaggatcaggcccgagagttgagctacctccgacaaaagatccgggaaggtagaggcatttgttacctaataaccaggcacgctaaagataccgtcaaatctttcgaagatctcctgaggtctaatgacatcgactactaccttggacagagcttccgggaacagttagcgcagggatcccaactcactgaaagacttacttctaaattatccacgaaagaccataagtctgaaaaggatcaggctgggctggagcctctggcactgagacttagcagagagttgcaagaaaaagagaaggtcattgaagtgctccaggccaagcttgatgccaggagcttaacacctagcagtagtcatgccctttccgactctcaccgaagtcctagtagtacttcatttttaagcgatgagctcgaagcatgttccgatatggacatcgtaagtgagtatactcactacgaagaaaagaaggcatctccgtctcactcagatagtattcatcatagcagtcattctgcagttcttagttcgaagcccagctctacctctgcctcacagggggcaaaggctgaatccaatagcaatccaatctcccttccaactccacaaaatacccctaaagaagcaaaccaagcacactcggggtttcacttccatagcatcccaaagctggcaagtctcccccaagccccacttccaagtgcgccttccagcttcctaccatttagcccaactggacctttgctgctcggctgttgtgaaacccccgttgtgtctctggcagaagcacagcaggagctgcaaatgctgcaaaagcaactcggggaaagcgcatctaccgtgccaccggcttctaccgctaccttattgtctaacgacttggaggccgactcttcatactacttgaattcggcgcagccacatagtccgcctaggggaactatcgaattgggtcggatacttgaacctggctatttaggaagcagtgggaaatgggacgtgatgcggcctcagaagggaagtgtgtccggtgatctgtcatcaggttcgtccgtataccaattgaattcaaagccaacgggtgccgacctgctggaagaacacctgggagagatccggaacttgcgccagcgccttgaagaatccatatgcatcaacgatcggctgcgcgaacagctagagcatcgactaacatctaccgcccgcggcagaggtagcacctccaacttttactcccagggattggagtcaatcccccagttgtgtaatgagaatcgcgtgctccgggaggacaaccggcgcctgcaggcacagctctctcacgtgagccgcgaacattctcaggaaactgaatctcttcgcgaagctttgctgtcatccaggagtcatttacaggaattagaaaaggaactcgaacaccaaaaagttgaaaggcagcagttgttggaggacctccgcgagaaacaacaggaggtccttcattttagggaggaacgcctaagcctgcaagagaatgattctcgtcttcagcacaaacttgtgcttttgcagcagcagtgcgaggaaaagcagcaattgttcgaaagtcttcagagcgaactccagatctacgaggctctgtatggcaatagcaagaaaggcttaaaggcatacagccttgatgcctgtcaccaaatccctttatcttcagatctctcacacctcgtcgcggaggtccgggccctacgaggacaactggaacagtcaatccagggcaataattgtcttcgcctgcaacttcaacagcagctggaatccggcgccggaaaagcctctctgtccccctcatccattaaccagaatttcccagcttcaaccgacccaggaaacaaacagctcctgctgcaggactctgcagtctccccccctgtcagggacgttggaatgaattctcctgcactcgtgtttccctcttctgcatcatccacccccggcagcgagacgcccattattaatcgcgctaacggactcggccttgatacatctcccgtgatgaagacacctcctaagctggagggtgatgccaccgatggatctttcgctaataagcatgggagacacgtgattggacacatcgacgactactcagccctgcgacaacagattgcggaggggaagctcttagtcaagaaaatagttagcctggttcgctcagcctgctctttcccgggactggaagcacagggcaccgaagtactgggatctaagggcatccacgaactgaggagttcaactagcgccctgcaccacgcccttgaggaatccgcgagcctgctgacaatgttctggcgagccgccttaccaagtacacacatccccgtgctgcccggcaaggtgggtgagtctaccgagcgggagctgttagagttgaggaccaaggtgtcaaagcaggagagactgcttcagtcgacgaccgagcatctgaagaacgccaaccagcagaaagaatcaatggaacagttcattgtgtctcagctcacccggacccatgatgtgctgaagaaagcacggactaatctggaagaaccctgtaagaagcgcagccaccagaaaagcttgaaacagcaagagagatgggcctgccccccatttgtgcagctgcctatatgttag

SEQ ID NO: 128533 - DNA, 1557 bp, synthetic construct
  misc_feature 1..1557: note = Description of Artificial Sequence: Synthetic coding sequence
  source 1..1557: mol_type = other DNA
atgccggaggctaactatcttttgtcagtgagctggggttacatcaaatttaaaaggatgctcaaccgtgagctcacacatctcagcgagatgtcccgctcgggcaatcaggtgtccgagtttatcagcaacacatttctcgacaaacaacacgaggtcgaaatacccagtcccactcagaaggagaaggagaagaaaaaacgcccaatgtcccagatttccggagtgaaaaaacttatgcactcctcttccttgacaaattcctccataccacggttcggcgtcaagactgaacaggaggatgtgttggcaaaggaactggaagacgttaataagtggggattacacgtgtttaggatcgccgaactgtcaggaaacagaccactgacagtgatcatgcacaccatcttccaggaaagggatctgctgaagacctttaagatccccgtcgacactctgataacatacctcatgacattggaagaccactatcacgccgatgtggcctaccataacaacatccatgctgctgatgtggttcagtcaacacatgtgctgctgtctactccagctctcgaagctgtgtttacggatttggaaatcttggccgccatttttgcaagtgctatacatgacgtggaccacccgggagtgtcaaatcaattcttgattaacacaaactccgagctggcgcttatgtataatgattcgagtgtgctggagaaccatcatctagctgtcggctttaagctgttgcaggaggaaaactgtgacatctttcagaacttgacaaagaagcagagacagtccctgaggaagatggtcattgatattgtcctcgccaccgacatgagtaaacacatgaatctgttagcagatttaaaaaccatggtggagaccaagaaagttacgtcttccggagttttactgctggataattattccgacaggatacaagtgctgcaaaacatggtgcactgcgccgatttgtctaatccaacgaagccactgcaactctatcggcagtggaccgatagaattatggaggaattcttccggcagggggatagggagcgcgagcgaggcatggaaatctctccaatgtgtgacaaacataacgcatctgtggagaagagtcaggtagggttcatcgattacattgtgcaccccttgtgggagacctgggccgacttggtacaccccgacgcccaggatattttagataccctagaggataatcgcgaatggtaccaaagcacaattccacaatccccttctcccgctcccgatgacccggaggaagggcgtcaaggtcagaccgagaagttccagttcgaactaactctagaagaagatggtgagagcgacaccgaaaaggattcaggatctcaggtcgaggaagacacgtcctgctccgattccaagactctgtgcactcaggatagtgagtctacagagattcccctcgatgagcaagtagaagaagaggcggtgggcgaggaggaggagtcacagcctgaggcctgcgttatcgatgacagatctccagatacatag

SEQ ID NO: 128534 - DNA, 2430 bp, synthetic construct
  misc_feature 1..2430: note = Description of Artificial Sequence: Synthetic coding sequence
  source 1..2430: mol_type = other DNA
atggaggctgagggaagctcggcacccgcgagggcaggctccggcgaaggctcggactcagcagggggtgccacacttaaggcacctaaacatctgtggagacacgaacagcaccaccaataccccctgcggcagccccagttccggttgttgcatcctcaccaccatcttccgcctccgccccctccttcccctcagccacagcctcagtgtccgctgcaaccccctccgcctcctcccttaccgcctcctcctcccccaccaggagcagccaggggccgatacgcaagctccggtgcaacagggcgtgtgcgccatcggggatattctgacactgagaggtatctgtactgtcgagccatggatagaacaagctacgccgtggagacgggtcatagacctggcctcaaaaaatctcgcatgtcctggccttcctccttccagggactgcgaaggttcgacgtggataacggtacatctgctggcaggtctccactcgacccgatgacgtctcctggaagcggccttatcttacaggcaaacttcgttcactcacaacggcgcgagagcttcctttaccgctctgattcagactatgacctcagtcccaagtctatgagccgtaactcctcaatcgcaagcgatatccacggcgatgacctaattgtgaccccatttgcccaagtgttggcatctctgcggacagtccggaataacttcgccgccctcactaacttgcaggacagggccccgagcaaacggagccccatgtgtaatcaaccatcgatcaacaaggctaccatcacggaagaagcctatcagaaactggcctcagaaaccctggaggaattggactggtgtttagaccagctggagacacttcaaaccaggcacagcgtctcagagatggcttcaaacaaatttaaaaggatgctaaatcgtgaactgacccatctttctgaaatgtccagatctggcaatcaagtttctgaatttatctcaaacactttccttgacaagcaacacgaagtagaaattcccagtcccacacagaaggagaaggagaagaagaagcgcccgatgagccagatctctggggttaaaaagctgatgcacagcagttcactaaccaatagcagcataccccgctttggtgtgaagaccgagcaggaggatgtgctggccaaggagctggaagatgtgaacaagtgggggcttcacgtgttcagaattgccgaattgtcagggaaccgaccacttacagttatcatgcacaccatctttcaggagcgcgacttgctcaaaacattcaagattcctgtcgacactctgatcacttatctaatgactctcgaagaccattaccacgcagatgtggcctaccacaataatattcatgctgccgacgtagtccagtccacccacgtgctgctctcgaccccagccctcgaagcagtcttcaccgatttagagattttagcagcaatttttgcgtctgctatccatgatgtggatcatccgggtgtcagtaaccagttccttattaacaccaattctgagttggcgctgatgtataacgactcatcagtgctggagaaccatcacctcgccgtcggctttaagctgctccaggaggagaattgtgacatctttcagaacctcaccaagaagcagagacagtccctccgcaagatggttatcgacatagtgctagccactgacatgagcaagcatatgaatctcctggcagacctaaagacaatggtggagaccaagaaggttacgtcctctggagtcctgctcctcgataattactccgatcgcatccaggtgctgcagaacatggtgcattgcgcagacctcagcaaccccaccaaaccactacagctgtacaggcagtggaccgatagaatcatggaagagttcttccgacagggagatagagaaagggaacgaggcatggagatatccccgatgtgtgacaaacataacgcttccgtcgaaaaatcccaggtgggatttatcgattacatcgtccaccccctgtgggaaacttgggccgatctggttcacccagacgctcaggatatcctggatacccttgaggataatagggaatggtaccagtcaacaattccacaaagccccagtccagcccctgacgacccagaagaggggcgccagggccaaacagaaaaattccagttcgaattaactctcgaggaggatggggagtccgacacagaaaaagacagcggctcccaggttgaggaagacacatcttgctccgattcaaaaaccctgtgtacccaggatagcgagagtacagagatcccactggatgagcaagttgaagaagaggcagttggcgaggaggaggagtcgcaacccgaagcatgtgtgatcgacgatcgatcacctgatacctag

SEQ ID NO: 128535 - DNA, 2037 bp, synthetic construct
  misc_feature 1..2037: note = Description of Artificial Sequence: Synthetic coding sequence
  source 1..2037: mol_type = other DNA
atgttcatctactccttcaacaagttctttttcaaaacaacacattgctgggccataatatcctttgatgtcgacaacggcaccagcgcgggtaggtcacctctggatccaatgaccagccccggctctggactaatcctccaggcaaacttcgtgcattcacaacgtagagagtctttcctttaccggagcgacagcgattatgatctctcccctaagagcatgagccgtaattcctccatagcctcagatatacacggggacgatctgatcgtcacacccttcgcacaagtcttggcgtccctgcggactgtccgcaataactttgcggcgctaacaaatctgcaagacagagcaccttctaaacgatccccaatgtgtaatcagccttcaatcaacaaggccaccattactgaagaggcctatcagaaactcgccagtgaaactttggaggaacttgattggtgcctcgatcagctagagacactgcagaccagacatagcgtttctgagatggccagcaataaattcaagagaatgctgaatcgagaactgacacacctgtcagagatgagccggagcgggaaccaagtttccgaatttattagtaataccttcctcgataagcaacacgaggtcgagattccctcccctacccagaaggagaaagagaaaaaaaaacgccctatgtcccagatttcaggagtgaagaaactgatgcactccagtagcctgaccaacagctcaattccgcgtttcggggtgaaaacagagcaggaagacgtattggctaaggaactggaggacgttaacaagtgggggctccatgtgtttcgcattgccgagctgagcggaaacagaccccttaccgtaattatgcacacaattttccaagagcgagacctactcaagaccttcaaaatacccgttgacaccctgattacgtaccttatgacactggaagaccactaccacgccgacgtcgcataccacaataacattcatgcagccgacgtggtccagtctacgcacgtcctgctgtccacccccgcactggaggctgtgttcacagacttggagattttggctgccatcttcgcaagtgctattcatgatgtcgatcatccaggcgtgtccaatcagtttctcatcaacactaactctgagctcgcactaatgtacaacgatagctcagtcctggaaaatcaccatcttgccgtgggattcaaactcctgcaggaggaaaattgcgacatattccagaatcttactaaaaaacaacggcagtccttaagaaagatggtcatcgacattgtgctggccaccgacatgagtaagcatatgaacctgctggccgaccttaagactatggtagaaaccaaaaaggtgacctcaagtggtgtgctccttctggacaattatagcgatcggatccaggtgctgcagaatatggtgcattgtgcagacctgtctaatccgacaaagccattacagctctacaggcaatggacggaccgcattatggaggagtttttccgtcaaggagatcgggaacgagaaagggggatggaaatctcaccaatgtgcgacaaacacaatgcctcagtggaaaagtcccaagtcggtttcatagactacattgtgcacccgctctgggaaacctgggcggacttagtccaccccgacgcccaggacatcttggacacgctcgaggataatcgtgaatggtatcagtccactatcccacaaagtccatctcctgcaccggacgatcctgaagaagggcggcaaggacagaccgaaaagttccagtttgaattgacccttgaagaagatggcgagagcgacaccgagaaagattctgggtctcaggtggaggaggacacttcatgctctgactccaagacgctctgcacacaggatagcgaatctaccgaaatccctttagacgagcaagtcgaggaagaagctgtgggcgaggaggaggaatcgcagcctgaggcatgcgtcatcgatgataggagtcctgatacctag

SEQ ID NO: 128536 - DNA, 1524 bp, synthetic construct
  misc_feature 1..1524: note = Description of Artificial Sequence: Synthetic coding sequence
  source 1..1524: mol_type = other DNA
atggcttctaacaagtttaaaagaatgcttaaccgagaactcacccacctgagcgagatgtcacgcagtggtaaccaggtgtctgaattcatctctaatacctttctggataagcaacatgaggtggaaatccctagtccgactcagaaggagaaagaaaaaaagaaaagacccatgtctcagattagcggcgtgaagaaactaatgcactcgtctagcctgaccaactcgagtattccccggtttggagtgaagactgagcaagaggatgtcctggcgaaagagctggaagatgtgaacaagtggggtctgcacgtgtttaggatcgctgagctgtctggaaaccggccattaaccgtgatcatgcacacaatttttcaggaaagagatctcttaaaaacatttaagatacccgtcgacacattaatcacctacctgatgacactggaagaccactaccacgccgacgtcgcctatcataataacattcatgctgctgacgtggtccagagtacacatgtactgttgtcgactcctgcgttggaagcggtgtttaccgacttggaaatcctggctgccatcttcgcgtcagctatacacgatgtggatcatcctggagtatccaaccaattcctgataaatacaaactcagaactggctctaatgtataacgattctagcgttctggagaaccatcaccttgctgtggggttcaagctcctgcaggaggagaactgtgacatcttccaaaatctgacgaagaagcagagacagagtctaagaaaaatggtgattgacatcgtccttgcgactgacatgtcaaaacatatgaacctcctggctgacttgaaaacaatggtggaaaccaaaaaggtgacgtcgagcggcgtgttgttactggacaactacagtgatcgcatccaagtgctgcaaaatatggttcactgtgctgacctctcgaaccccaccaagcctttacaactatatcgccagtggaccgaccggattatggaggaatttttccgtcagggagacagggaaagagagaggggcatggaaattagccctatgtgcgacaagcataatgccagtgttgagaagagccaggtcggcttcattgattacattgtgcatccactgtgggagacatgggctgatctggtccaccctgatgcccaagacatactggatacactcgaggataacagggagtggtaccagtccactattccacagtctcccagccctgctcccgacgatcccgaagagggtagacagggacagacggagaaattccaatttgaactgactttggaagaggatggtgagagcgacacagaaaaagatagcgggtctcaggtcgaggaagataccagctgctccgactccaagaccttgtgcacccaggactcggagtcaaccgaaatcccgctggacgaacaggtggaagaggaggctgtcggagaagaagaagagagccagcccgaagcttgtgtcatcgacgatagatcaccagatacttag

SEQ ID NO: 128537 - DNA, 2022 bp, synthetic construct
  misc_feature 1..2022: note = Description of Artificial Sequence: Synthetic coding sequence
  source 1..2022: mol_type = other DNA
atgatgcatgtgaataactttccctttcggagacacagctggatttgcttcgatgttgacaatgggacctctgctgggaggagtcccctcgatcctatgacctcccccggatctggcctgattctacaggccaacttcgtccacagccaacgccgcgaaagcttcctctaccgcagtgatagcgattacgatctgagtcctaaatcaatgagcaggaactcatcaatcgcttctgacattcacggtgacgacctcattgtgacgccatttgcgcaggtgctagcttcactacggactgtgaggaataatttcgctgccctcacgaacctgcaggacagggcaccgtcgaaaagaagccccatgtgcaaccaaccaagtattaacaaggccaccatcactgaggaggcctatcaaaaattagcatccgagactcttgaggagctggactggtgtctggaccagttggagacactccagacccgtcactcagtgagcgagatggccagcaacaagtttaagagaatgttgaacagagagttgacgcatttgagcgagatgtctcgctcagggaaccaggtgagcgaattcataagcaacacattcctagacaaacagcacgaagtcgaaattcctagtcctacccagaaggagaaggagaagaaaaagagaccaatgagccagatatctggtgtcaagaagctgatgcactcaagcagcctgactaatagctctattcccaggtttggagtcaagactgagcaggaagatgttttggctaaggagctggaggatgttaataaatggggacttcacgtatttcggatcgcggagctgtccgggaatcggccactgacggtcattatgcacaccatttttcaggagcgtgatctgttgaagacattcaagatccccgtggacacacttatcacgtatctcatgacattagaggatcactaccatgccgatgtagcttatcacaacaacattcacgccgcagacgtcgtccagagcacacacgtactgctctctactcctgccttggaggccgtgttcacagacctcgaaatactggctgcgatatttgcatccgcaatccatgatgttgatcacccgggtgtcagcaatcagttcctcattaacaccaatagcgagctggctctgatgtataatgatagttccgtcttagaaaatcatcacttggctgttggcttcaagctattacaagaagagaactgtgatatctttcagaatcttactaaaaaacaacggcagagcctgagaaagatggtgatcgacatcgtgctggcaacagacatgagcaagcacatgaatctccttgccgatctaaagaccatggtagaaaccaaaaaggtcacctccagcggcgtgctgcttttagataattattccgaccggattcaggtgctgcagaacatggtacattgcgctgacctaagtaatcccacaaagccgcttcagctatatcgtcaatggacagaccggattatggaggagttttttaggcagggagaccgcgagagagagaggggaatggaaattagccctatgtgtgacaagcataacgccagcgttgagaagagccaggtcggcttcatcgactacattgtgcacccactctgggagacctgggccgatctggtgcatcctgatgctcaggatattctggacaccctggaagacaacagagaatggtaccaaagtactattccacaaagtccgtctcctgctcctgatgacccggaagaaggcagacaggggcagactgagaaatttcagttcgagctgactttagaagaggatggcgagtccgatactgaaaaggactccggcagccaggttgaggaagacactagttgcagcgatagtaaaacactctgcactcaggatagcgagtccacagagatccccctcgatgagcaagtagaggaggaggccgtaggcgaggaagaagagtcccagcctgaggcatgtgtgatcgatgatagatccccagatacgtag

SEQ ID NO: 128538 - DNA, 2064 bp, synthetic construct
  misc_feature 1..2064: note = Description of Artificial Sequence: Synthetic coding sequence
  source 1..2064: mol_type = other DNA
atggcgttcgtatgggatcccttaggcgcaactgtgcctgggccatctactcgggccaaaagcagactgcggttttctaaaagctactcttttgatgttgacaatgggactagcgccggcaggagtccccttgaccccatgacttccccagggagcggactgatccttcaagctaattttgtccactcccagaggcgcgagtcctttttgtaccggtcagatagtgattatgacttatcccccaaatctatgtctagaaactccagcatcgccagcgacatccatggagacgacttgatcgttactccctttgctcaggtcctcgcctccctacgcaccgtacggaacaacttcgccgcattgaccaacctgcaggacagagcgccgtcgaagcggtctccaatgtgcaatcagcctagtattaataaagcgaccatcacagaggaggcgtatcagaagctagcgtccgaaacactagaagagctggattggtgtctcgatcagctagagacactgcaaacccgacactcagtttccgagatggcctctaacaagttcaagagaatgctgaacagggagctgacccatctgagcgaaatgtcaagatcggggaaccaggtttctgagttcatttcaaatacattcctcgataagcagcatgaagtggaaataccctcaccaacacagaaagagaaagaaaaaaagaagaggcccatgtctcaaatcagcggtgtcaaaaagctcatgcacagctcttctcttaccaactcctcaatcccacgcttcggtgtcaaaaccgagcaggaggatgtcctggctaaggaactggaggacgtgaataagtgggggttgcacgtgtttcgcattgctgagctgagcggtaaccgccctctgaccgtcattatgcacacgatctttcaagagcgcgatcttctcaaaactttcaagattcctgtggacactctgatcacctatcttatgacactcgaggaccactaccatgcggatgtcgcttaccacaataacatacacgccgctgacgtggtacagagtacccatgtgctgctgtctacgcccgcgctggaggctgtgtttactgacctagaaatcttggccgccatctttgcttccgccatccatgatgtggatcaccccggcgtgagtaatcagttcctgatcaatactaacagcgagctagctctgatgtacaacgatagttcggtactcgaaaaccatcacctagccgtgggcttcaaactcctgcaggaagaaaactgtgacatcttccagaatttgactaaaaagcagcgccagagtctgcggaagatggtgatcgacatcgtacttgccacagatatgtccaaacacatgaacctcctggccgacttgaagaccatggtagaaacaaagaaggtgaccagtagcggcgtgcttttgctggacaattatagtgataggatccaggtcctccagaatatggtgcattgcgctgacttgtccaacccaacaaagccacttcaactgtaccgccaatggacagataggatcatggaagagttcttcagacagggagacagggaacgcgaaaggggaatggagatttctcctatgtgcgacaagcataatgcctcagtcgagaagagccaggtcggctttatcgactacatcgtccaccctctatgggagacttgggctgacctcgtgcaccccgacgctcaggacattttggataccctcgaggataacagagaatggtaccagtctacgataccccagagtccatcccctgctcctgatgaccccgaggagggacggcaagggcaaactgagaagttccagttcgagctgacgctggaggaggatggggagtccgacacagagaaagattccggctctcaggtcgaggaggatacttcatgctcagactctaaaactctgtgcactcaggattcagaaagtactgagatccctttagatgaacaggtggaggaggaggccgtcggagaggaggaggaaagccagccagaggcttgcgtgatagacgatcggtcccccgatacatag

SEQ ID NO: 128539 - DNA, 2247 bp, synthetic construct
  misc_feature 1..2247: note = Description of Artificial Sequence: Synthetic coding sequence
  source 1..2247: mol_type = other DNA
atgaaacgcaacacttgcgatctactctcccggtctaaatccgcctcggaagagactcttcatagcagcaatgaggaggaggaccctttccgcggcatggagccctatttagtacggcgcctcagttgccgcaatatccagttgcctcccttagccttccgtcagttagagcaagcggatctgaagtcagaatctgaaaacatacagcggcctacaagtctacctctgaaaatccttcccctcatagcaattaccagtgctgagtctagcggctttgacgtcgacaatggcacctccgctgggcgctctccgcttgacccgatgacctcacccggatccggcttgatcttgcaggccaacttcgtacattcccagagaagggagagtttcctgtatagaagcgactctgattatgatctttcccccaagagcatgagtaggaactcaagtatagcctcagatatccatggagatgacctaatcgtgacaccgtttgcacaggttctggcctcccttcgaaccgttcggaacaatttcgcggccctgacgaatctgcaggacagggcaccttcaaaacggagcccaatgtgtaaccagccatcgattaacaaggccaccatcaccgaggaagcctaccaaaagctggcgtcggaaactctcgaagagcttgattggtgccttgaccagctggaaacactgcagacccggcactctgtttccgagatggcctcaaacaaattcaagaggatgctgaatcgcgagctgactcacctcagcgagatgtctcgatcaggcaatcaggtgtcggagttcattagcaatactttcctggacaaacaacatgaagtagagatcccatcaccaacacagaaggagaaagaaaagaagaaaaggccaatgtcgcagatcagcggggtgaagaagttaatgcactctagctccctgactaattctagtatccccaggttcggtgttaaaaccgagcaggaggacgtgcttgctaaggagctggaggatgtcaacaagtggggactgcacgttttccggattgccgagctgtccggaaaccgccctctgaccgtgatcatgcacaccatcttccaggagcgggatctgctcaaaacgttcaagatcccagtcgacactcttatcacatacctgatgactctggaggatcactatcatgccgacgtggcttaccataacaacattcacgccgcagatgtggttcagagtacgcatgtcctattgagtaccccagcactagaggcggtgtttacggacctggagatccttgccgcaatttttgcttccgccattcatgatgtggatcaccccggggtatcgaaccagtttctgattaataccaattctgagctggccctcatgtacaacgacagctctgtcctggagaaccaccatctggccgtgggcttcaaactgctacaggaagagaattgcgacattttccagaacctcaccaaaaagcagcgtcagagtctgcggaaaatggtgattgacatcgtgctggccactgatatgagcaagcacatgaacctacttgcggatctaaagaccatggtggaaacaaaaaaagtgacctcctctggggtcttgctgctcgacaactacagcgacagaatccaggtactgcagaacatggtgcattgtgcggacttatcaaaccccacaaagccgttgcagctgtaccgccagtggactgatagaataatggaggagtttttcaggcagggggaccgcgaaagagaaaggggtatggagatcagtcccatgtgcgataagcataatgcatcagtcgagaagtctcaagtcggctttatcgactacatcgtccaccccctctgggaaacatgggccgaccttgtccatcccgacgcacaggacatactggacacactggaagacaatcgggaatggtatcagagcacaattccacagtctccaagtcccgccccagatgaccctgaagaaggccggcaaggccagaccgagaaattccagtttgaactcaccctggaggaagacggcgaatccgataccgagaaggatagcggcagccaggtggaagaggatacctcttgctcggattctaagactctgtgtacgcaggactccgagagcacggaaataccactcgatgagcaggtggaggaggaggctgttggcgaagaggaggagagccagccggaagcctgtgtaattgacgatcgaagcccagacacttag

SEQ ID NO: 128540 - DNA, 660 bp, synthetic construct
  misc_feature 1..660: note = Description of Artificial Sequence: Synthetic coding sequence
  source 1..660: mol_type = other DNA
atggcgcaacagaccagtcccgacacccttacagttcccgaagtggataatcctcattgccccaacccatggctgaatgaagatctggtcaagtcacttcgagaaaatctcctccaacacgaaaagtccaaaaccgccagaaaatccgtgtcccccaagctaagccctgtcatcagtccccggaacagccctcggttgctgagacggatgttgttatcgagcaatattcctaagcaaagaaggtttactgttgcccacacttgcttcgacgtggacaatggcacgtcagccggacgaagccctctcgacccaatgacatcacccgggtcaggtctgatacttcaagccaattttgtacatagccagcgacgggaaagctttctctacaggtctgactctgactacgatctgtcccctaaaagcatgagcaggaactcaagcatagcttccgacatacatggagatgacctgatagtgacgcccttcgcacaggtcctggcttctttgagaaccgtccgcaacaacttcgctgctctgactaaccttcaggaccgagccccatctaaacgcagcccgatgtgtaaccagccttcaataaataaagccacaataaccggctcttggatggaacttaacccatacaccctgctggatatgtag

SEQ ID NO: 128541 - DNA, 2040 bp, synthetic construct
  misc_feature 1..2040: note = Description of Artificial Sequence: Synthetic coding sequence
  source 1..2040: mol_type = other DNA
atgagcattatcatgaaacctagaagtcggtctacatctagtctgcgaaccgccgaggcggtatgctttgacgtcgataatggcacctctgcagggcgcagtcctctcgatccaatgacttcccccggcagtggccttatcctgcaggccaactttgtgcacagtcagcggagggaatcctttctatataggtcagattccgattatgatctatccccaaagtctatgtctcgcaacagttcaatcgccagtgacatccacggcgatgatctgatcgtgactccttttgctcaagttctggcaagtctccgaacggttcgtaataactttgccgctttgaccaatctccaagacagagcaccttctaaacgcagccccatgtgtaatcagccctccataaacaaggcaacaattacagaggaggcataccagaaactggcatccgagacattagaagagttagactggtgtttggatcagctggagactctccagaccaggcattcggtttctgagatggcatctaacaagttcaagaggatgctaaacagagagctgacccatctgagcgaaatgtcaaggagcgggaaccaagttagtgagtttattagcaatacctttctggataaacagcacgaggtggaaatccccagtccaacgcagaaagagaaagagaaaaagaaacggccgatgagtcagatttctggagtgaaaaagctaatgcactcatccagcttgactaactcttctattcccagatttggtgtgaagactgaacaagaagacgtgctcgcaaaggaactggaggatgttaataagtggggactgcatgtgtttcgtatagctgaactgtccggtaaccgccccttgactgttattatgcacacgatctttcaggaaagggatctgctgaagacgtttaaaattcctgtcgatacacttatcacgtaccttatgacgctggaggaccactatcacgcagatgtggcttaccataacaatattcatgccgccgacgtggtccagtctacccatgtgctccttagtacaccagccttggaagcagtctttaccgatctggagatcctcgcagcaatcttcgccagcgccattcatgacgttgaccacccaggtgtctctaatcagttcttaatcaacactaattcagagcttgcattgatgtacaacgactcctctgtcctcgagaatcaccacttagctgtgggattcaagctcctccaagaggaaaactgcgacatcttccagaatcttactaaaaagcagcgccagtccctgaggaagatggtcattgacatcgtgctagccaccgacatgagcaagcacatgaatctgctggcggatctcaaaaccatggtggagacgaagaaggtgacctcttcaggcgtgctgctgctggataactattctgatcgcatccaggtacttcagaacatggtgcactgcgcggatttgtccaatccaacgaagcccctccagctgtaccgacagtggacggatcgcattatggaggagttctttcggcaaggagatcgcgagcgagaacgcggaatggagatctcgcccatgtgcgacaagcataatgcatcagtcgagaagtcgcaagtcggatttattgactacatcgtccatcccctctgggagacgtgggcggacttggtgcacccagacgcccaggatattcttgacactctggaagacaaccgagagtggtaccagtcaacaatcccgcagagcccttcccctgctcctgatgacccagaagaggggcgccagggccagaccgaaaagttccagttcgagctcactttagaggaagacggggagagcgatactgaaaaagacagcggcagccaggttgaagaagatacgtcctgctctgattccaagaccctgtgcacccaggatagcgagagtacagagatccctctagacgaacaggtagaggaagaggccgttggcgaggaggaggagtctcagcctgaggcctgcgtcatcgatgataggtctccagatacctag

SEQ ID NO: 128542 - DNA, 1269 bp, synthetic construct
  misc_feature 1..1269: note = Description of Artificial Sequence: Synthetic coding sequence
  source 1..1269: mol_type = other DNA
atggcttccaacaaattcaaacggatgctgaatcgggaactgacacatctgtctgagatgagccggtcggggaaccaagtgagcgaatttatcagtaatacttttttagacaaacagcacgaagtcgaaatcccctctcccacccaaaaggagaaggagaaaaaaaaacgccctatgagccaaatctcaggcgttaaaaagctaatgcattcctcaagcttgactaactccagtatcccgagattcggggtgaagacagaacaggaggacgttttagccaaagagttggaggacgttaataagtggggactgcacgtgtttcgcattgctgagctttccggcaataggcccctgacagtaatcatgcacaccatttttcaagaacgagatttactgaaaacttttaagatccccgttgacacactgattacttatttgatgacactcgaagaccactaccatgctgacgtcgcttaccacaataatatccatgccgccgacgttgttcaatctacacatgtgctcctatctacccccgccttagaagctgtgttcacggatctggagattctcgctgcaatcttcgcatctgctattcatgacgttgaccatcccggcgtatctaaccagttcctcatcaatactaacagcgagctagccctcatgtacaacgactcctctgttctggagaaccaccatctagccgtagggttcaagctgcttcaagaagagaattgcgatatctttcaaaatctgacaaagaaacagcggcagtctctgagaaaaatggtaatcgacatcgtactcgccactgatatgtccaagcatatgaacctgcttgcggatttgaagacaatggtggagacaaaaaaagtgacatcaagtggcgtgctgctgctggacaattattctgaccgcattcaggtgctccaaaatatggttcattgtgcggacctcagcaacccaacaaagccgctccagttgtaccgccagtggacggaccgaatcatggaagagttcttcaggcaaggggaccgggagcgtgagagaggcatggaaatctcacccatgtgtgataaacacaatgcaagtgtggaaaaaagccaggtggggttcattgattatatcgtgcatccactgtgggaaacttgggcagacctggtgcacccagatgctcaagacatattggacaccctcgaggacaatcgcgaatggtaccagagtaccatcccacagagcccttcccctgccccagatgacccagagtag

SEQ ID NO: 128543 - DNA, 246 bp, synthetic construct
  misc_feature 1..246: note = Description of Artificial Sequence: Synthetic coding sequence
  source 1..246: mol_type = other DNA
atgaaacggaatacttgtgacctgttgtcccggtccaaatccgcaagtgaggaaaccctgcattcatccaacgaggaggaagatcccttcagagggatggagccttacttggttcgcagattatcctgtcgaaacatacagctcccgccactggctttcagacagctcgagcaagcagacctcaagagcgaatcagaaaacatccagcggccgacctctctgcccctgaaaatcctccctctgtag

SEQ ID NO: 128544 - DNA, 2238 bp, synthetic construct
  misc_feature 1..2238: note = Description of Artificial Sequence: Synthetic coding sequence
  source 1..2238: mol_type = other DNA
atggctcagcaaacctcaccggacactctgaccgtgcccgaagtggacaaccctcactgtccaaatccttggctgaacgaggatctggttaaaagtctgagagagaatctgctccaacatgagaagtcaaaaaccgcaagaaaatctgtgtcgccaaagctgagcccagtgatttcccctcggaactcacctaggctgctgcgccgcatgttgctttcctctaatattccaaaacagcgccgctttaccgtggcccatacgtgctttgatgttgataatggcacatctgctggacgcagtcccctggatcccatgacctctcccggctctggacttattctgcaggccaactttgtgcattcgcagagacgtgagagttttctctatcgtagcgattctgactatgatctgtcacctaaaagtatgtcccgaaactcgagcatcgcaagtgacattcacggtgatgatctaattgttaccccatttgctcaggtcctggcaagcctgcggaccgtccggaacaactttgccgcccttaccaacttgcaggatagggcccccagcaagaggagtcccatgtgcaatcagccttctatcaacaaagcaacaatcaccgaggaagcctaccagaagctggcttcagaaactctggaggagctggactggtgtcttgaccagctcgagacacttcaaacaagacatagtgtttcagagatggcaagcaataaattcaagagaatgctgaatcgcgagttaacccacctatctgagatgtctaggtccggcaatcaggtgagtgagttcattagtaacacgtttcttgataagcagcacgaagtcgagattccaagccccactcagaaggagaaggaaaaaaagaagagacctatgagccagatcagtggagttaaaaaactgatgcactcttcctctctgactaactcgtcgatccccagattcggggtgaagacggaacaggaggacgtactagctaaagaactcgaagatgtgaacaaatggggcttgcacgtgtttaggattgcagagctctccggcaaccggcccctaactgtaataatgcacacaatctttcaggaaagagatctgttaaagacatttaagattccagtggacaccctgatcacgtaccttatgaccctagaagaccactaccacgcagatgtggcataccataataacatccacgcggccgacgtggtgcagtcaacacacgtactgctgagtaccccagccctcgaggccgtcttcaccgacctagagattctcgccgctatctttgcctccgctattcatgatgtggatcatccaggggtgtcaaatcagtttcttatcaacaccaattcagagctggcattaatgtataacgacagttctgtgctggaaaatcaccacttggccgttggatttaaactgcttcaggaggagaactgtgacattttccagaatctcacgaaaaagcagcgtcaaagcctgcggaagatggtgatagacatagtgctggcgacagatatgagcaagcatatgaaccttctagcagacctgaaaacaatggtggaaacgaaaaaagtaacttcatctggggttctcctcttagataactatagtgaccggattcaggtattgcagaacatggtgcattgcgcagaccttagcaacccaaccaaaccactccagctttatcggcagtggactgacagaattatggaagagttctttaggcaaggagacagagagagagaaagaggcatggagataagtcctatgtgtgacaagcacaacgctagcgtcgaaaagtcccaagtggggtttatcgattatattgtgcatccactgtgggaaacctgggctgatctggtgcaccctgacgcacaggacattcttgatacactggaggacaacagggaatggtatcaatcaacgattcctcagtcaccatccccagcaccagatgacccggaagaaggaaggcagggacagaccgagaagttccaattcgagctgactctggaagaagacggggagagtgatactgaaaaagattccggaagtcaggtagaagaagacactagttgtagtgactccaagacactatgtacacaggactccgagtccacagagatcccgctggacgagcaagtcgaggaggaagcggtcggcgaggaggaggagagtcagccagaagcttgcgtgattgacgatagatcacctgatacttag

SEQ ID NO: 128545 - DNA, 228 bp, synthetic construct
  misc_feature 1..228: note = Description of Artificial Sequence: Synthetic coding sequence
  source 1..228: mol_type = other DNA
atgaagcgtaatacctgtgacctgctgtcacggagcaaatctgctagcgaggaaacactccactcatccaacgaggaggaggatccttttcgaggcatggagccatatctggtgcgaaggctatcatgccgcaatatccagctccctccactggccttcagacagttagagcaagccgatctaaagtcagaatccgagaacatccagaggcccacctctttgccctag

SEQ ID NO: 128546 - DNA, 2247 bp, synthetic construct
  misc_feature 1..2247: note = Description of Artificial Sequence: Synthetic coding sequence
  source 1..2247: mol_type = other DNA
atgaagaggaatacttgcgatctcttgtccaggtccaagagcgcctctgaagagactcttcacagttcaaacgaagaggaagacccttttcgcggtatggaaccctacctggtacgaaggttgtcttgtcgcaacatccagctccctccattggcctttcgtcagttagagcaggccgatctgaagtcagaaagcgaaaatatccagcgccctacatccctccctctgaagattctgcccctgatcgcgattacgtctgccgagtctagtggctttgatgttgataacggcacatctgccggccgctctccactggatcccatgacatcacccggctctgggctaattctgcaggctaacttcgtgcatagccaaagacgcgaatcttttttgtacaggagcgacagtgactacgatctgtcccccaaatctatgagtcggaactcttctatagcatccgacattcacggcgacgatctgatagttacccccttcgcacaggtgctggctagccttaggaccgttcggaacaacttcgctgctctgacaaatctccaagatcgagcgccatccaaacgctctcccatgtgcaatcagcccagtataaataaggccaccattacagaagaggcctaccagaaactagccagcgaaactctggaggaactcgactggtgcttggaccagctcgagactcttcaaacccgccattccgtgtccgagatggcctcaaacaagtttaagcggatgttaaaccgcgagctaacacacctcagtgaaatgagtcggtctggcaatcaggtgtcagagtttatctctaacacattcctagacaaacagcacgaagtggagatcccttctcctacccagaaggagaaagaaaagaagaaacgccccatgagccagatttccggggtgaaaaagctcatgcattcttcgagcttaaccaactcaagcatcccccgattcggggtcaagactgagcaagaggatgttctcgccaaggaattggaggatgttaataaatggggattacatgtattcagaattgccgagttaagcggcaacaggcctctcaccgtgattatgcacactattttccaggagcgagaccttctgaaaacttttaagatacctgttgacacacttattacttatcttatgactctcgaggatcattaccatgcagatgttgcataccacaacaatatccatgcggcagacgttgtccagtctacccatgtgctcctgagcacccccgcactagaggccgtgttcactgatctcgaaattctggcagcaatcttcgcctccgctatacatgatgtcgatcatcccggggtgtccaatcagtttcttattaatacaaactcagaactggccttaatgtacaatgacagttctgtgctcgagaatcaccatctcgcggtgggctttaaacttttacaggaagagaactgtgatattttccagaacctcaccaaaaagcagaggcagtctttacgtaagatggtgattgacatagtactggccacagatatgtctaaacacatgaacctgctggctgacctgaagaccatggttgagactaagaaagtgacttcctcaggcgtgttactgctcgataactatagtgaccggatccaggtgctgcagaacatggtgcattgcgctgatctatccaatccaactaagcctctacaattataccgccagtggacggaccgtattatggaagagttcttccggcagggtgatagagagagggaacgtggcatggagatcagtcccatgtgcgacaagcataacgccagcgtggagaaaagccaggtggggttcattgactacatcgtgcaccctctctgggagacatgggcagacctcgtgcacccggatgcccaggacattcttgatacccttgaggataaccgcgagtggtaccagtctactatacctcagtccccttccccagcccccgacgaccccgaagaaggcaggcagggtcagacggagaaattccagtttgaactgacactagaagaagacggtgaaagcgacaccgagaaagattccggttcccaggtggaggaggataccagctgctcggatagcaagaccctatgcacccaggatagcgaaagcactgagattccgttagatgaacaggtggaagaggaagctgtcggcgaggaggaggagtcgcagccagaagcttgcgtcatcgacgaccggtcccctgatacctag

SEQ ID NO: 128547 - DNA, 2502 bp, synthetic construct
  misc_feature 1..2502: note = Description of Artificial Sequence: Synthetic coding sequence
  source 1..2502: mol_type = other DNA
atgctcccctttggagacaaaacacgcgaaatggtcaacgcttggtttgcagagagagtgcacacgatcccggtttgcaaggaggggatacggggccataccgaatcatgctcttgccccctgcaacagtctccgcgggccgataactctgctcccggaacccctactcgtaaaatatcagcatccgagttcgatcggccgctgcggcccatcgtggtcaaggactctgagggaaccgttagtttcctgagcgacagtgaaaagaaagaacagatgcccttgacacctccccggttcgatcacgacgagggcgatcaatgttcacgactcctcgagctcgtaaaggatattagtagtcatttggatgttaccgcactctgtcacaagatttttctccacattcacggattaatctccgccgacaggtattctctgttcctggtgtgcgaggactcttctaatgacaagtttctgattagcaggcttttcgacgtagccgagggatccacattagaagaggtgagcaataactgtatacggctagaatggaataaaggaattgtggggcatgtcgcggccctgggggagcccctgaatatcaaagacgcgtacgaagacccgagatttaatgcagaagtggatcaaattacaggctataagacacagagcatcctctgcatgcccatcaagaaccacagggaggaagtggtaggtgtcgcacaagcaatcaataagaagagcggaaatggtggcacatttaccgaaaaagacgagaaggactttgcagcctatctcgcattctgtggcatcgttctccacaacgcacagctctacgagacgtctcttctcgagaacaagcgaaaccaggtgcttctcgatctagcttccctgatctttgaagaacagcagagcctcgaagtcatcctgaaaaagattgccgccactatcatctcattcatgcaagtccaaaaatgtaccatcttcattgtcgatgaggactgttcagattcattctccagcgtgttccatatggaatgtgaagagctcgaaaagtccagtgacaccttgacccgcgagcatgacgctaataagattaactatatgtatgcccaatacgtcaagaacaccatggagcctctcaacattccggatgtttcaaaggacaagcgcttcccatggaccactgaaaataccggaaatgttaatcaacagtgcatacgttcactgctatgcaccccgattaagaatggcaaaaagaacaaggtgatcggtgtgtgtcagctagtgaacaagatggaggagaacaccggaaaagtgaaaccctttaatcgaaatgatgaacagttccttgaagctttcgtgatcttttgcggactgggcatacagaatacacaaatgtacgaagccgtggagcgggctatggctaaacagatggtcacgcttgaggtccttagttatcacgcctcggccgctgaagaagaaactcgggaactgcagagtttagccgccgccgtagtcccttccgcccagactctgaaaattactgactttagtttttcagatttcgaactttccgatctggaaactgccctctgtacaattaggatgtttacggatctgaatttagtccagaattttcagatgaagcacgaggtgttgtgcagatggattctaagcgtcaaaaagaattacagaaaaaacgtggcctatcataattggcggcatgccttcaataccgcgcagtgcatgttcgcagccctcaaagccgggaaaatccagaacaaattaacggacctcgagattctcgctttactgattgccgccctctcacatgatctcgaccatcggggcgtaaataactcttacatacaacgatctgaacaccccctggctcagctttattgtcatagcattatggagcatcaccactttgatcaatgcctaatgatacttaatagtccaggtaaccagattttgtccggcctgtcaatcgaggaatacaagaccactctcaaaatcatcaaacaggcaatccttgctaccgatctagccctgtatataaaacgacggggggagttcttcgaactcattcgtaagaatcaattcaaccttgaagatccacaccagaaagaactgttcctggcgatgctgatgaccgcttgcgacctgtcagctatcaccaagccctggcccatacagcagcgcattgccgagttagtagccacagaattcttcgaccagggcgaccgagagaggaaggagctcaacattgaaccaaccgacctgatgaaccgcgagaagaagaacaagatccccagtatgcaggtcggcttcattgatgccatctgcctgcagctgtatgaggctctgactcatgtgagtgaggactgttttccattgctagatggttgtaggaaaaaccggcaaaaatggcaggcccttgccgaacagcaggagaagatgctgattaacggagaaagcggccaagctaaaaggaactag

SEQ ID NO: 128548 - DNA, 2628 bp, synthetic construct
  misc_feature 1..2628: note = Description of Artificial Sequence: Synthetic coding sequence
  source 1..2628: mol_type = other DNA
atggagcgggccgggcctagcttcggacagcagagacagcagcaacagccccaacagcaaaaacagcagcaacgtgaccaagattccgtggaggcctggctagacgaccactgggattttacctttagttattttgtccggaaggccactcgcgagatggttaacgcctggttcgccgagcgcgttcataccatcccagtatgcaaggaaggcatacgaggacatactgaatcttgctcctgtcccctccagcagtcacctcgggccgacaattcagctccaggaactcccacaagaaaaatatccgcaagtgagtttgaccgtccacttcgccccatagtggtaaaagacagcgaaggcaccgtgtcattccttagtgacagcgagaaaaaagagcagatgcctctcacccctccacgctttgatcatgacgagggagatcaatgcagccgcctgctggagctggtcaaagatatctcaagccatttggatgtcaccgctctgtgtcacaagatatttctccacatccacggactcatcagtgctgataggtactctctcttcctcgtatgcgaggacagcagcaacgataaattcctgatttcccggctgtttgacgtcgctgagggatctacattggaggaggtttctaacaactgtattcgtctcgagtggaacaaagggatcgtgggccacgtggccgccctcggtgagcccttgaacatcaaggatgcatatgaggatccacgtttcaacgcagaggtagaccagattacgggctataagacccagagcattctgtgtatgcctatcaaaaatcaccgggaagaagtggtgggcgtggcccaggctattaacaaaaagagtggaaatggtgggacgtttacagagaaagatgaaaaggactttgccgcctacctggccttctgtggcatcgtgctgcacaacgcccagctgtacgaaaccagtcttctagaaaacaaacgtaatcaggttctgctcgatctagccagtttaattttcgaagagcagcagagcctagaggtgattctcaagaagattgccgcgacaatcatttccttcatgcaagtgcagaagtgcacaatcttcatcgtggacgaagattgctcagattcgttcagtagtgtcttccacatggaatgcgaggagctggagaagtccagcgacacactcacaagagaacatgatgccaataagattaattatatgtatgctcaatacgtgaagaacacgatggagccccttaatatcccagacgtgtcaaaggacaagagattcccttggactacggagaatactggaaatgtaaatcaacagtgtatccgcagcctcctgtgcacacctatcaagaacggtaagaagaataaagtgataggcgtgtgtcagctggtcaacaagatggaagagaacacaggtaaggttaaaccattcaataggaacgatgagcagttcctggaagcatttgtcattttttgcggcctgggcattcagaatacccagatgtacgaggcagtggaaagggccatggcaaagcagatggttactctggaggtgctgtcatatcatgcctctgcagctgaggaagagacgagagaacttcaaagcctggctgctgcagttgttccgagcgcgcagacgctgaaaatcacagacttttcttttagcgactttgagctgagcgacttagagaccgccttgtgtactatacgaatgttcaccgacctgaatttggtgcagaacttccaaatgaagcacgaggtcctgtgtcgctggatcctttccgtcaaaaagaattatagaaagaatgtcgcataccataactggcggcacgcgttcaataccgcccagtgtatgttcgcagctttaaaggcaggaaagattcaaaataaactcactgatctcgaaatcctggcccttttgatcgccgcactcagccatgatctagaccaccgcggcgttaataatagttatatccagagaagcgaacacccgctggcccagttatactgtcattcaatcatggaacatcatcacttcgaccagtgcctgatgattctgaatagtcctggaaaccagatcctcagcggactctccattgaggagtacaagactacactcaagataattaagcaggccatcctggcgaccgatctggcactgtacattaaacgaaggggtgaattcttcgagctcatccgcaagaatcagtttaatttggaggatccacaccaaaaagaacttttcctggcaatgctcatgaccgcctgtgacctgtctgccattacaaagccctggccgatccagcagcgtattgctgagttggtggcgaccgagttttttgaccagggcgatagggagcggaaagagctgaacatcgagcccaccgacctcatgaacagagagaagaagaacaagatccctagtatgcaggtgggattcatcgatgccatatgcctacagctgtatgaggctctgactcacgttagcgaagactgctttcccctgctagatggctgtcgaaaaaatcgccaaaagtggcaggccctggctgagcagcaggagaagatgctcatcaacggagaatctggacaggccaagcgaaattag

SEQ ID NO: 128549 - DNA, 2472 bp, synthetic construct
  misc_feature 1..2472: note = Description of Artificial Sequence: Synthetic coding sequence
  source 1..2472: mol_type = other DNA
atggtgaacgcatggtttgctgagagagtgcacactatcccagtctgcaaagaaggcattaggggccataccgagagttgttcctgcccccttcagcagtcccctcgggccgacaactctgctccagggacacccactcgcaaaatcagcgcaagcgagttcgaccggccactccggcccattgtggtcaaagacagcgagggaaccgtgagcttcttaagcgattctgaaaaaaaggagcaaatgccattaacaccacctcgatttgatcacgacgaaggcgaccagtgcagccggctgcttgaactagtgaaggacatcagttcacatctggatgtcaccgccctgtgtcataagatcttcctgcacattcatggactaatctctgcggaccggtactccttgttcctggtgtgcgaagattcttcgaatgacaagtttctgatttccaggcttttcgatgtcgccgagggatcaacgctcgaagaggtgtccaacaactgcataagactcgagtggaacaagggtattgtggggcatgtggctgccctcggagagcctctcaacatcaaagatgcctacgaagatcctagatttaacgctgaagttgatcagataaccggctacaagacccagagcattctctgcatgccaattaagaaccaccgggaagaagtggtcggagtcgcgcaggcaatcaataagaaatctgggaacggtggcacattcactgagaaggacgaaaaagactttgctgcctacttagccttttgtgggattgtgttgcataacgcgcagctgtacgaaacaagtttattggaaaacaagagaaatcaggtgctactggacttagcctctctgatcttcgaagaacagcagagtctcgaggtcattctcaaaaagattgctgctacaataattagctttatgcaagtccagaaatgtactatcttcatcgtggacgaggattgctcagattcctttagtagtgtgttccacatggaatgcgaagaattagagaagtcatccgacacacttaccagggagcacgacgcgaataagattaactacatgtatgcccagtatgtgaaaaacaccatggagccactgaatattccagacgtgtcgaaagacaagaggtttccctggacaaccgagaatactggcaatgtgaatcagcaatgcatcaggtctctcttgtgcacccccattaagaatggtaagaaaaataaagtcatcggagtgtgccaattggtgaacaagatggaagagaacacaggtaaggtaaagcccttcaatcgaaatgatgagcagttccttgaggcgtttgtcattttctgtggcctcggcattcagaatacccaaatgtatgaagccgtcgagcgcgctatggctaagcaaatggttacgctggaagtgctgtcatatcacgcttctgccgcagaggaggagaccagggagttgcaatcgcttgcagccgccgtcgtgccctccgcccaaaccctcaaaatcacggatttctcattttctgactttgagctctctgacttagagacggccctctgtacaattaggatgttcaccgacctgaatttggtgcagaatttccagatgaagcacgaggtcttgtgccggtggattctgagtgtgaaaaaaaattataggaaaaatgttgcctaccacaattggcgccacgcatttaacacagcccagtgcatgtttgcagcccttaaagccggcaagatccagaataagctgaccgacctagagatactggccttgcttatcgccgcactctcacacgacttggaccatcggggtgtgaataacagctacatacagcgctctgaacatcctctcgctcagctgtattgtcattcaatcatggagcatcatcacttcgatcaatgtctgatgatattaaactccccaggcaaccagattcttagtgggctgtcaatcgaggagtataagaccacactcaagatcatcaagcaggccattctcgccactgacctggcactgtatattaagcgtagaggggaattttttgaacttatccggaagaatcagtttaatctggaggacccgcatcagaaagaactcttcctcgccatgctcatgaccgcctgtgatctgtctgcaattaccaaaccatggcccatacagcaacggatcgcagagttggtggccaccgaattctttgaccaaggtgaccgagaacggaaggagttaaatatcgagcccaccgacttaatgaatcgcgagaagaaaaataaaatcccaagcatgcaggtgggctttatcgacgctatttgcttgcagctgtacgaggctctcacccatgtgtctgaagattgtttccctctcttggatggatgccgcaaaaataggcagaaatggcaggctttggctgagcaacaagaaaaaatgctgattaatggagagtcaggccaagctaagagaaattag

SEQ ID NO: 128550 - DNA, 2583 bp, synthetic construct
  misc_feature 1..2583: note = Description of Artificial Sequence: Synthetic coding sequence
  source 1..2583: mol_type = other DNA
atgggagaggtcactgccgaggaggtcgaaaagttccttgatagtaatatcggcttcgcaaaacaatactataacctgcactaccgagccaagctgatttctgacttgctgggcgctaaagaagcagctgtcgatttctcgaactatcatagcccatcgtctatggaggaatccgaaataatcttcgatctgctgagagacttccaggagaatttacagaccgagaaatgcatttttaacgtaatgaagaaactgtgcttcttgctgcaggctgacaggatgtctttgtttatgtataggactcgcaacggcattgctgaactggccactcgtttatttaatgtccataaggacgcagtgctagaagattgtctggtgatgcccgaccaagagatcgtgttcccgctggatatgggcatcgttggacacgttgcccattccaaaaaaattgccaacgtccccaataccgaggaggacgaacatttctgcgattttgtcgacatcttaaccgagtacaagacaaagaatatacttgcaagtcctataatgaacggcaaggacgtagtcgccataattatggcggtgaataaagtcgacgggagccacttcacaaagagggacgaagagattttacttaagtatctgaatttcgccaacctcatcatgaaagtctaccatttatcatatcttcataactgcgagactaggcgggggcagatattgctgtggagtggcagtaaggtcttcgaggagctcacagatattgagcgccagttccacaaggccctgtataccgtccgtgccttcctgaactgtgataggtactctgttgggctcttggacatgacaaagcagaaagagttctttgatgtctggcccgtactgatgggggaggtgcccccttactctggcccccggacacctgacggcagagaaattaacttttataaggtcatcgactacattctgcacgggaaagaggacatcaaggtcattcccaacccacctcctgaccattgggctcttgtgtccgggctccctgcctacgtggcccagaacggcttaatctgcaacatcatgaacgcccctgctgaggattttttcgccttccaaaaggagccgctagacgagtccggctggatgatcaaaaatgtgctgtcaatgccaatagtgaacaagaaggaggagatagtaggtgtcgccacattttacaacagaaaggacgggaaaccctttgacgagatggacgaaaccctgatggagtcacttacccagtttctcggatggtcagttcttaacccagatacctacgagagcatgaacaagttagagaaccggaaagatatcttccaagatatcgtgaaatatcatgtaaagtgtgataatgaagagatccagaagatccttaaaacacgggaagtgtatgggaaagagccatgggagtgcgaggaagaagagctcgctgaaatactccaggccgagctgccggatgctgacaaatatgaaatcaataaatttcatttcagtgatctgccccttacggagctggaactcgtcaagtgcggtatccagatgtattatgaattgaaggtggtcgataaatttcatatcccacaggaggcactcgtccggttcatgtactcattgagcaagggctatagaaaaatcacataccacaattggcgtcacggctttaatgtagggcaaacaatgtttagcctgctggtcactggaaagctcaagagatactttacagatcttgaagcccttgcgatggtgacggcagccttctgccatgacatcgatcatagaggcacaaacaacctatatcagatgaaatcgcagaacccgcttgcaaaactgcacggatctagcatcttagaacgtcaccatttggagttcggtaaaacactcctgcgcgacgagagtctgaatattttccagaatcttaacaggcgccaacacgagcacgccattcatatgatggacatcgccattattgccacggacctggccctctatttcaagaagaggacaatgttccagaaaattgtggaccagagcaaaacttatgagtcagaacaggagtggacccagtatatgatgcttgaacagactagaaaggaaatcgtgatggctatgatgatgacggcgtgtgacctaagcgccattaccaagccctgggaggtgcagagtcaggttgctcttctggtggctgccgagttctgggaacagggcgatcttgagcgaacagttctgcagcagaacccaatcccgatgatggacagaaataaagccgatgaacttcccaagctgcaagtgggtttcattgatttcgtctgcacatttgtctataaggaattcagcaggtttcacgaagagattacccccatgctggacggtatcactaataataggaaggagtggaaagcattagccgatgagtatgacgctaaaatgaaagtccaagaggagaagaagcaaaagcagcagagtgccaaaagcgccgcagccggaaatcaaccgggtggaaatccatccccggggggggccactaccagcaagtcctgctgcatacagtag

SEQ ID NO: 128551 - DNA, 1728 bp, synthetic construct
  misc_feature 1..1728: note = Description of Artificial Sequence: Synthetic coding sequence
  source 1..1728: mol_type = other DNA
atgaccaaggaaaaggagttcttcgacgtttggtcagttctcatgggagaaagccaaccatactccgggccccgtacccctgatggcagggaaattgtgttttataaggttatcgactatgtgctccacggtaaggaggaaatcaaagtgatccctacaccttctgccgatcactgggcactcgccagcgggctccctagctacgtggcagaatctggattcatctgtaatattatgaatgcgagtgcagatgagatgtttaagtttcaggagggtgccctagatgactcaggttggttgatcaagaatgtgctgtcaatgcccatcgtgaataaaaaagaagagattgtcggcgttgctacgttctacaaccgaaaggatggcaaaccatttgacgaacaagacgaggttctcatggagtctctgactcagttccttggttggtccgtaatgaataccgacacatatgacaaaatgaataagctggaaaacaggaaagacatagcccaggatatggtgctctaccacgtcaagtgcgaccgagatgaaattcaacttatcctgcccacgagagctcgcttgggcaaggagcccgccgattgtgatgaagacgaactgggagagatacttaaggaagagttgccagggccaacaacatttgacatctatgaattccacttttcggatttggagtgtacagagttggatttagtcaaatgtggcatacagatgtactacgaactaggagtcgtccgtaaattccagattccacaggaagtcttagtgagatttttattttccatttctaagggctaccgccggataacataccacaactggcgtcacggtttcaatgttgcacagaccatgtttactcttctcatgacaggcaaattgaaatcttattacacggatctggaagcttttgcaatggtaacagctggtttatgtcatgacattgatcatagaggtacaaataacctgtaccagatgaagagccagaatcccctggccaagctccacggtagctcaatcctggaacgtcatcatctggaatttggcaaatttcttctgtctgaagaaaccttgaacatctaccaaaacctaaatcggcgccagcacgagcatgtgattcacttgatggatattgccattattgcaaccgatttagccctatacttcaaaaagagggccatgtttcagaagatcgtggatgaatctaaaaactatcaggataagaaatcctgggtagaatatctgtccctggaaaccacacgcaaggagatcgtgatggccatgatgatgaccgcatgtgacctgtctgcgattacaaagccgtgggaagtgcagtccaaggttgcacttcttgtggcggcagaattttgggaacagggcgatcttgagcgcacagttctcgaccagcagcctattccaatgatggatcggaacaaggccgctgagctccctaagctccaagtgggcttcatcgactttgtgtgcacttttgtttacaaagaattctcccggtttcatgaggagatcctccccatgttcgatcggctccagaataaccggaaagaatggaaagccctcgccgacgagtatgaggccaaagtgaaggccctggaggaaaaggaggaggaagagcgcgttgccgccaagaaagtaggcacagaaatctgcaacggtgggcccgcaccaaagagttccacctgttgcattctctag

SEQ ID NO: 128552 - DNA, 2562 bp, synthetic construct
  misc_feature 1..2562: note = Description of Artificial Sequence: Synthetic coding sequence
  source 1..2562: mol_type = other DNA
atgagtctctccgaggagcaggcccggagctttctggatcagaatcccgactttgcacgtcagtattttggaaagaaactatctccggagaatgtcgcggccgcatgcgaggacggctgcccccccgattgtgactcccttcgcgacctctgtcaagtcgaggagtcgaccgccctgctcgagttagtccaggacatgcaagagtccatcaatatggaacgcgtcgtctttaaggtattgaggagactctgcacactgctgcaggctgatcgatgcagcctgtttatgtacaggcagagaaacggagttgccgagctcgctacacgtttgttttctgtgcagcctgactcggtccttgaggactgcctcgtcccacctgactctgagatcgtatttcctctggatatcggtgtggtcggtcacgtggctcagaccaaaaagatggtgaacgtggaagatgtggccgagtgcccacactttagcagcttcgcggatgagctgaccgattataagacaaaaaatatgcttgccacccctattatgaacggcaaagatgtcgtcgccgtgattatggccgtgaacaaacttaacggaccttttttcacctctgaagatgaggacgtgttcctgaaataccttaatttcgcgacgctttacctcaaaatataccacctgtcctacctgcataattgtgaaactcggcggggccaggtgctgctgtggagcgccaacaaggtgtttgaagaactgactgacattgagcggcagttccacaaggcgttttatacggtgagagcgtacctcaattgcgaacgatattctgtcggcctcttggacatgactaaagagaaagagttctttgacgtgtggagcgtcctgatgggtgagtcccagccatattccgggcctagaacaccggacggacgcgaaatcgttttttataaggtgattgactatgtgctacatggcaaagaggaaataaaggtcatccccaccccgtctgccgaccactgggccttggcatcagggctgccctcctacgtagcagaatctgggttcatttgcaatattatgaacgcttcggcggatgagatgtttaagttccaggaaggagccctagatgatagtggctggcttatcaagaatgtgctatctatgcccatcgtgaacaagaaggaggaaattgtaggtgtggccaccttttataatagaaaggatggcaagccctttgacgaacaagacgaggtgctcatggagtccctaacacagtttctcggctggtccgtcatgaatacagacacctacgataaaatgaataaactggagaataggaaggacatagcacaggacatggtactgtaccatgttaaatgtgacagagatgaaatacagctgattttgcccacacgggctcggctaggcaaggaacctgcagactgtgacgaggatgagctgggcgaaattcttaaggaggagctgcctggacctacaacgttcgatatctacgaattccacttttccgatctggagtgcaccgagctggacctggtgaagtgtggcatccagatgtattacgagttgggcgttgtacggaaatttcagataccccaggaggtgttagtgagatttctcttttcaatctcaaaagggtataggagaatcacatatcacaactggagacatgggtttaacgtggcccaaactatgtttacgcttttgatgaccggaaaacttaaatcatattacacagatctggaagcgtttgctatggtgacggcaggcctatgtcatgatattgaccaccgaggcacaaacaacttgtatcagatgaagtcacagaatcccctagctaagttgcatgggagttctattctcgaacggcatcacctggaattcggaaagtttctactcagcgaagagactctcaatatttatcagaatctaaatcgacgccaacatgaacacgtcatacacctgatggacattgcaatcatcgccaccgacctagcactttacttcaagaaaagagcgatgttccaaaagatcgtggacgaatcaaagaattaccaagacaagaagagttgggtcgaatacctgtcacttgaaaccacacggaaagagattgtcatggcaatgatgatgacagcctgtgacctcagcgctattacaaaaccatgggaagtacagtccaaggtggcattgcttgtagcagccgagttctgggagcagggcgatctggagcggacggtgctggatcagcagcccattcctatgatggatcgcaacaaagccgcagagttacccaagttgcaggtgggctttatcgacttcgtgtgcacatttgtgtataaggaattctcccgttttcacgaggaaattctgccgatgtttgatcggctgcaaaacaaccgtaaagagtggaaagcattggctgacgaatatgaggccaaagtcaaagccctggaggagaaggaagaagaggagcgggttgctgcgaagaagggcaccgaaatatgcaatggagggcccgcgccaaaatcttccacgtgttgcatcctgtag

SEQ ID NO: 128553 - DNA, 2565 bp, synthetic construct
  misc_feature 1..2565: note = Description of Artificial Sequence: Synthetic coding sequence
  source 1..2565: mol_type = other DNA
atgtctctatccgaggaacaggcccgatccttccttgaccagaatccggactttgcacggcagtacttcgggaagaaactgagtccggagaatgtggccgccgcttgcgaggatgggtgccctccagactgtgactcactgagggacctgtgccaggtggaggagagcacggcgcttctggagttagtgcaggacatgcaggagagcatcaacatggaaagagttgtgttcaaggtgctgcgaagactttgtaccctgctccaggcagaccggtgctccctgtttatgtacagacagagaaatggagttgccgagctcgctacacgactgttctcggtgcaacctgattccgtactggaagattgtctagttcccccagatagcgagattgttttccccttagatattggggttgttggccatgtcgcacagaccaaaaagatggtgaacgtagaagacgttgctgagtgtccccatttttcgtctttcgcggatgagctgactgattacaagacgaaaaacatgctggctaccccaattatgaatggtaaagatgtcgtcgcagtaatcatggcagtaaacaagctgaatgggcctttctttacaagcgaggatgaagacgtctttctgaaatacctgaactttgcaacactgtatctgaagatttaccaccttagctacctgcacaattgtgaaaccagaaggggccaagtgcttctgtggagcgctaacaaggtgtttgaggaactgactgatattgaaaggcagttccataaagctttctatacagtgagggcctatctcaactgcgagcgctattcagtcggactgttagatatgacaaaggaaaaagagtttttcgatgtctggagtgtcctaatgggagaaagccagccctacagtgggcccagaacgccagacggtcgggagattgtattttataaagtgatagattatgtcctgcacggaaaggaggaaatcaaggttatccctaccccctcagcggaccactgggcactggctagcgggctgccatcatatgtcgccgaatcaggatttatctgcaatatcatgaatgccagcgcagacgagatgtttaaattccaggaaggagccctagacgattctgggtggctaataaagaatgtgctttccatgcctatcgtcaacaaaaaggaggagatcgttggagtcgcaaccttttacaaccgaaaagacggaaagccctttgatgaacaggacgaagtgctgatggagtcacttacccagtttcttggttggtctgtaatgaatacagatacctacgacaagatgaataaactggaaaataggaaggacattgcccaggatatggtgctgtaccatgtgaagtgtgatagagacgagattcagttgattttaccgaccagggccaggttgggcaaggaacctgcagactgcgacgaagacgaactgggcgagatactaaaagaggagcttcctggaccaactacattcgatatttacgagtttcacttcagtgatttggagtgtacagaactggatttagtgaagtgtggcattcagatgtactacgagctgggcgtcgtgagaaaattccagataccccaggaggtgctggtgaggtttcttttcagtatcagcaaagggtatcggcggataacctatcataattggcggcatggcttcaatgtggcccaaaccatgttcactttgctcatgactgggaaactcaagtcatattacaccgacctggaggctttcgccatggtaaccgccggtctatgtcacgacatcgatcatcgcgggacaaataacttgtaccaaatgaaatcacagaacccccttgccaaattgcacggctccagcatcttagagcgacaccatctcgagtttggaaagtttcttctgtccgaggagacactgaacatctaccaaaatctcaacagacgacagcatgagcatgttatacatcttatggacatcgccatcatagccaccgaccttgctctgtacttcaaaaaacgagccatgtttcagaagatcgtcgacgagtcgaaaaactaccaggacaagaaatcttgggtggaatacctgtccctggaaacaacacgcaaggaaatcgtgatggccatgatgatgacagcatgtgacctatccgcaatcaccaaaccgtgggaagtgcaatccaaggtggccttgctagtggctgcagaattctgggaacagggtgatctggagaggactgtgcttgaccagcagcccattcccatgatggacaggaacaaagctgcagaattgcctaagctgcaggtggggtttattgacttcgtatgcaccttcgtgtacaaggaattttctcggttccacgaggagatcttacctatgttcgataggttgcagaacaacagaaaggagtggaaggcactggcagacgaatacgaagccaaggtgaaagcactggaggagaaggaagaggaggaaagggtggccgccaaaaaagtgggtaccgagatctgtaacggtggccctgcccctaaaagcagtacatgctgtattctatag

SEQ ID NO: 128554 - DNA, 2577 bp, synthetic construct
  misc_feature 1..2577: note = Description of Artificial Sequence: Synthetic coding sequence
  source 1..2577: mol_type = other DNA
atgggcgaaattaatcaagtggctgtcgagaagtatctcgaagagaacccacaatttgccaaagagtatttcgaccgaaagttaagagtggaagttctgggcgaaatttttaagaatagccaggttcctgtgcagagctccatgtctttttcagaacttacccaagttgaggagtccgctctgtgcctggaactgctgtggactgtgcaggaggagggcggaactcccgagcagggggtacatcgcgctctgcaacggctcgcccatctgctgcaggcagatagatgcagtatgtttctatgcagatctcgcaatggcattcctgaagtggcgtctagactgttggacgtgacgccaacaagcaagtttgaggacaacttggttggacccgacaaggaagtcgtgtttcccctggacattggtattgtaggctgggccgcacacacaaagaaaacgcataatgtacctgatgttaagaaaaattctcacttcagtgatttcatggacaaacagacaggatatgtgactaaaaatctgcttgcgacccccatcgtcgtggggaaggaggtgctcgcggtgatcatggcggttaataaggttaatgcatccgaattctctaagcaggatgaggaggttttcagcaagtacttgaatttcgtctccatcatcctacgcctgcaccacacttcctacatgtacaacattgagagcagacggtctcaaatacttatgtggtcagccaataaggtctttgaagagctgactgatgtcgaaagacagtttcacaaagccttgtatacagtcagatcataccttaactgtgagcggtattcgataggactgctggacatgactaaggagaaggagttttacgatgagtggcctataaagctcggcgaagttgaaccatacaagggccccaaaacccctgatggacgcgaggtgaatttttacaagatcatcgactacatcctacacggaaaagaggaaattaaggtgataccgaccccacctgcagatcattggacactgatcagcgggctacctacatatgttgcagagaacggattcatctgcaatatgatgaacgccccagctgacgaatactttacatttcagaaaggtccggtcgacgaaacagggtgggtcataaagaacgtgctgagcctgccgattgttaacaaaaaggaagacattgttggtgtggcgacattttataatagaaaggatgggaaaccattcgacgagcacgatgagtacatcaccgagaccctcacccaattcctcggatggtcactgctgaatacagatacttacgataaaatgaacaaattggaaaaccggaaagacatcgcacaagagatgctaatgaaccaaactaaagccacacccgaggagattaaatcgatcttgaagtttcaggagaagctcaacgtggatgtgatcgacgattgcgaggaaaagcagctggtggcgatcctcaaagaggacttgcccgacccccgttccgccgagctctacgaatttcggttctcagattttcctttgacagagcatggcctgattaagtgtgggatccgattattttttgagataaacgtcgtagaaaagttcaaagtcccggtcgaggtcttgacccggtggatgtacactgtcagaaaaggctaccgcgccgtgacataccataattggcggcacggatttaacgtgggtcagacgatgttcaccctgctgatgaccgggcggcttaaaaagtattacacagacctggaagcatttgccatgctcgcagctgccttttgtcatgacatcgaccaccgtggcacgaataatctctaccagatgaaaagtacatctcctctcgctaggctgcacggctcaagcatcctcgaaaggcaccacctggaatattccaaaaccttactgcaagatgaatcattgaacattttccagaacttgaataagcgacagttcgaaacggttatccacctgttcgaagtagctattatcgccacagaccttgccctctatttcaaaaagcggaccatgttccaaaagattgtggatgcctgtgaacagatgcagactgaggaggaggccatcaagtacgttacagtggaccccactaaaaaagagatcattatggccatgatgatgaccgcatgtgacctatcagctattactaaaccctgggaagtgcagagccaggttgcactgatggtggcaaatgaattctgggagcaaggagacttggagagaacagtgttgcagcagcagcctatccccatgatggacagaaacaagagagatgagttgccgaagctgcaggtgggattcatagactttgtctgcactttcgtctacaaggaattttccaggtttcacaaagaaatcacccctatgctttctggcctgcaaaacaaccgtgtggaatggaagagcctggctgatgaatatgatgcgaaaatgaaggttatcgaagaggaggccaaaaagcaggagggcggggcagagaaggcagcggaggactctgggggcggcgacgacaagaagtctaaaacctgcctaatgctgtag

SEQ ID NO: 128555 - DNA, 453 bp, synthetic construct
  misc_feature 1..453: note = Description of Artificial Sequence: Synthetic coding sequence
  source 1..453: mol_type = other DNA
atgtcagccaaagatgagagggcaagagaaatcttaaggggcttcaaactaaactggatgaatctccgtgacgccgagacaggcaaaatcttatggcagggcaccgaggatctttcggttcccggcgtggaacacgaagcacgagtgcctaagaagattctaaagtgtaaggcagtgtcgagagagcttaattttagctccactgaacagatggaaaagtttcgcttagagcaaaaggtatatttcaaagggcaatgtttagaggagtggtttttcgagtttggcttcgtgattccgaacagtacaaatacgtggcaaagcctgattgaggcagccccggagtctcagatgatgccagcttcggtgctgaccggaaacgtcattatagaaactaaattcttcgacgatgatttacttgtatcaacatcgagagtgcgtctattctatgtttag

SEQ ID NO: 128556 - DNA, 414 bp, synthetic construct
  misc_feature 1..414: note = Description of Artificial Sequence: Synthetic coding sequence
  source 1..414: mol_type = other DNA
atgaaacagcgtgacaagggtcgcggctggcaccccgcagagggaggccctgctctaacggcccaaccgcctgaaaccagaccggcgctggaccgctctagacgggaatcaagaagtcaagggtgtagaggcgtgtccgtgagccttacaatgaacttagagccccccaaggcagagttccgcagcgccacgcgggtagcgggaggcccagtaacgcccagaaagggtcctcctaagtttaaacaacgacagacacgccagtttaagtctaagcccccaaagaagggtgtccaggggttcggagacgacatcccgggaatggaggggcttggtactgacattaccgtcatttgcccctgggaagcttttaatcacttggaactgcacgagttggctcagtatgggatcatttag

SEQ ID NO: 128557 - DNA, 264 bp, synthetic construct
  misc_feature 1..264: note = Description of Artificial Sequence: Synthetic coding sequence
  source 1..264: mol_type = other DNA
atgaatctggaacctcctaaagccgagtttcggtccgccacaagagtagcgggcggcccggtaacacctagaaagggtccaccaaaattcaaacagcgccagactaggcagttcaagtctaaacctcccaagaaaggtgtgcaaggtttcggcgatgacataccaggaatggaggggctgggaacagacatcacggtcatttgcccttgggaagcttttaaccacttagagctccacgaactggcccagtacggaatcatctag

SEQ ID NO: 128558 - DNA, 252 bp, synthetic construct
  misc_feature 1..252: note = Description of Artificial Sequence: Synthetic coding sequence
  source 1..252: mol_type = other DNA
atgtcggataacacaacgttaccagcccctgctagtaatcaaggcccgacaacaccacgaaaggggcctccaaaattcaagcagaggcaaacccgacaatttaaatccaaaccccctaagaaaggtgtcaaaggattcggcgacgatattcccggaatggaggggttgggaacagacattacagtgatctgcccatgggaggcttttagtcacctggagctccatgagttggctcaattcggaatcatctag

SEQ ID NO: 128559 - DNA, 1371 bp, synthetic construct
  misc_feature 1..1371: note = Description of Artificial Sequence: Synthetic coding sequence
  source 1..1371: mol_type = other DNA
atgggcataacactgatctggtgcttagctctggtgttaatcaagtggatcaccagcaaaaggaggggagctatttcctacgatagctccgaccaaaccgccttatacattaggatgctgggtgacgtccgcgtgcggtctcgtgccggctttgagagcgagcgccgtggatctcacccatatattgacttccgcatctttcactcgcaaagcgagattgaggtatcagtctctgcaaggaatattcgtaggttgttaagcttccagcggtaccttcgaagctcaaggttttttcgagggacagcggtcagtaattcccttaatattctcgacgacgattataacgggcaggccaaatgtatgctggagaaggttggcaactggaacttcgatatattcctgtttgatcgattgacaaacggcaatagcctggtgtctctgactttccacctgtttagcctgcatggcttgatagagtattttcatttggatatgatgaaattaaggagattcctggtaatgattcaagaagactaccacagtcaaaatccttatcataacgccgtacatgcggcggacgtaactcaggctatgcactgctacctgaaggaacccaagttagctaacagtgtcaccccctgggacattctgttgtcactgatcgctgcagcaactcatgacttggatcaccccggagtgaaccagccattcctcatcaaaacgaaccattacttggctacactgtacaaaaacacatctgtgcttgaaaatcaccattggcgatctgccgtagggctactacgagagagcggactctttagccacctcccattggagagcagacagcagatggaaacacaaattggcgcactgatcctagcaacagacatatctcgacagaatgagtacctcagcttatttcgtagccacctcgataggggtgatctgtgtttggaggatacacggcacaggcatctggtgctgcaaatggccttgaagtgcgccgacatatgcaatccttgtcggacttgggagctctctaagcaatggtcagagaaggtgaccgaagagttcttccaccagggggacattgagaaaaaatatcatctaggcgtgagcccactttgcgatagacacaccgagagcatcgccaacatacaaatcggcttcatgacatatcttgttgagccccttttcaccgaatgggcacgcttttctaatacgcggctgtcacaaacgatgctagggcacgtcggcctaaataaggcttcgtggaagggcctacaaagggagcaaagctcttccgaagataccgatgccgcattcgagcttaatagccaacttctgccgcaggaaaataggctgagctag

SEQ ID NO: 128560 - DNA, 1275 bp, synthetic construct
  misc_feature 1..1275: note = Description of Artificial Sequence: Synthetic coding sequence
  source 1..1275: mol_type = other DNA
atggaagtctgctaccagctccctgttctgccgctggatagaccagttcctcagcatgttctgagtcgcagaggggcaatttcatttagcagttcaagtgctctgttcgggtgcccgaatcccaggcagctgagccagagacgcggcgcaatctcatatgactcatctgatcagacagccctgtacattcggatgttaggagacgtacgggtccgttcacgcgcagggttcgaatcagaacggcgggggagtcacccctatattgactttcgcatattccatagtcagagcgaaattgaagttagcgtttcagctcgcaacattaggcggctgctttcttttcagcgatatctgaggagcagtaggtttttccggggcacagctgtttccaattccctcaatatattggatgatgactataatggtcaggccaagtgcatgctcgagaaggtcggcaactggaattttgatatattcctgtttgatcgcttaaccaatggaaattctcttgtgtcattgaccttccacctcttttctttgcatgggctcatcgaatatttccatctcgatatgatgaagctgcggcgcttcctggtgatgatccaggaagactatcacagccagaatccatatcacaatgctgtccatgctgctgatgtcacccaagctatgcattgctatctgaaggaacccaagttagccaattcagtgacaccctgggacattctgctctccttgattgccgcggctacccatgacctggatcacccaggcgtaaaccaacccttccttatcaaaactaaccattaccttgctacgttgtataagaacacatctgtactcgagaatcatcattggcggtccgccgtgggcctgcttcgggaaagtggcttattttctcatttgccattggaatcaagacagcagatggagacccagatcggcgccctgattttagccactgacatcagtaggcagaacgagtacctttcactgttcagatcacaccttgatcgcggcgacctgtgcctggaggacacaagacatcgccacctcgtgttgcaaatggccctcaagtgcgcagatatctgtaacccctgcagaacatgggagcttagcaagcaatggagcgaaaaggtgactgaagaattcttccaccagggcgacattgagaaaaagtaccatctgggcgtgagccccctgtgtgacagacacactgagtccattgccaatattcagatcgggaactatacttatctggatatcgcaggttag

SEQ ID NO: 128561 - DNA, 1449 bp, synthetic construct
  misc_feature 1..1449: note = Description of Artificial Sequence: Synthetic coding sequence
  source 1..1449: mol_type = other DNA
atggaggtttgttatcagctgcccgtactgccactggatcgcccagtgccccaacacgtgctctcccgacgcggcgcaatctcattctccagcagttcagccttgttcgggtgccctaacccccggcaactgtcacagagacgtggcgcaatctcatacgattccagcgaccagacagccctgtacatcagaatgttaggagacgtgcgcgtccgctctcgagccgggttcgagagcgagcgacggggctctcacccctatattgatttcaggattttccatagccagtccgagatcgaagtcagtgtgtccgcacggaatattaggcgactgctctccttccagagatatctcagatctagtcggtttttccggggcaccgctgtctccaactctttaaacatcctggacgacgactataatggccaggccaagtgcatgttagaaaaagtagggaattggaactttgatatcttcctgtttgacagactcacaaacggaaatagtctggtgtcactgacatttcacctgtttagcctgcatgggctgatcgagtatttccatcttgatatgatgaaactccgaagatttctagtcatgattcaggaggattaccatagccagaacccttaccataatgccgtccatgcggcagacgttacccaggcgatgcattgctacttgaaggagcctaaacttgctaattccgtgacaccctgggatatccttctcagcttgatcgccgccgcaacacacgacctggaccatcccggagtgaatcagcctttcctgattaaaaccaaccattacctggccaccctctacaagaacaccagtgtgctggagaatcaccactggcggtctgccgtcggattgctgagagaaagtggcctatttagccatctccctttggaaagccgtcagcagatggaaactcagatcggagccctgatattggccaccgatatttcccgacagaacgagtatctatctctgttccgatctcacctggacaggggggacctatgtttggaggacactaggcaccgccatctcgtgcttcaaatggccttgaaatgcgccgacatttgcaacccttgccgcacatgggagctgagcaagcagtggagtgagaaggtcaccgaagagtttttccaccaaggtgatatagagaagaaatatcaccttggggtgtctcctctgtgcgaccgacacacagaatctattgcaaatattcagattggcttcatgacctatctggtggagcctctattcacggaatgggcccgctttagtaatacaagactgtctcagactatgctgggacacgttggtctgaataaggcgtcctggaaagggttgcagcgggagcagtccagttccgaggacaccgacgcggcgtttgaactgaattcccagctgttgccccaagaaaaccgacttagctag

SEQ ID NO: 128562 - DNA, 2490 bp, synthetic construct
  misc_feature 1..2490: note = Description of Artificial Sequence: Synthetic coding sequence
  source 1..2490: mol_type = other DNA
atggggtgcgccccatccattcacatctctgagaggctggtggccgaggacgcgccttccccggccgcccctcccctttcctcgggcggcccccgactgccccagggtcagaaaaccgctgccttgcctcgtaccaggggtgcgggacttctcgagagcgagctccgcgatggctcaggaaagaaagttgccgtcgccgacgttcagtttgggcccatgcggtttcatcaggaccagcttcaggtcctgctggtcttcacaaaggaggataaccagtgcaatggtttctgtagagcatgcgagaaagcagggtttaaatgcacagtgacgaaggaagcccaggccgtgttggcatgttttttggacaaacatcacgatatcattatcatcgaccacaggaacccccggcaactggacgctgaggcactgtgcaggagcataaggagctccaaattgagtgaaaacaccgtgattgtcggagtcgtcagacgcgtcgacagggaagaactcagtgttatgccctttatttcagctggatttacgagacggtatgtggagaacccgaacattatggcttgttacaacgagctcctgcaactggagtttggggaggtgaggtctcagttaaagctcagagcttgcaacagcgtcttcactgcactcgagaactctgaggatgctatcgaaatcacttcagaggaccggttcatccaatatgcaaatccagcctttgagaccaccatgggctaccagagtggtgaactgattggcaaggagctcggagaggtacctataaacgagaagaaggcggacctcctggacacaataaactcatgcatccgaataggtaaagaatggcagggcatttactatgctaaaaaaaaaaacggggataacatccagcagaatgtgaagatcattcctgttataggacagggtggaaagatccgacattatgtgagcatcatccgtgtctgcaacggaaataataaggccgaaaagatttcagagtgcgttcaatcagatacgcacacagataaccagacaggaaagcacaaggaccggagaaagggtagcctagacgtgaaagccgttgcctctagagccactgaggttagcagccagaggcgacacagctccatggcacgcattcactcaatgacaatagaggcgcctataactaaagtcatcaacatcattaacgcagcacaagagagtagtcctatgccagttaccgaggccctcgacagagttcttgagattctaagaactaccgaactgtattccccgcagtttggggctaaggacgatgatccccatgcgaacgatctggtagggggactgatgagcgacggattaagacgtctctctggcaacgaatacgttctcagtacaaagaatacacagatggtcagctccaacattatcacgcctatctccctggatgacgtgccgccccgcatcgccagagctatggagaacgaagagtattgggattttgatatttttgaacttgaggctgccacgcataatcgtcccttgatatacctggggcttaagatgttcgcgcggtttggcatatgcgaattcttacactgcagcgaatccacgcttcggtcttggttacagatcattgaagcaaattatcactcatctaatccatatcacaactctacccattcagctgacgtcctgcacgccactgcgtatttcctctccaaggaaagaataaaagagactctcgatccaattgacgaggtggccgctctgatagccgcaaccattcatgacgtcgaccatccaggacgaacaaacagcttcttgtgtaatgccggttcggaactggccattctctacaatgatacagcggtgctggagtctcatcatgccgctctggcctttcagcttacaacaggggacgataaatgtaacatattcaaaaatatggagcgcaatgactaccgtacattgagacagggtatcattgatatggtgttagcgacagagatgacaaaacactttgagcacgtgaataagtttgtcaactcaattaataagccactagccacccttgaggaaaatggtgagacggacaaaaatcaggaagtgatcaatacaatgctaagaacccccgagaacagaacactgatcaaaagaatgctaatcaagtgcgccgacgtttccaatccttgccgacccctccagtactgcattgagtgggcagccagaatttccgaggagtatttcagccaaaccgacgaggagaaacaacaagggctgcctgtcgtcatgcccgtattcgatagaaacacatgtagcataccaaagtcccagatatcgtttatcgattatttcattactgatatgtttgacgcctgggatgcatttgtcgacctgcctgacctaatgcagcatctcgacaataacttcaaatactggaagggcctggatgaaatgaaattgcgcaatctgcgccccccccctgagtag

SEQ ID NO: 128563 - DNA, 2352 bp, synthetic construct
  misc_feature 1..2352: note = Description of Artificial Sequence: Synthetic coding sequence
  source 1..2352: mol_type = other DNA
atggggtgtgcaccgtccattcatatcagcgagcgactggtggcagaagatgcacctagccctgccgctccgcctttgagtagcggcggcccacgcctgcctcaaggtcagaagacggccgctctgccgaggacgcggggcgctggactgctagaaagcgaattgagggacggatccgggaaaaaggtggctgtagccgacgttcagtttggcccgatgcggtttcaccaggatcagctgcaggtcttacttgttttcactaaggaagataaccagtgtaatggcttctgtagagcgtgtgagaaagcgggttttaagtgtacggtgacaaaggaggcgcaggcagtacttgcctgcttcctggataagcaccacgacatcattataatcgatcacaggaacccaaggcagttggatgctgaagccttatgtcgaagtattaggtctagtaaactttcagagaacaccgtaatagtgggcgtcgtgcgcagggtcgacagagaagagctgagtgtaatgccttttattagtgctggcttcacacggaggtatgttgaaaatcctaatattatggcatgttacaacgaactccttcagctggagtttggggaggtgcgttctcaactcaaactaagggcgtgtaattccgtgtttaccgccctagaaaactccgaggatgctatagaaattacatcggaagatagattcattcaggaatggcaggggatatactatgcgaaaaagaagaacggagataatattcaacagaacgttaaaataatccccgtcattggtcaaggaggaaaaattcggcactacgtgtcaattattcgcgtttgtaacggaaataacaaagcggaaaagatcagtgagtgtgtgcagagtgatacccacacagataatcaaaccggcaagcacaaggatcgccggaaaggaagccttgacgtcaaagcagtcgcctcacgggctacagaagtaagttcacagaggcggcattcatctatggccaggattcacagcatgaccatcgaggctccaatcactaaggtgattaacatcattaatgctgcccaggaaagctcacctatgcccgtgactgaggcattagatcgcgtgctggagatcctgcggaccacagagctgtactcaccccagtttggcgccaaagatgatgacccgcacgcaaatgatctcgtgggaggcctcatgtccgacggcttacggcgcttgagtggaaacgaatatgtgctgtcaaccaagaacacgcagatggttagttctaacattatcactcctatttctcttgatgacgtcccaccaagaatcgctcgggccatggagaatgaagaatattgggatttcgacatttttgaacttgaagctgcgacccataaccggcccctgatctatttaggattgaaaatgtttgctagatttgggatctgtgagttcttacattgtagcgagtccactttgagatcctggctgcaaatcattgaagcaaactaccattcctcgaatccttatcataacagcacacacagtgctgacgttctccatgccaccgcctattttctgtccaaagaacggattaaagaaacattggacccaatagatgaggttgccgcccttattgccgctactattcacgacgtggatcaccctggacgcacaaacagtttcctatgtaatgctggaagtgagctggccatcctttataatgatacggcagtcctggaaagccaccatgcggctctcgcgtttcagcttactaccggtgatgataaatgcaacatcttcaagaacatggaacggaatgactatcgaaccctccgccagggcattatcgatatggttctggcgacggaaatgactaaacacttcgagcatgtgaataagtttgtgaactccattaacaagcctcttgccacactagaggaaaatggggagactgacaagaatcaggaagttattaataccatgttacgaactcccgagaatcgtacgcttataaagagaatgctgatcaaatgtgctgacgtctcaaatccttgtagacctttacagtactgcatcgagtgggccgcacgaattagtgaggagtacttctctcagacagatgaggagaagcagcagggattgcccgtggtgatgcctgtcttcgacagaaacacatgctcaattcccaagtcgcaaatatccttcatcgattactttataaccgatatgtttgatgcctgggatgcatttgtggatctaccggatctgatgcagcatcttgacaacaactttaagtactggaaggggctggatgagatgaaacttcggaacctccgtccgccaccagaatag

SEQ ID NO: 128564 - DNA, 2490 bp, synthetic construct
  misc_feature 1..2490: note = Description of Artificial Sequence: Synthetic coding sequence
  source 1..2490: mol_type = other DNA
atggggtgcgctccaagcatccatatctccgaacggcttgtggctgaggatgcaccttcacctgctgctccaccattaagtagcggaggtcccaggttgccccagggtcaaaaaaccgcagccctgcctcgcacaaggggtgctggattgctggagtcagaactgcgagatgggtcgggcaagaaggtcgcggtggcggatgtgcagttcggaccaatgagattccaccaggatcagttgcaggttctcctcgtgtttacgaaagaagataaccagtgtaacgggttttgccgggcgtgtgaaaaggcaggctttaagtgcaccgtcacaaaagaggcccaggccgtactggcctgcttcctcgacaaacatcacgacatcatcatcatagaccaccgtaaccctcgccagcttgatgctgaggcgctctgtcggagtatcagatcctctaagctatctgaaaatacggtgatcgtcggggttgtccggcgggtggatagggaagagttgagcgtgatgccgttcatcagcgcagggttcactcggaggtacgtcgagaaccccaacatcatggcatgttacaacgaactgttgcaactggagtttggagaggtacgctcacagctaaagctacgggcttgtaatagcgtgtttactgctctggaaaactctgaagacgctattgaaatcaccagcgaggaccgcttcattcaatacgctaaccccgccttcgaaactaccatggggtatcagagcggcgagcttatcggcaaagaactgggcgaggtacccatcaacgaaaagaaggcggatcttttggataccatcaacagctgtatccgcattggaaaagagtggcaaggcatttattacgccaagaagaaaaacggtgataatatacaacaaaacgtgaagattataccagtaattggacagggagggaagatccgccattatgtgtcgatcattcgagtctgtaacggtaataataaagctgagaaaatctctgagtgtgtccagtcagatacccacacagataaccagacaggcaagcacaaagaccgcagaaagggttctttggatgtcaaggcagtggcatcgcgagcaaccgaagtgtcatctcagcgccgtcattcaagtatggcccggatccattctatgacaattgaggcacccatcacaaaagtgattaatataataaacgcagcgcaagaatccagccccatgcccgtaaccgaggctctggaccgcgttctggagatcttgcgcaccaccgagttgtattctccacagtttggagcaaaagacgacgaccctcatgccaatgatctagtcggagggctaatgagcgatggtttacgccgcctgagcggcaatgagtacgtgttgtcgactaagaacactcaaatggtgagtagcaatatcatcacgccaatcagcctcgacgacgtgccgcccaggatcgcccgtgcgatggagaatgaggagtactgggatttcgacatttttgagctggaagcggcaacacacaatcggcccttgatctacctgggtctcaaaatgtttgcaaggttcggcatttgtgagtttctgcactgcagtgagagcaccctgcggagttggctccagattatcgaagctaattaccactcgagcaatccatatcataattccacacatagcgccgacgtgctgcatgccaccgcttacttcctatctaaggagcggatcaaggagacgctggacccaattgatgaggtagctgccctcatagctgcaactattcatgacgtagatcatcctggaagaaccaactcctttctctgcaacgcggggagtgagcttgcaattttgtacaacgacacggccgttctggaatcacatcacgcagccctcgcctttcagctgactacaggggatgataaatgcaatatcttcaaaaacatggaacggaacgattaccgcactttgcgacaaggaatcattgatatggtgctcgctactgagatgacgaaacacttcgagcacgtgaataaatttgtcaactccatcaacaagccactcgccacactggaggagaatggagaaaccgacaaaaatcaggaggtcatcaacactatgctgagaactccagaaaatcggacactgattaaacgcatgctgatcaagtgcgctgatgtttctaacccttgccgacctctacaatactgtatagagtgggccgcgagaatatccgaggaatacttttcccaaaccgatgaggagaagcagcaggggttgccagtggtgatgcctgtgtttgatagaaacacatgttcaattcccaagtctcagatctctttcattgattactttataacggatatgtttgacgcttgggacgctttcgtggacctgccagatctgatgcagcacctggacaataacttcaaatactggaaaggactggacgaaatgaaactgagaaatttacgtccaccgccagagtag

SEQ ID NO: 128565 - DNA, 2274 bp, synthetic construct
  misc_feature 1..2274: note = Description of Artificial Sequence: Synthetic coding sequence
  source 1..2274: mol_type = other DNA
atgaggttccaccaggaccagctacaggttctcctcgtttttacaaaggaggacaatcagtgcaacgggttctgtagggcttgcgagaaagcaggttttaaatgtacagtcaccaaagaagcccaggccgttctcgcttgtttccttgataaacaccacgacatcatcatcattgaccataggaaccccagacaattggacgcagaggcactgtgcagatcaatcaggagcagcaaactgagcgagaacaccgttatcgtgggcgtggttaggagggtcgacagggaggaactcagtgtgatgccctttattagcgctggctttacacgtcggtacgttgagaaccctaacatcatggcctgctacaacgaactgctgcaacttgagttcggtgaggttcgctctcagcttaagctcagggcttgcaacagcgtgttcacagccctggagaattcagaagacgccatcgagatcacctcagaagaccgattcatccagtacgctaatcccgcattcgaaaccactatgggctatcaaagtggggaattaatcggcaaagagctgggagaagtacccattaacgagaaaaaggctgacctgctcgacaccataaactcatgcattcggatcgggaaggagtggcagggcatctattatgctaaaaaaaagaacggtgacaacatccagcaaaacgtcaaaattattcctgtcattggtcaggggggtaaaatcaggcattatgtttctatcattcgtgtttgtaacggcaataacaaggcagaaaagatctctgaatgtgtccagtctgacacacatactgacaatcaaaccgggaagcacaaggaccggagaaagggcagccttgacgtgaaagctgtggcttcccgcgccacggaggtctcttcccagcgtcgacactctagcatggcacggatccacagtatgaccatcgaggccccgattaccaaagtgatcaatattattaacgctgcgcaggaaagctctccaatgcccgtgaccgaggccctggacagagttttggaaatcctgcgcaccacagagctgtacagtccccaatttggggcaaaggatgatgacccacacgccaatgacctggtcggaggcctcatgtcagatggattgagaaggttgagtgggaatgagtacgtgctctcaacaaaaaatactcagatggtgagtagtaatatcattacccctatatccttagatgatgtgccgccacgcatcgcacgagccatggagaatgaagagtattgggattttgacattttcgaacttgaggccgcaactcacaaccgcccactgatctatctgggactcaaaatgttcgccagatttggtatctgtgaatttcttcattgctccgagtctaccctgagatcctggctccagattattgaagcaaactaccattctagcaacccttatcacaacagcacccactcagccgatgtgctccacgccacagcctattttttgagtaaggaaagaatcaaagaaacgctggatccaattgacgaagtggctgcccttattgccgccactatccacgatgtggatcaccccgggcgcactaactcgtttctctgcaatgcgggaagcgagctcgcaatactgtacaacgacacggccgtgttggagtctcatcacgccgccttggcctttcagctcactactggagacgacaaatgcaatatcttcaaaaacatggaacggaacgactacaggacactcaggcaagggattatcgacatggtgctcgcgacggagatgaccaagcatttcgagcacgtaaacaaattcgtaaacagtataaacaagcctctcgctacactggaagagaacggcgagactgataagaatcaggaagtgatcaacacaatgctgcggacacccgagaaccggactttgatcaaaaggatgctcattaagtgtgcagatgtaagcaacccttgtcgccctctacaatactgtattgagtgggcggcccgcatttccgaagagtacttctctcagaccgatgaggagaagcaacagggcttgccagtggttatgccagtgttcgaccgcaacacctgctctatccctaagtctcagattagttttatcgactacttcattacagatatgttcgacgcttgggatgcatttgtggacctgccggatttaatgcagcacttagacaacaatttcaaatattggaagggattagatgagatgaagctacggaatctgcgcccacctcccgaatag

SEQ ID NO: 128566 - DNA, 2658 bp, synthetic construct
  misc_feature 1..2658: note = Description of Artificial Sequence: Synthetic coding sequence
  source 1..2658: mol_type = other DNA
atggggtgtgccccctctatccatgtgtcacagtccggtgtgatttactgcagggattctgatgagagcagctctcctcgccagaccacctcggtctcgcagggaccagcagccccactgcccgggttgtttgtgcaaacagatgccgccgacgctattcccccctcccgggcttccggcccaccatccgttgcccgcgtacgccgagccagaacggaactgggctctggtagtagcgctggcagtgctgctcccgcagcgacaacttccagaggcaggcgccgccattgttgctcatctgccgaggctgagacacaaacatgctacacttcagtcaaacaggtgtcaagcgctgaagttcggattggaccaatgaggctgactcaagatccaattcaggtactcctcatttttgccaaagaagacagccagtccgatggtttctggtgggcttgcgacagggctggatatcgttgcaatatcgccaggacccccgaatccgcacttgaatgctttctggataagcaccacgaaatcattgtgatcgatcacagacaaacacaaaattttgacgctgaggcagtctgccggagcatccgtgccactaatccatcggaacacactgtgatcttagcggtggtgtccagggtatccgatgatcacgaggaggcaagtgttctccccctgctgcatgcggggtttaacagacgatttatggagaattcatccattattgcttgctacaacgaattgatccaaatcgagcacggtgaagtgcgaagccagtttaagctgcgggcatgcaattcagttttcactgccctggatcattgccatgaggccatcgagatcacctccgacgatcacgtgattcagtatgtgaatcccgcatttgaaaggatgatggggtaccacaagggcgagctgctcggcaaagaactcgctgacctgcccaagtccgataaaaatcgcgccgacctactggacacaattaacacgtgtataaaaaaagggaaagagtggcagggcgtctactacgctaggcgtaaatccggcgactccatacaacagcacgtaaaaataacaccggtcattgggcaaggaggcaaaattcgccattttgtcagcctgaaaaaactgtgttgcacgacagataacaataagcagatccacaagattcaccgcgactctggagacaactctcagaccgaaccccactcttttcgctataaaaaccggcgcaaagaaagcatcgatgtgaagtcaatcagttcccggggatctgatgccccatctctccagaaccggcgttatcccagcatggcccgcattcattcaatgacaattgaagcaccaatcacaaaagtgattaatatcattaacgctgcccaggagaatagcccggttaccgttgcagaagcactggaccgcgtgctggagatcctgcgcaccactgagttgtactcaccccagctgggcactaaggatgaggatccccacacaagtgacctggtgggcggactgatgacagacgggctgaggagactgagtggcaacgaatacgtgttcaccaagaacgtccaccaatctcactcgcacctggcgatgccgattactattaacgacgtgcccccctgcatttcccagctactagacaatgaggagtcctgggatttcaacatcttcgagttggaggccatcacgcataagagaccccttgtatatcttgggcttaaagttttctctcgcttcggtgtctgcgagttcctgaactgctctgaaacgactcttcgggcatggtttcaagttatcgaagcaaactatcatagctctaacgcataccataactccacccacgcagccgacgtgctccacgctaccgccttctttctggggaaggagagagtaaaagggagcctggatcagctggacgaagtggcagccctcattgccgcaaccgtgcatgatgtggaccacccaggccgaactaactccttcctctgtaacgcggggagcgaacttgccgtgttatacaacgatactgccgttctggaaagtcatcacacagctctggcgtttcaacttaccgtcaaggataccaaatgcaatattttcaagaatattgataggaaccattaccgtacccttcggcaggcaataattgatatggttttagccactgaaatgaccaagcatttcgagcatgtgaataagttcgtcaatagcataaataagcccatggctgctgaaattgagggctccgattgtgaatgcaatcctgctggaaagaatttcccagagaatcaaatactgataaagcggatgatgataaaatgtgcagacgtggctaatccatgccggccccttgatctatgcattgagtgggctggcaggatctctgaggaatatttcgctcagacggatgaggaaaaaaggcagggactgccagttgtaatgccagtgtttgaccgaaacacctgctctattcccaaaagccagatcagtttcattgactactttattactgatatgttcgatgcctgggatgccttcgcacacctgccagctctgatgcaacacttagccgacaactacaagcattggaagaccctggacgatttgaagtgtaaatccctcagactgccctcagattcatag

SEQ ID NO: 128567 - DNA, 2493 bp, synthetic construct
  misc_feature 1..2493: note = Description of Artificial Sequence: Synthetic coding sequence
  source 1..2493: mol_type = other DNA
atgggatgcgccccctcaattcacgtgtcacagagcggggtgatttattgcagggactcagatgagtctagtagtcccaggcagactacgtcagtgtcgcaggggccagcagcacccctgcctggtcttttcgtccaaacagacgctgccgacgcaattcccccatcccgggcaagcggtcctccatctgtcgcacgcgtgcggagagcccgcaccgagttagggagtggcagcagcgccggcagcgcggctcccgctgcaaccaccagtagaggccgccgaaggcattgctgcagttctgctgaggctgaaacccagacctgctacaccagtgtgaaacaggtgtctagcgcggaggtgagaattgggcctatgcgcttaactcaggacccaatccaggtacttctaatttttgccaaggaggactcacagtccgatgggttttggtgggcctgcgatagggcgggctatcggtgtaacatagctaggacgcccgagagtgctctggagtgctttctggataagcaccacgaaatcattgtcatcgaccaccgacagactcagaactttgatgctgaagccgtctgccgaagtattagggccaccaatcccagcgaacacactgtcattctggcagtggtgtcgcgagtcagcgatgaccacgaggaggcatctgtcttgcccctgctccacgctggctttaaccgtaggttcatggagaacagcagtataatagcctgctacaatgagctgatccagatcgagcacggagaggtcaggtcccaattcaagctcagagcatgtaattctgtctttactgccctggatcactgtcatgaagcaatcgaaattacctctgatgatcatgtgattcaatacgtgaatccagcattcgagaggatgatgggttaccataaaggcgaactgctcggtaaggaacttgcagacctcccaaagtcggacaagaatcgagccgacctgcttgatacgattaacacctgtatcaaaaagggcaaagaatggcagggagtgtattacgcccggaggaaatctggggacagcatccaacagcacgtgaaaataacccctgtgataggacaaggtggaaaaatccgccattttgtgagcctaaagaagttgtgttgtactactgacaacaataaacagatccacaagatacacagagactccggcgataactcacaaacggaaccgcattcctttcggtacaagaataggagaaaggagagcattgacgttaagagtatctcgtctaggggtagtgatgctccttctctgcagaatcgcaggtacccaagtatggctcgaatacactccatgacgatagaggccccaatcaccaaggacgggttacggaggttgtccgggaacgaatacgtgttcacaaagaatgtgcatcaatcccattcccaccttgcaatgcctatcactatcaacgacgtccctccgtgtattagccagctgttggataatgaggagagttgggactttaatatttttgaattagaggccataacacacaagcgtcccctggtgtatctgggactgaaagtgtttagcaggtttggcgtttgcgagttccttaactgttcagagaccaccctgcgtgcttggtttcaagtgattgaggccaactatcactcgagcaatgcctatcacaactccacccacgccgcagatgttctgcacgcaaccgctttctttctgggcaaggagcgcgtcaaaggctcactagaccaactggacgaggtagcagccttaattgccgccacggttcatgacgttgaccaccccggacgcactaattcctttctgtgcaatgccggctcagagcttgccgtgctgtataacgataccgctgtgttggagagtcatcataccgcgcttgcgttccagctgaccgtgaaggatacaaagtgtaacatcttcaaaaatatagatcgaaaccattaccgaacattgcgacaggctattatcgacatggtgttagcaacagaaatgactaaacattttgagcacgttaacaaattcgttaacagcatcaataagcctatggccgctgaaatagaggggtcagattgcgagtgtaaccccgccgggaaaaacttccccgagaatcagatcctgatcaagaggatgatgatcaagtgcgccgacgtggcgaacccttgtcgaccactcgatttgtgtatcgagtgggccggtcgcatatctgaagaatactttgcccagacggacgaggaaaagaggcaaggcctgcctgtagtgatgcccgtttttgacagaaacacgtgtagtattccgaagtcacagatcagttttattgactatttcattactgatatgtttgatgcctgggatgcttttgctcacctgcctgctttaatgcagcacctggcagacaattataagcactggaaaactctagacgatcttaaatgcaagagcctgcgactgcctagcgattcttag

SEQ ID NO: 128568 - DNA, 2517 bp, synthetic construct
  misc_feature 1..2517: note = Description of Artificial Sequence: Synthetic coding sequence
  source 1..2517: mol_type = other DNA
atgggctgtgccccctccattcacgttagtcagagcggcgtcatctattgtagagactcagatgagagctctagccctcgccagactacttcagtctcacaggggcccgcagcccccttacccggcctgttcgtgcagactgacgctgccgacgccatcccgccatccagagcgtcaggacccccaagcgtggcccgagttcgaagagcccgcacagaactggggagtggctcgagcgcaggatctgccgcacctgccgctactacttctcgcggccgccggaggcattgttgctcttctgctgaggcagagactcagacctgctatacctctgtcaagcaggtctcaagtgcagaagtgaggattgggcctatgcggttaacacaagacccaattcaggtcttgctgatcttcgccaaagaggacagtcagagcgacggcttctggtgggcctgcgatcgagcagggtaccgctgcaacatcgcccggactcccgaaagcgcactggagtgcttcctggataaacatcacgaaatcatcgtcattgaccataggcagacccagaattttgatgctgaagctgtctgtaggtcaatccgggcgaccaacccttctgagcatacagtgatactggccgtggtttctagagtctctgacgaccacgaggaagccagtgtactgcctctgctgcacgctggcttcaatcgcagatttatggagaattcctctatcattgcttgttacaatgaattgatccagatagagcacggtgaggttcgctcacagtttaagctccgggcttgtaatagcgtcttcaccgccctcgaccattgtcacgaagcaatcgagattacttccgacgatcacgtgatccaggaatggcagggggtgtattacgcccgccgtaaaagcggggatagcatacagcagcacgttaagattacccccgtgatcggtcaaggagggaaaatccgccactttgtaagcctgaaaaaactctgctgtactaccgataataataaacaaatccacaaaattcaccgcgattccggagataattcacagacagaaccgcactcgttcagatataaaaatcgccgcaaggaatccatcgacgtgaagagcatcagcagcagagggtctgacgccccaagtttacagaataggagatatccctcaatggcccgtatacattctatgactatcgaggcccccatcacaaaagtgatcaatattatcaatgcggctcaagagaacagccccgttaccgtggcggaagctcttgacagagtcctagagatcctgcgcacgaccgaattgtattctccccagctggggaccaaggacgaagacccgcataccagcgacctcgtgggaggtttgatgacagacgggcttaggcggcttagtggcaatgaatacgtgtttacaaaaaatgtgcatcagtctcatagccatcttgccatgccgataactatcaatgatgtccccccatgtatttcgcagctccttgacaatgaggagtcttgggatttcaacatctttgagctagaggcaattacccataaacgtcccctcgtctatctgggccttaaggtcttttccaggtttggagtatgtgaattcctgaattgctcagagaccactttgagagcttggtttcaggtgattgaggctaactaccactcgtcaaatgcataccataacagtacccatgcagccgacgtgctacatgcaacagccttcttcttgggaaaagagcgcgtcaagggaagccttgatcagctggacgaggtcgccgccttaatcgcagccacagtgcacgatgtggatcaccccggccggactaattcgtttctgtgcaacgccgggtctgagctagccgtcctgtacaatgatactgccgttctggagagtcatcacaccgccctggcgtttcagctgaccgtaaaagatactaagtgcaatatctttaagaacattgaccggaaccattataggacccttagacaggccattattgacatggtactggccacagagatgactaagcacttcgagcacgtaaataaatttgttaacagcattaacaagcccatggccgccgaaatcgagggcagtgactgcgaatgtaaccctgccggcaagaatttccctgaaaaccagattttaatcaaacgtatgatgatcaagtgtgcagatgtagcaaacccatgccgacccctggacttatgtatcgaatgggctggccgaatttccgaggagtattttgcccagacggatgaagagaaacgccagggtctgcccgtggtcatgcctgtttttgatagaaacacctgtagcattcctaaatcacagatatcatttatcgattactttataactgacatgttcgatgcgtgggatgcctttgctcatctccccgcccttatgcaacatttagctgacaactataaacactggaagacccttgatgatctcaaatgtaaatccctgaggctgccatctgacagttag

SEQ ID NO: 128569 - DNA, 2598 bp, synthetic construct
  misc_feature 1..2598: note = Description of Artificial Sequence: Synthetic coding sequence
  source 1..2598: mol_type = other DNA
atgggctgtgctccatcaatccatgtctctcagtcgggcgtcatttattgcagggacagtgacgaatcaagttctccacgacagaccacaagtgtatcacagggacccgctgcaccattacccgggctctttgtgcagacggacgcggccgacgctattcctccaagccgcgcgagcggccccccctctgtggcccgcgtgcgcagagcacgaacggagcttggatccggatcctctgccggtagcgccgctccggccgccaccaccagcagagggaggcgacggcactgctgcagctccgcagaggcagagacccagacctgctacactagcgtcaaggtcctgctgatctttgctaaagaggactctcaatctgatggattctggtgggcctgtgacagagccggataccggtgcaatattgctcgcacccccgaaagcgccctggaatgttttctcgacaagcaccacgagatcatcgtcattgatcatcgccaaactcaaaacttcgacgcggaggcggtatgtcgttctatcagagccactaatccttcggagcatactgtaatcctggccgttgtgtcccgggtgtctgatgaccacgaggaagctagtgtgttgccgttgctgcacgcaggattcaatcgccgatttatggagaattcctcaatcattgcctgttataatgagctaatccagattgagcatggagaagtgcgctctcaatttaagctcagagcctgcaatagtgttttcacggccctggatcactgccacgaggccattgaaatcacttcggacgaccacgtcattcaatacgtgaatccagccttcgagcggatgatgggctaccacaaaggcgagctgctcgggaaggaactggcagacctgcccaagagtgataaaaatcgcgctgatctgctggatactattaatacctgcattaagaagggtaaggagtggcagggcgtctactatgcccgaaggaagtcgggcgatagtatccaacagcacgtgaagattacgcccgtaattggacaggggggaaagatcaggcacttcgtgtctctgaagaagctgtgctgcaccacagacaataataaacaaatacataagattcacagggatagcggagacaattcccaaactgaaccccacagctttcgctacaaaaacagacgcaaggaatccattgatgtgaagagcatatcctctagagggagtgatgccccctcactgcaaaacaggcgctatccctccatggcgcggattcattcaatgaccatagaggctccaattactaaagtgatcaatattattaatgcagcacaggagaattccccagttaccgtggcagaagcacttgatcgtgtcctggaaatcctcagaaccactgaactgtatagtcctcagctgggcaccaaagatgaggaccctcacaccagtgacctcgtaggcggtctgatgaccgatggattgcgcaggctgtctggcaatgaatacgttttcaccaaaaacgtccatcagtcacatagccacctcgccatgcctataacaattaatgacgtgccaccctgtatttctcaactactagataatgaggagagttgggactttaacatatttgaactggaggcgataactcataaacggcccctagtgtacctcggactgaaagtgttttctcgcttcggcgtgtgcgagttcctgaattgttctgaaaccacactgcgggcctggttccaggtaatcgaggcaaattatcactcatcaaacgcgtaccacaattctacacacgccgctgacgtgctgcacgcaactgcgttcttcctcggtaaagaacgcgtgaagggcagcctggaccaactggacgaggtggcagcgctgattgcggccacggtgcacgacgtcgatcatccgggaagaaccaacagttttctctgtaacgcgggctctgagctggctgtactgtacaacgacacggcagtactcgagtctcaccatacagcactggcatttcaactaacagtgaaggatactaagtgcaacatatttaagaatatagaccgcaatcattaccgcaccctacgacaggctattatcgatatggttctagctacagagatgactaagcactttgaacacgtaaacaaattcgttaactccattaacaagcccatggcagcggaaatagagggatctgactgcgagtgcaacccagctgggaagaatttcccagaaaatcagattctaataaagcgcatgatgataaaatgtgcagatgtcgctaatccatgcaggcccctggatctgtgcatcgagtgggccggcagaatctccgaggagtacttcgcccagacggatgaagagaagcggcaggggctgcccgtcgtgatgcccgtgttcgatagaaatacatgttccattcctaagtctcagattagcttcattgactatttcattacagacatgtttgatgcctgggacgcattcgcccacctcccggccttaatgcaacacctggcggacaactacaaacattggaaaactctggatgacctcaaatgcaagtctctacgactgccatcggattcgtag

SEQ ID NO: 128570 - DNA, 2367 bp, synthetic construct
  misc_feature 1..2367: note = Description of Artificial Sequence: Synthetic coding sequence
  source 1..2367: mol_type = other DNA
atgggctgtgcaccttccatccatgtctcacaatcaggggtgatttactgtcgggacagcgatgagagctcatcgcctagacagaccacctctgtgtcccaggggccagcagcccctctcccaggcctgttcgtgcagacagatgctgctgacgccatccccccgtccagggcaagcgggccacccagtgtggcccgagttcgtcgcgcccggacagaactgggatccggaagctcagccggctccgcagcccctgctgcgacgacgagcaggggccgtaggagacactgctgttcttccgccgaagctgaaactcagacttgctataccagtgtgaagcaggtttcctcagccgaagttagaatcggaccaatgagactgacccaagacccaatccaggtgctcttgatcttcgcaaaggaggatagccagagcgacgggttttggtgggcctgtgacagagcaggctatagatgcaatatcgctagaacccccgagagtgccctcgagtgttttctcgataagcaccacgaaattatcgtcatcgaccacagacaaactcagaatttcgatgctgaggccgtgtgtagatctatccgcgcaactaaccccagcgagcacaccgtgatccttgcggtcgtgtctcgggttagtgacgaccacgaggaagcatccgtcttgcccctgctgcacgccggttttaataggcggtttatggagaatagctctataatagcatgctacaatgagctaatccagatcgagcacggcgaagtccgatcccagtttaagctgagagcttgcaacagtgtgtttacggcactcgaccactgtcacgaagcaatcgaaattacgagcgatgaccatgtgattcaaattcataagattcaccgtgactctggtgacaatagccagacggagccccatagctttaggtataagaatcggagaaaagagtccattgatgtgaaatctatcagctctcgcggctctgacgcaccttctctgcagaatcggagataccctagcatggcccggatccattccatgacgatagaggctcccatcaccaaggtgatcaatattataaacgcagctcaagagaattcgcctgtgacggttgccgaggcactggacagggtgctggagatcctacggaccacagagctgtacagtccacagctgggcaccaaagacgaggacccccacacgagcgaccttgttggtggactcatgacggacggactgcgcaggctatcagggaacgagtacgtgttcaccaaaaatgtacaccaatcacactcacatctcgcaatgcccataactatcaacgatgtgccaccatgtataagtcagctgctcgataacgaggagtcctgggacttcaacatttttgagcttgaggccatcacacataaacgaccccttgtgtatctagggctgaaagtattctcccggtttggggtttgtgaattcctcaactgtagtgagactaccctgcgcgcatggtttcaagtgatcgaagccaattaccacagtagcaatgcctaccacaatagcacccatgcagctgatgtacttcacgccaccgctttctttctaggcaaggagagggtaaagggatctcttgaccagttagacgaagtcgcagccttgattgccgctacagttcatgacgtcgaccatcctgggcgcaccaattctttcctgtgcaatgccggcagcgagctagcagtgctgtacaacgataccgcagtgctggagagccaccatactgccttggcttttcagcttaccgttaaggacactaagtgtaacatatttaagaacatcgaccgaaaccactatcgcactctccggcaggcaatcatcgacatggtgttggctacagaaatgaccaagcatttcgagcatgtgaacaagttcgttaattccattaataaacctatggcagcggagatcgaggggtcagactgtgagtgcaaccctgctgggaaaaacttcccagagaaccagattctcataaaaagaatgatgatcaagtgcgccgacgttgccaacccatgccgacctcttgatttgtgcattgagtgggctggcaggatttcagaggagtatttcgcccaaaccgatgaagagaagcgccagggattgccggtggtgatgccagtcttcgacagaaatacttgctctattccaaagtcccagatcagttttatcgattacttcattacagatatgttcgatgcctgggacgcattcgctcatttgcctgccctcatgcaacacctcgctgacaactacaaacactggaaaacactggatgatctgaaatgcaagagtctgaggcttccctcagactcctag

SEQ ID NO: 128571 - DNA, 1053 bp, synthetic construct
  misc_feature 1..1053: note = Description of Artificial Sequence: Synthetic coding sequence
  source 1..1053: mol_type = other DNA
atgcccatcactattaacgatgtcccgccctgtatcagccaactgctggacaacgaggagagctgggatttcaatatcttcgagctagaggccataacacataaaaggcccttagtgtacctgggactaaaagtgttttccaggttcggcgtttgtgaatttctgaactgtagcgagactacgctgagggcatggtttcaggtgatcgaagcaaactaccattcatccaatgcctatcataactccacccacgctgccgacgtgttgcatgctacagccttcttcctgggaaaggagagggttaagggtagtttggatcagttagacgaagtggccgcgttaatcgccgcaaccgtgcacgatgtggaccatcctgggaggaccaactcattcctctgtaatgccggatccgagcttgccgtactgtataatgacaccgcagtcctggagtctcaccacaccgctctagccttccaactcactgtgaaggacacaaaatgcaatatttttaagaacatcgatagaaatcattacaggacattaaggcaggctataattgacatggtgctggcaaccgaaatgaccaagcacttcgagcacgtgaataaatttgtcaacagcataaataagcccatggcagccgagattgagggctctgactgcgaatgcaaccccgccggaaagaatttcccggagaaccagatcctaatcaaacggatgatgatcaagtgcgcggatgttgccaacccatgtagaccactggacctttgcattgaatgggcaggcaggatcagtgaggagtatttcgctcagacagatgaggagaaaagacaaggtctgcctgtggttatgccagtgtttgatagaaacacctgctcaatccccaaatcacagattagctttatcgattattttatcaccgacatgttcgatgcatgggatgcatttgcccatctcccagcactgatgcaacacctcgctgataactacaaacactggaagaccctcgatgacctgaaatgcaagtccttacgtctgccttccgactcttag

SEQ ID NO: 128572 - DNA, 1782 bp, synthetic construct
  misc_feature 1..1782: note = Description of Artificial Sequence: Synthetic coding sequence
  source 1..1782: mol_type = other DNA
atgggctcaggctctagcagttacaggcccaaggccatctatctggacattgacggccggatccagaaagtgatcttttcaaaatattgcaactcctctgatatcatggacctcttttgcatcgccaccgggcttcccagaaatacaacgattagcctcctcacaaccgatgacgccatggtatccatcgaccctacaatgcctgccaactctgaaaggaccccctacaaagtgaggcccgtcgccataaagcaactatcggccggagtggaggacaagcgcaccacctccaggggccagtccgctgagagaccactgagagaccgacgcgtggtgggcttggagcagcctaggagggaaggagccttcgagtccggccaggttgagccgaggcctagagaaccacagggctgttatcaggaagggcagcggataccacccgaacgcgaagaactcatccagagtgtgcttgcccaagttgccgagcaattcagcagggccttcaaaataaacgagctcaaagcagaggtcgccaatcacctagctgtgctggagaagcgggtggaactggaagggcttaaggtggtggaaatcgagaagtgtaagtcagacattaaaaaaatgagagaagaactggccgcccgcagcagcagaaccaattgcccctgcaagtattcgttcctggataatcacaaaaagctcactcctcgccgcgacgttcctacttaccccaagtacctactatcccccgagaccattgaggcccttcgaaaacccacattcgacgtgtggctgtgggaaccgaatgagatgttatcttgccttgagcacatgtaccacgatctcggactggtgcgagacttctcaataaaccccgttaccctccgcaggtggctcttctgtgtgcacgataactaccgcaataatccattccacaacttcaggcattgtttttgcgtggcacaaatgatgtacagcatggtatggctctgctccctgcaggagaaatttagccaaaccgatattctcatattgatgactgcggctatttgccatgacctagatcaccccggctacaacaatacttaccagattaacgcacgcacggaacttgcagtgagatataacgacatcagtcctctcgaaaaccaccattgtgctgtggctttccagatccttgccgagcctgagtgcaatattttctccaacatccctccagacggcttcaagcaaattcgccaagggatgataacactgatcctggctacagacatggccagacacgcagaaattatggactcatttaaagaaaagatggagaatttcgactattctaacgaggaacacatgactctactgaaaatgattttaatcaaatgttgtgatatttctaacgaagtacgaccaatggaggtggcagaaccatgggttgattgcctgttggaagaatacttcatgcagtccgacagagagaaatcggaaggccttccagtggcgcccttcatggatagggataaagttaccaaggctaccgcccagatcggtttcatcaaatttgtactgatccccatgtttgagacagtcaccaagcttttcccaatggtggaggagatcatgctacagccactgtgggagagtagggatcgttacgaggagctaaaaaggattgacgacgcgatgaaggagctgcagaagaagacagacagcctgacaagcggcgctacagagaagtctcgtgaacgctcaagagatgtgaaaaactcagagggcgactgtgcttag

SEQ ID NO: 128573 - DNA, 1704 bp, synthetic construct
  misc_feature 1..1704: note = Description of Artificial Sequence: Synthetic coding sequence
  source 1..1704: mol_type = other DNA
atgggctctgggtccagcagttacaggccaaaggctatctacttagacatagatggaagaatacaaaaggtcatatttagcaaatattgcaactcatccgacattatggacctcttctgcattgccacagggctgcccagaacgccttacaaggtgaggcctgttgcaattaagcaactgagcgctggcgtggaggacaaaaggaccacatcacgaggtcagtctgcggaaagaccactcagagaccgccgggtcgtcggactggagcagccaaggagagagggggctttcgagtccgggcaggtggagccaaggccacgcgaaccgcagggatgctaccaagagggtcaacggattcccccggagcgtgaggagctgattcagtcagttctggcccaggtggcagaacaattctctagagcatttaagatcaatgagctgaaggccgaggtagcaaaccacctcgcagtactcgaaaaaagagtagagttggaaggtctgaaagtcgtcgaaatagagaaatgtaagtctgatatcaagaagatgcgcgaggagcttgccgctcgctcatccagaacaaactgtccatgtaagtattctttcctagacaatcacaagaagttgacaccacggagggatgtacccacttaccctaaatacctgcttagtccagaaaccatagaggctctccgaaaacccactttcgacgtgtggctttgggagcccaatgagatgctcagctgcctagaacacatgtatcacgacctgggtttggtccgcgatttctctattaaccccgtaacacttaggagatggttattttgtgtgcatgacaactacagaaataaccctttccacaactttcgtcattgcttctgtgtggctcagatgatgtactcaatggtgtggctttgctctctccaggagaagttctcacagactgacattttgatcctgatgacggcagccatttgccacgatctggaccaccccgggtataacaatacctatcaaatcaatgcacggacagagcttgccgtccggtataatgacatctcgccactggagaatcaccattgcgcggtagctttccagattctggcagagcctgagtgcaacatattttcgaacatcccaccagatgggtttaagcagatccgccaggggatgattaccctgattctggccaccgatatggctagacacgctgagatcatggactcatttaaagaaaagatggagaacttcgactatagcaacgaggaacatatgaccctcctgaaaatgatcttgatcaaatgctgcgatatttctaatgaagtgagaccgatggaggtagccgaaccttgggtggattgccttcttgaagagtattttatgcagtctgatagggagaagagtgaggggctgccagttgcaccattcatggatagagacaaggtgacgaaggctacagcccagataggtttcattaagttcgttcttatcccaatgtttgagaccgtgacgaagttattccccatggtggaggagatcatgttacaacccctgtgggagtcacgagatcgatatgaagagctcaaaaggatagacgatgccatgaaagagctgcagaaaaagactgacagtctcaccagcggggccactgagaagagcagggaaaggagtcgagatgtaaaaaactctgaaggagattgtgcatag

SEQ ID NO: 128574 - DNA, 1476 bp, synthetic construct
  misc_feature 1..1476: note = Description of Artificial Sequence: Synthetic coding sequence
  source 1..1476: mol_type = other DNA
atgggcagcggaagctcaagttacagaccaaaggccatttatcttgatatcgacgggcgaatccagaaggaacatgaccatctcccagcggaccacaggagacggcacggtttgcaccgcccacaccatgccagagaatttcggactcactccgtccagtcggaaacctgtggccatcaggccaccctccgggcatttaagataaacgagctcaaggccgaagttgctaaccacctggcagtactagaaaagagagtggaactggagggcctcaaagtggttgaaatcgaaaagtgcaagtcagatattaagaaaatgcgcgaagaactggcggcgaggagctcacgtacgaactgtccttgcaagtattcttttctggacaaccataaaaaacttaccccaagacgagatgtgcctacttatcccaaatatttgctgtccccggaaacaatcgaagctcttagaaagcccactttcgacgtgtggctgtgggagccaaatgaaatgctgagttgtttagaacatatgtatcacgacctcgggcttgtcagggatttctcaatcaaccctgtaaccctccgtcgttggttattttgcgtgcatgacaactatcgcaacaatccctttcataatttccgtcattgtttttgcgtggctcaaatgatgtacagtatggtctggctgtgtagcctgcaggagaagttttcacaaactgacattcttatcctcatgactgcagctatctgccacgatctcgaccatccgggctacaataatacataccagattaacgccagaactgaactggcagtcaggtacaatgacatttcccccttggagaatcatcactgtgccgtggcatttcagattttggcggagcccgagtgtaacattttctcaaacatccctccagacggattcaagcaaatacgccagggcatgattaccctgattctggccaccgacatggctaggcacgcggaaatcatggacagtttcaaggagaaaatggagaacttcgactattcgaatgaggaacacatgacccttctgaaaatgatcttgatcaaatgctgcgacatcagtaatgaggttcgaccaatggaggttgcagagccctgggttgactgtttactcgaggaatactttatgcagagcgatagagagaaatccgaaggtctgcctgtggcaccattcatggacagagacaaagttaccaaggctacagcccagatcgggtttataaagttcgtgctcattcccatgttcgagaccgttacaaagctcttccctatggtggaagaaatcatgctccagcctctctgggagagtagagaccggtacgaggagcttaaacggatcgacgatgcaatgaaggagctgcagaaaaagacggatagtctcacgtccggcgccaccgagaaatcacgcgaacgcagtcgggatgttaaaaattcagaaggagattgcgcctag

SEQ ID NO: 128575 - DNA, 1602 bp, synthetic construct
  misc_feature 1..1602: note = Description of Artificial Sequence: Synthetic coding sequence
  source 1..1602: mol_type = other DNA
atgggaagcgggtcatcgagttacagacccaaagccatctacttagatatagacggccgtatccagaaagttatcttttcaaagtattgcaacagttctgacataatggatttattttgtattgcgactggcctcccccggaacacaaccatttccctgttaactaccgatgatgccatggtctctatcgatccaaccatgccagccaactcagaacggacaccctataaggtgcggcctgtggcaattaaacagctgtcagagcgtgaggaattaattcagtctgtgctcgcacaggttgcagaacagttttctcgggctttcaagattaatgagttaaaggccgaagttgctaaccatctcgccgtgctcgagaagcgtgttgagctggaggggctgaaggtcgtcgaaatcgagaaatgcaaatcagacattaaaaagatgagagaagagttggcagccagaagctcccgcacgaattgcccatgcaagtacagtttccttgacaatcataaaaaacttacaccacgacgggatgttcccacgtaccctaaatacctactgagccctgaaaccattgaagccctgcgcaagccaactttcgatgtgtggctgtgggaacccaatgaaatgttatcgtgtctggagcatatgtatcacgatctcggcctggtgagggacttttccatcaaccctgtcaccctaaggcgctggctgttctgcgttcacgacaattatcgtaataatcctttccataatttcagacactgcttttgtgtggcccaaatgatgtacagcatggtctggctgtgcagcttgcaggagaaattttcacagaccgacatactgatcttgatgactgccgccatctgtcatgatctggatcacccggggtataacaacacctatcaaatcaacgctcggacggagctcgcggtgcgttataacgacataagtccgttggaaaaccatcactgtgccgttgctttccaaattctggcggaacctgagtgtaacatcttctccaatattccacctgatggctttaagcagatccgacagggcatgatcacactcattctggctaccgacatggcacgccacgccgaaatcatggatagtttcaaagagaagatggagaactttgactatagtaatgaggagcatatgacgctcctgaaaatgatcttgattaaatgctgcgacatcagtaacgaggttagaccgatggaagtggccgagccttgggtggactgtcttttagaagagtacttcatgcagtcagatagggagaagagtgaaggactgcctgtcgctcctttcatggaccgagataaggtcactaaggcgaccgcccagatcggcttcatcaagtttgtgctcattcccatgttcgagaccgttaccaaactgttccctatggtggaggaaattatgctccagccactatgggagtctcgggatcgctacgaagagttgaaacgaattgatgacgctatgaaggaactgcagaagaaaacagactctctaacctctggtgccaccgagaagtcaagggagagaagtcgagatgtgaagaactccgagggagattgcgcctag

SEQ ID NO: 128576 - DNA, 1398 bp, synthetic construct
  misc_feature 1..1398: note = Description of Artificial Sequence: Synthetic coding sequence
  source 1..1398: mol_type = other DNA
atggggtccggatcaagctcctacaggcctaaggcaatttatctggacatcgacggaagaatacagaagcactccgtccagtcagagacatgcggacaccaagctacgctcagggcatttaagatcaacgagctcaaggccgaagtggccaaccatctggcagtcctcgagaagagagtggaactggagggcctgaaggtcgtggagattgagaaatgcaaaagtgacatcaagaaaatgagggaggagttggccgcacgaagttcacgtaccaactgcccctgtaagtattcctttttggacaatcacaaaaagttgactccaaggcgcgatgtaccaacctatcccaagtacctgctctcacccgagaccatcgaggctcttcggaaacctacgtttgatgtctggttgtgggagccaaatgagatgctaagctgcctggaacatatgtaccatgacttaggcttggtcagggactttagtattaatccggtgactctcaggcggtggctgttttgcgtgcacgacaactaccggaataacccatttcacaattttcgtcattgcttttgcgtggcccagatgatgtactctatggtctggctttgcagcttgcaggagaaattctcgcagacagatattctcattctgatgactgctgcaatctgtcatgacctagaccatcctgggtataataacacatatcaaataaatgctcgcacggagctggcagtccgctacaatgatatttcccctctagagaaccatcactgtgcggtagcttttcaaattctggcagagcctgagtgcaatatcttctccaacattccccctgatggttttaagcaaataaggcaggggatgataacactgatcctcgccaccgacatggcaaggcacgcggagattatggattcgtttaaggagaagatggagaacttcgactattctaacgaggagcacatgactctgctgaagatgatcctgataaagtgttgtgacattagcaatgaagtgcgccccatggaagtcgccgagccatgggtcgactgccttctagaagagtacttcatgcaatcagaccgggagaaatctgagggcttgccagtagccccctttatggatagggacaaagtgaccaaggctactgcccagatcgggtttattaagtttgtccttattccaatgttcgagacagtgacaaaattatttccaatggtcgaggagataatgcttcagcctctctgggaaagccgtgaccgctatgaggaattgaaacgcatcgacgatgcaatgaaagagttacagaaaaagactgatagtctgacaagcggtgccaccgagaagagcagggaacgctctagggatgtcaagaactcagagggagactgcgcttag

SEQ ID NO: 128577 - DNA, 1623 bp, synthetic construct
  misc_feature 1..1623: note = Description of Artificial Sequence: Synthetic coding sequence
  source 1..1623: mol_type = other DNA
atgggcagtgggtcatcgtcctaccgccccaaagccatctacctggacatcgatggacggattcaaaaagtcattttcagtaaatattgtaactcgagtgacatcatggatctcttttgtatcgcaactggacttcccagaaatacgactatttccctcctaacaaccgatgatgctatggtctcaatcgatccgactatgcccgcgaattccgaacggaacgagttgatcttgtacacttcgctgcgtaatctgcttttcctcccaagcaaagagagctgggcttcccatcaacatagcgtccagtcagaaacatgcggacatcaagccaccctgcgggcctttaagataaatgagctgaaggccgaagtggcaaatcacttggctgtgctcgagaaaagggttgagcttgaagggttaaaagtggtggagatcgagaaatgtaaaagcgatatcaaaaagatgcgggaggagcttgccgctcggtcatctaggacaaattgcccgtgcaagtactccttcctcgacaatcacaagaaactaacacccaggcgtgacgttcctacataccccaagtatctgctgagcccagaaacgatcgaggcattgcggaaacccacctttgacgtctggctatgggaaccgaacgagatgttgagttgtctggagcacatgtaccacgatctggggctggtgcgcgacttctctattaaccccgtgacactacggaggtggttgttctgcgtgcacgacaactacagaaacaatcctttccacaacttcagacactgcttctgcgtcgcccagatgatgtattccatggtgtggctatgcagcctgcaagagaaattctctcagacggacatccttatactgatgaccgccgctatttgtcatgacctcgatcacccaggctataacaacacttaccagattaacgcgaggaccgagttggctgtgaggtacaatgacatcagccctctcgaaaaccaccattgcgccgtggcattccagatcttggccgagcccgagtgcaacattttctccaatatcccaccagatggcttcaagcagatacgccagggtatgattactctgatactggctaccgacatggcaagacacgccgagattatggacagttttaaagaaaagatggagaacttcgactactcaaacgaagagcatatgactctcctgaagatgatactgattaaatgttgcgacatctccaatgaggtccgtcccatggaggttgccgagccctgggtggattgtcttctggaggagtactttatgcagtctgatagggaaaagagcgagggtctccctgtcgctccattcatggatcgggataaggtgactaaagcaacagcccagatcggctttattaaatttgtattaatccctatgtttgagacggttacgaaactctttcccatggtcgaggagatcatgctgcagcccctgtgggaaagtagagatcgctacgaggagctgaagaggatcgatgatgctatgaaagagctccagaaaaagactgattctctgacatccggcgccaccgagaagagcagggaaagatctagagacgttaagaacagtgagggagattgcgcttag

SEQ ID NO: 128578 - DNA, 1401 bp, synthetic construct
  misc_feature 1..1401: note = Description of Artificial Sequence: Synthetic coding sequence
  source 1..1401: mol_type = other DNA
atggatgccttcagaagcaccccctacaaagtgagaccagtagccatcaaacaactcagcgagagggaggagctgattcagagcgttctcgctcaggtggccgagcagtttagccgggcgttcaagattaacgagttgaaggcggaggttgccaaccacttggctgtgctggaaaaacgagtggaacttgagggtctgaaggttgtcgaaatcgagaagtgcaaatccgacatcaagaagatgagagaagaactggccgcaagaagttcacgcacaaattgtccctgcaaatatagctttcttgacaatcataaaaaactcacgccccgaagggacgttcccacctacccgaaatacctgctatcaccggaaactattgaagcccttcgcaaaccaacgttcgacgtctggttatgggaacccaacgagatgctgtcttgtctggagcatatgtatcacgatttgggtctagtccgggattttagcattaatcccgtgacactgcgaaggtggttgttctgtgttcatgacaattaccgcaacaacccgtttcacaacttccgacattgcttttgcgtggcacagatgatgtactccatggtatggctgtgtagcctccaggagaagttctctcagacggatatcctgatactgatgacagctgctatctgtcacgacttggatcatccgggatacaacaacacttaccaaattaacgcccgcaccgagctggccgtacgatacaacgatatttcccccctggagaatcaccactgtgctgtcgcttttcagatactggcagagcctgaatgtaacatattcagtaacatcccccccgacgggtttaagcagataagacaaggaatgatcaccctgatcctggccacagacatggcgagacacgcggagattatggattcctttaaagagaaaatggagaacttcgattatagcaacgaagagcacatgaccctactgaagatgatcctaatcaaatgctgcgacatttctaacgaggtgagacccatggaagtagctgagccgtgggtggattgtttgttagaagagtactttatgcaaagtgatagagaaaaatccgaggggttacccgtagccccgtttatggatcgcgacaaggtgactaaggccacggcacagatcggctttatcaaattcgtactgatccctatgttcgagaccgtgaccaagctgttcccaatggtcgaggagatcatgcttcagccgctctgggaatcacgcgatcgttacgaggaactcaagagaatcgacgacgcgatgaaagagctgcagaagaaaacagattccctgacctctggggcaactgagaaatcccgcgagagaagccgagacgtcaagaatagcgaaggcgactgtgcctag

SEQ ID NO: 128579 - DNA, 1659 bp, synthetic construct
  misc_feature 1..1659: note = Description of Artificial Sequence: Synthetic coding sequence
  source 1..1659: mol_type = other DNA
atggatgcatttcggcggaatacaacaatttcactactgaccaccgacgatgccatggtatcgattgaccctaccatgcccgcaaattccgagcggacaccttataaagtgcgaccagtggctatcaagcagttgtctgctggggtggaagataagcgcaccacaagccgcggccagtcagccgagaggccattgcgtgacagacgcgtagtcgggctggagcagccccgaagagagggggcctttgaatccggccaggtcgagcctagaccgagagagccgcaggggtgttatcaagaaggccagagaatacctccggaacgcgaggagttgatccagagtgttctggctcaagtagcggaacagttttctcgggcatttaagatcaatgagctcaaggctgaggtggctaatcatcttgccgtcttagaaaaacgtgtcgaattggaaggcctgaaagtggtggagattgagaaatgcaaatccgacattaaaaagatgcgcgaagaactcgcggccagatcatcaagaaccaactgtccttgtaagtatagcttcctggacaaccataagaaattaactccaagacgggacgtgcccacatacccaaagtatctcctgtctcccgaaactatagaggccctgcggaaacctacctttgatgtatggctgtgggagcctaacgaaatgctatcatgcctcgaacacatgtaccatgatctaggacttgttcgcgatttttctatcaatccggtcacactgaggcgctggctattttgcgtgcacgataattaccgcaacaacccgtttcataacttccggcactgcttttgtgtggcacagatgatgtatagcatggtgtggctgtgcagcctgcaggagaagtttagtcagacggacatactaatactcatgacagccgctatatgtcatgatctcgaccacccagggtataataatacatatcagattaacgcacggacagagctcgcggtgcgttacaatgatatctcccccctggaaaatcatcactgcgctgttgcctttcagatattagccgaacctgagtgcaacatctttagtaacattcctcctgacggatttaagcaaatcaggcagggtatgatcacgctgatactggccactgacatggcccgccatgctgagatcatggattcatttaaggaaaagatggaaaattttgattattcaaacgaggaacatatgacgctgcttaaaatgattttaataaagtgctgtgacatcagcaacgaagtgagacccatggaagtcgccgaaccatgggtcgactgcctgctggaggagtactttatgcagtcagacagggagaagagcgaaggactaccggtcgcccctttcatggacagagataaggttactaaggccaccgctcagatcggctttatcaaatttgtcctcatcccaatgttcgaaacagtcaccaaactatttcccatggtagaagagatcatgctgcagccgctctgggaaagtcgggacagatacgaagagctcaaaagaatcgacgacgccatgaaggagctccagaagaaaacggattccctgactagtggggccactgagaaatctcgcgaacgatcgcgtgatgtcaagaactcagagggggattgcgcctag

SEQ ID NO: 128580 - DNA, 1302 bp, synthetic construct
  misc_feature 1..1302: note = Description of Artificial Sequence: Synthetic coding sequence
  source 1..1302: mol_type = other DNA
atggacgccttcagacgggcctttaagatcaacgaattaaaagcagaagttgccaatcatctggcagtgctcgagaaacgtgtggaattggagggcctcaaggttgttgagatcgagaagtgtaagagcgatattaagaaaatgagagaggaactggcagccaggtcctcccggacaaattgcccttgtaaatattccttcttggacaaccacaagaagcttacgcctaggagggacgtgcctacttaccctaagtacttgctgagtccagagacaatcgaggcgctgcgcaaacctaccttcgacgtttggctgtgggagcccaatgagatgcttagctgtctggaacacatgtaccatgatctcgggctcgtgcgagacttctcgatcaaccctgtaaccctgcggcggtggttgttctgtgtacacgacaactacagaaacaatccatttcacaacttccggcattgcttttgcgttgctcagatgatgtactctatggtgtggctgtgtagcctccaagaaaaattctcccagaccgatattctcattctcatgaccgctgccatctgtcacgatctggatcatcccgggtacaacaatacgtatcaaatcaatgctagaacagaactggctgtcagatacaacgatatctcaccgttggaaaatcatcattgtgcagttgcgttccaaatcctggcggaacccgagtgtaacatcttttcgaatattccacccgatggattcaagcagatccgtcagggcatgatcacactcatcctcgctaccgacatggctcggcatgcagaaatcatggatagttttaaggagaagatggagaacttcgactactccaacgaggaacatatgactttgctgaagatgatcctgattaagtgctgcgacatctcgaatgaggttaggccaatggaggtggccgagccctgggttgactgcctgctggaagaatactttatgcagtcggaccgggagaaaagtgaagggttgcctgtggcccctttcatggacagagacaaggttacaaaggccaccgcacagatcgggtttattaagtttgtcctcatccctatgtttgagacagtgacgaagctgttccccatggttgaagaaattatgttacagcccttatgggagtcaagggatcgctatgaagaactcaaacgcattgacgacgcgatgaaagaattgcagaagaaaaccgatagcttgacctccggagccactgaaaagagtcgcgaacgttctagagacgtgaagaattcagaaggcgattgcgcctag

SEQ ID NO: 128581 - DNA, 1380 bp, synthetic construct
  misc_feature 1..1380: note = Description of Artificial Sequence: Synthetic coding sequence
  source 1..1380: mol_type = other DNA
atggacgcgttccgtcgtaacacgacaatctcactgctgacgaccgatgacgcaatggtgtccatcgatcccaccatgccagcaaactcagagcgcgcattcaaaattaacgaattgaaggccgaagtggcgaaccacctcgctgttctggaaaaacgcgtggagcttgaaggcttaaaagttgtggaaattgaaaagtgcaaaagcgatattaagaagatgagggaagagctagccgctagaagttcacgaacgaattgtccatgtaagtacagcttcctcgacaaccataaaaagcttaccccaaggagagatgtcccgacttaccccaagtacctgctgtcaccggagaccatagaggccctgcgaaagcccacgttcgacgtttggctttgggagccgaacgagatgttatcctgtcttgagcatatgtatcacgatctgggtcttgtcagggacttcagtataaacccggtgacactgaggcgctggttgttttgcgtgcacgacaactacaggaataacccattccataatttcagacattgcttctgtgtggcccaaatgatgtactctatggtgtggctctgctcgctccaagagaaatttagccaaacggatatcctgatcctcatgaccgcggccatatgccacgacctggatcatcccggttataataatacctaccagatcaacgcccggactgaactggcagttcggtataacgacatttcgccattggagaatcaccactgcgcagtggcctttcagattctggccgagcctgaatgtaatattttttcaaacattccgcctgatgggtttaagcagattcgacagggtatgataacactcattcttgctaccgatatggctcggcacgccgaaattatggactccttcaaggaaaaaatggagaatttcgactatagcaacgaggagcacatgacactgctgaaaatgatactcatcaagtgctgcgatatttcaaatgaagttaggcccatggaggtggcagagccctgggtggattgcctgctggaagagtacttcatgcagtccgaccgcgagaaatcggagggtttgcctgtggctccttttatggatcgtgataaggtgaccaaagcaaccgctcagattggatttattaagttcgtgcttatccccatgtttgaaactgtgactaagctcttcccaatggtcgaagagataatgctgcagcccttatgggagtcaagggataggtatgaagaactgaaacgaatcgacgatgcaatgaaggagctccagaagaaaaccgattccctcaccagtggggcgactgagaagagtcgggagaggtctagagatgtgaaaaattccgagggagattgtgcctag

SEQ ID NO: 128582 - DNA, 1581 bp, synthetic construct
  misc_feature 1..1581: note = Description of Artificial Sequence: Synthetic coding sequence
  source 1..1581: mol_type = other DNA
atggatgcgttcagatctaccccctacaaggtgcgccctgtcgctattaagcagctgagtgccggcgtggaggataagaggactacctcccggggccagtcagctgagcgacctttgcgtgatagacgtgtcgttggacttgaacagccacggcgagaaggtgctttcgaaagtggtcaggtggaacctaggccacgcgaaccacaaggctgttaccaagaggggcagcgcataccccccgaacgcgaagaacttatacagagtgtcctggcacaggtcgctgaacaattctcacgcgcattcaagatcaacgagctcaaagctgaggtcgcgaatcacctggccgtcttggagaaacgggtggaattagagggactgaaggtcgttgaaatcgagaagtgcaagtctgatataaagaaaatgcgcgaggagcttgccgctcgcagtagccgaacgaattgtccctgcaagtatagcttcctggacaaccacaaaaaattgactccccgtcgcgacgtgccgacttaccccaagtatctcctgagcccagaaactatagaggcacttcggaagcctacgttcgatgtgtggctgtgggaacctaacgagatgctgagctgcctggagcacatgtaccatgacttggggcttgtcagggactttagcattaaccctgtgactctgcgtagatggctattttgtgtgcacgacaactataggaacaacccatttcataattttaggcattgcttctgcgtggcccagatgatgtactccatggtttggttgtgttcactccaagaaaaatttagccagacggacatacttatcctgatgactgctgctatctgccacgacctggaccaccccggatataacaacacctatcaaattaacgcccggaccgagctggccgtcagatacaatgatatctccccgttagagaaccaccattgcgcagtcgccttccagatcctggctgaaccagaatgtaacattttctctaacatccctcccgacggctttaaacagatccggcagggaatgatcaccttgatcctggcaaccgacatggcccggcatgccgagataatggatagcttcaaggaaaagatggaaaactttgactacagcaacgaagaacatatgaccctacttaagatgatcctgattaaatgctgcgatatcagcaatgaggttcgccctatggaggtggccgagccgtgggtcgattgtttactagaagagtacttcatgcaatcggatcgcgaaaaatccgaagggcttcctgtggcacccttcatggacagagataaagtcaccaaagctactgcacagattgggttcatcaagttcgtacttatacctatgttcgagacagtgaccaaactttttcctatggtggaagagatcatgctgcagccactgtgggaatcccgagataggtacgaggagttgaagagaattgacgatgcaatgaaggaacttcagaaaaaaaccgacagtctgacttcaggcgccacagaaaagagtcgcgaacggtctagggatgtgaaaaatagcgaaggcgactgcgcatag

SEQ ID NO: 128583 - DNA, 1479 bp, synthetic construct
  misc_feature 1..1479: note = Description of Artificial Sequence: Synthetic coding sequence
  source 1..1479: mol_type = other DNA
atggacgcatttcggagaaatacgacaatctctttgctaacgactgatgacgcgatggtgagtatcgacccaactatgcctgcgaactctgaacggaccccatacaaagtaaggcctgtagccatcaagcagttaagcgagcgggaggagctcattcagtctgtgctcgcgcaagtggccgaacagtttagccgagcattcaagattaacgagctgaaggcagaggtggccaaccacctcgctgtgctggagaagcgggtcgaactggagggcctgaaagtcgtggaaatcgagaaatgtaaatctgatatcaagaagatgcgcgaagagctcgctgcacgaagctctagaaccaactgcccttgtaagtatagtttcttagacaatcataaaaaacttactcctcgccgcgatgttccgacctatcctaaatatctgctatcccccgaaacaattgaggcactgcggaaaccaacgtttgacgtgtggctgtgggagccaaatgagatgctgagctgtctcgaacatatgtaccatgacctcgggcttgttcgcgactttagcataaatcctgtcactcttcgtagatggctgttttgtgtgcacgacaactacagaaacaatccttttcataatttccgccactgcttctgtgtagcacagatgatgtacagcatggtgtggctctgcagtctccaggaaaagtttagccaaacagacatactcattctgatgaccgccgccatttgccatgatctagatcatcccgggtacaataatacataccaaatcaacgccagaacggagttagccgtccgatacaacgacatctcacctcttgaaaatcatcattgcgcagtggcctttcagatcctcgccgaacccgaatgcaacatctttagtaatatacctcccgatggcttcaaacagattcgacagggaatgattacactgattcttgcaacggatatggcccgacacgccgagatcatggattcatttaaagaaaaaatggagaactttgattatagcaacgaggagcacatgacactgctgaaaatgatcctaattaaatgttgtgacattagtaacgaagtgcggcccatggaagtggccgagccatgggtggattgcctactggaggaatacttcatgcagagcgacagggagaagtcagaaggtttgcccgtggcccctttcatggaccgcgataaggtgactaaggccacggcccagattggatttattaagttcgtactaattcccatgtttgaaacagtgactaagctgtttccaatggtggaggagattatgctccagcccctgtgggaatctagggatcgttatgaggagctcaagagaatcgacgacgccatgaaagagctgcagaagaagacagatagtctgacctctggtgccacagagaaatcgagggaaagatcccgtgatgtgaagaatagcgaaggcgattgtgcctag

SEQ ID NO: 128584 - DNA, 1524 bp, synthetic construct
  misc_feature 1..1524: note = Description of Artificial Sequence: Synthetic coding sequence
  source 1..1524: mol_type = other DNA
atgggttcaggttcgtcctcctatagacccaaggcaatctacctggatattgacgggaggattcagaaagtcattttctctaagtactgtaatagttccgacattatggatctcttctgcatcgccaccggcctgccccggactccttacaaggttcgccccgtggcaattaagcagttatcagaaagggaggagctgattcagtctgtgctagctcaggttgccgagcagttttcacgcgcttttaagataaacgaactgaaagctgaggtggctaatcaccttgccgtgctggagaagagggtggagctggaagggctgaaagtggttgagatcgagaagtgtaagtcggacatcaaaaagatgcgcgaagagctggccgcaaggagcagcaggactaattgtccttgcaagtactcttttttagataaccataagaaactgacccctagacgcgacgtacccacgtatccaaagtacctcctgagtcctgagactattgaggcgttgcgaaaacccaccttcgatgtctggctgtgggagcccaacgagatgctatcctgtctagaacatatgtaccacgacttggggctggtacgcgacttcagcatcaatcccgtgactcttcggagatggttgttctgcgttcatgacaattatagaaataaccccttccacaactttcgccattgtttttgcgtggcccagatgatgtactctatggtttggctgtgctccttgcaggagaaatttagccagaccgacatcttaatcctgatgaccgccgctatctgtcatgatctggaccaccctggatacaacaacacatatcagataaacgcaaggaccgagctggccgtgaggtacaatgatatctccccgctggaaaatcaccattgtgcagtcgcttttcagatcctcgccgaacctgaatgcaatatattcagtaacatccccccggatgggtttaaacagattagacaaggcatgatcacgctgattcttgccacggatatggcccggcatgcggagattatggacagtttcaaagagaaaatggagaacttcgactactctaacgaggaacacatgactcttctgaagatgatccttatcaaatgttgcgacatatcgaatgaagtcagaccgatggaggtggccgaaccctgggtggactgcttactggaagaatactttatgcagtcggacagggagaaatccgaagggcttcctgtggccccctttatggaccgcgacaaggtgactaaggcaacagctcagatcgggttcataaagttcgttcttataccaatgttcgagactgtgactaaacttttcccgatggttgaagagattatgctacagccgctttgggaaagccgcgataggtatgaagagctcaagcggatcgacgatgctatgaaagaattgcagaaaaaaaccgactcgctgacaagcggtgccaccgagaaatctagggaacgctccagggacgtgaaaaactctgaaggcgactgtgcttag

SEQ ID NO: 128585 - DNA, 1398 bp, synthetic construct
  misc_feature 1..1398: note = Description of Artificial Sequence: Synthetic coding sequence
  source 1..1398: mol_type = other DNA
atggatctgttctgcatcgccaccggacttccgagaaatacaaccatctctttgctgaccaccgacgatgccatggttagcattgaccccaccatgcctgccaacagcgagcgcgccttcaaaattaatgagttgaaggcagaggtggccaatcatttagcagtgctcgagaagagagttgaactcgaaggtctcaaggtggtggagattgagaaatgcaaatccgacattaagaagatgcgcgaggaactcgcagcaaggtcttctcgcacgaactgcccttgcaaatactctttcctcgataaccacaaaaaactgactcctcgaagagacgtccctacctaccctaaatacctcttaagccccgagaccattgaggcgctccggaaaccaactttcgatgtctggttatgggaaccgaacgagatgctgtcatgcttggagcatatgtatcatgatcttggtctggttcgtgacttctcgatcaacccggtgactctgagacgttggcttttctgcgtgcacgataattatagaaataacccgtttcacaacttcaggcactgtttctgcgtggctcaaatgatgtacagtatggtgtggttatgctcactccaggagaagtttagccagacagacatattaatcttgatgacagccgccatttgccacgacctggatcaccctggctacaacaatacttatcagatcaatgcacgtacggagcttgcagtgagatacaatgatatttcccctctggaaaatcaccattgcgccgtggctttccagattctagccgaaccggagtgtaacatcttcagcaatatccctcccgacgggtttaagcagattcgtcaaggcatgattacactgattttagccacagacatggcccggcacgccgagattatggattcattcaaagagaaaatggagaactttgactactctaatgaggaacatatgactctgctgaaaatgatcctgattaaatgctgtgacatttccaacgaggttagacctatggaagtcgctgagccatgggtggactgtctcctggaggagtattttatgcagtcagatagggagaagagtgaaggtttaccggtcgccccattcatggaccgcgacaaggtgacaaaggcaaccgcacaaatcggcttcatcaagttcgttcttattccaatgtttgaaaccgtgacgaagttgttccccatggtggaggaaatcatgctgcagcccctctgggaaagccgggatcggtatgaagaactgaaacgtatcgacgacgctatgaaggagctgcagaagaagacggatagcttgactagcggtgccacagaaaagtctagagagagaagcagggatgtgaaaaacagtgagggcgactgcgcttag

SEQ ID NO: 128586 - DNA, 1869 bp, synthetic construct
  misc_feature 1..1869: note = Description of Artificial Sequence: Synthetic coding sequence
  source 1..1869: mol_type = other DNA
atgccgcctcagctgcagaacggccttaatctgtccgccaaagtggtgcaggggtccctggattcactgccacaagccgtacgggaattcctggagaacaatgcggagttgtgtcagccagatcatatacacatctgcgatgggtcagaagaggagaacggacggctgctggggcagatggaggaagagggcatcctccggcgtctgaagaagtacgacaattgctggctggccctaactgatcccagagatgtcgcgcgcatcgaatccaaaacagtgatcgtcacgcaggagcagagggacactgtgcccatcccaaagacagggctgtctcagttgggccgctggatgagcgaagaagatttcgaaaaggcattcaacgcacgttttcccggatgcatgaaggggcgcaccatgtatgtcattccctttagtatgggcccgctgggatcacccctctccaagattggtattgagctgaccgacagtccgtacgttgtcgccagtatgcggatcatgactcggatggggacgccagttttggaggcagtcggggatggagagtttgtgaagtgtttacactccgtgggatgtccactgcctttgcaaaagccactggtgaacaactggccctgcaaccctgagcttacgcttattgcccacttacccgaccgccgcgaaattatctccttcgggtccgggtatgggggcaactctcttttaggaaagaagtgctttgccctgagaatggcctcacggttggcaaaagaggaaggctggcttgccgaacacatgctgattctgggtatcacaaaccccgagggggaaaagaaatatttagctgcagcctttccctcagcttgcgggaaaacaaacctggcaatgatgaacccaagccttccgggctggaaggtggagtgcgtgggagatgacattgcctggatgaagtttgacgcccaaggacacctgagggccattaatcccgagaacggcttcttcggcgtggcccctgggacttcagttaaaaccaatcccaatgccataaagaccattcaaaagaacaccattttcactaatgtggcggagaccagtgacgggggggtgtattgggaggggatcgacgagccgctggcttctggagtgacaattaccagttggaaaaacaaggaatggtctagcgaggatggagaaccttgcgcacaccctaattctagattctgcactcctgcctcccaatgtccaatcattgacgcggcctgggagagccccgagggggtgccgatagagggcataatattcggaggcaggcggcctgccggagtgccacttgtatatgaggcgctgagctggcaacacggcgttttcgtgggggcggccatgagaagtgaagccaccgccgccgccgaacacaagggtaaaattattatgcacgatcccttcgccatgcggcctttcttcggctacaactttggtaagtatcttgcacactggctgagcatggctcagcatccagcagcgaaactgcctaagatcttccatgtaaactggtttagaaaagataaagaaggaaagtttctatggcctggatttggagagaatagcagggttttggagtggatgttcaaccgcatagacgggaaggcatcaacaaaactcaccccaatcggttatatacctaaggaagatgcactgaacctcaaaggtctcggacatataaatatgatggagctcttctcaatctctaaagaattctgggaaaaggaagtcgaagatatcgaaaagtacctggaagatcaagtgaatgccgacctgccctgcgaaattgagcgagagatacttgccctgaaacagagaataagccagatgtag

SEQ ID NO: 128587 - DNA, 942 bp, synthetic construct
  misc_feature 1..942: note = Description of Artificial Sequence: Synthetic coding sequence
  source 1..942: mol_type = other DNA
atgaccacggggaggacaatgtacgtgataccattttccatgggccccctggggtctcctttgtccaagatcggaatcgagttaacagatagcccctatgtcgtggcatcaatgaggattatgacacgtatgggcacacccgtccttgaggctgttggggatggggaattcgtgaagtgcctgcattccgtggggtgtcctctgcccctccaaaagccactcgtcaacaattggccctgtaacccggagcttactctgattgcacatctccccgacagacgggagatcatttcattcgggtctggatacggcggtaatagcctgctgggaaagaaatgcttcgccctccggatggcatcccggctagccaaagaggagggatggctagccgaacatatgctaattctgggaattactaatcccgagggcgaaaagaaatatctagccgccgcttttccaagcgcctgcggcaaaacaaacctggctatgatgaacccttccttacctgggtggaaagttgaatgcgtgggagacgacattgcctggatgaaattcgatgctcagggacacttacgagctataaatcccgaaaacgggttcttcggggtggctccaggcacttctgtcaaaacgaaccccaacgcaatcaaaaccattcagaaaaataccatctttacaaacgttgccgagacatctgacgggggggtgtactgggagggtatcgacgagcctttagctagcggtgtgaccattacgtcatggaaaaacaaagagtggtcgtcagaagatggggtttccttaccagaggccctggtatgcagagcagctgggaccgcctgcctgagccaggcgcttacatccctctcactcagctacagggggaccctctgcccgccgcaactcgaggtcctgcatccttgtcaaccagtgcctcaccattag

SEQ ID NO: 128588 - DNA, 915 bp, synthetic construct
  misc_feature 1..915: note = Description of Artificial Sequence: Synthetic coding sequence
  source 1..915: mol_type = other DNA
accacgggtcatctgcgggctataaaccccgagaacgggtttttcggtgtcgccccagggacctcagtgaagactaatcctaacgcaataaaaaccattcaaaagaataccatctttacaaatgttgccgagaccagtgatggtggtgtatattgggagggcatcgacgaaccactcgcctccggagtcaccataacctcttggaagaacaaagaatggagtagcgaagacggtgaaccctgcgcccaccccaattctcggttctgtaccccagcttctcagtgtccaataattgacgccgcatgggagtcgcctgagggcgtcccaattgagggtattattttcggcggtaggaggcccgctggcgttcccctcgtgtacgaagctctgagttggcagcatggcgtcttcgttggtgccgcaatgaggtccgaggctacagccgctgctgagcacaagggaaaaattattatgcacgatccctttgccatgagacctttctttgggtacaacttcggtaaatacctggcacactggctgagcatggctcagcatcctgccgccaagctccccaagattttccacgtgaattggttccgtaaggataaagaaggcaagttcctttggcccgggttcggtgagaacagcagggtattggaatggatgttcaataggatcgacggaaaggcttcaacaaagcttacgcccatcgggtacataccaaaagaagacgccttgaatctcaagggcttgggccatatcaacatgatggagctattcagcatctctaaagagttctgggaaaaggaagtggaggatatcgaaaagtacttagaggaccaggttaatgcagacctgccttgcgagattgaacgggagattctggcgctgaaacagcgaattagccagatgtag

SEQ ID NO: 128589 - DNA, 918 bp, synthetic construct
  misc_feature 1..918: note = Description of Artificial Sequence: Synthetic coding sequence
  source 1..918: mol_type = other DNA
atgacgactgggcacctgagagccattaatcctgagaacgggttcttcggagtagcacctggcacatctgtgaagacgaatccaaacgctatcaagactattcagaaaaacaccatatttacgaacgtagcggagactagtgacggtggtgtgtactgggaaggaatcgatgaaccactggcatccggtgtcacgattactagttggaagaacaaggaatggagttccgaagatggcgagccctgtgcccatccaaactcaaggttttgcacccccgccagtcagtgcccgataatcgatgcagcctgggaatccccggaaggagttcccattgaaggtatcatttttgggggtcgccgacccgccggcgtgcctctggtctacgaagcattgtcctggcaacatggtgtgttcgttggtgctgccatgagaagtgaagctactgctgccgcagagcacaagggtaagatcataatgcacgacccgtttgctatgcgccccttctttggctacaacttcgggaagtatctcgcccactggctcagtatggcccagcaccctgcagctaagctgccgaagatattccacgttaactggtttcgaaaagataaagagggaaagtttctgtggcctggcttcggggaaaacagccgagttctagaatggatgttcaatcgtatcgatggtaaggcctccaccaagctgactcccattggctacatcccgaaggaggacgccctcaacctcaaaggccttgggcatattaacatgatggagctcttttccatctccaaagaattttgggagaaagaagtggaagacatcgagaaatacttggaggaccaggtgaacgctgacttaccctgcgagattgagcgagagattttagctctgaaacagcgcatctcccagatgtag

SEQ ID NO: 128590 - DNA, 1674 bp, synthetic construct
  misc_feature 1..1674: note = Description of Artificial Sequence: Synthetic coding sequence
  source 1..1674: mol_type = other DNA
atgtcagaccctgagatgggctgggtcccggagccccctaccatgacgctgggcgctagcagagtagagctgcgggtgtcctgtcatggcctattggatcgggacactctgactaaacctcacccctgcgttttactcaagctgtactctgacgagcaatgggtggaggttgagaggaccgaagtccttcggtcctgctcgagtcccgttttctcaagggtccttgctttggaatatttcttcgaagagaagcagcctttacagttccatgtgtttgatgctgaggatggcgcgacctcgccccgcaacgacacattcttggggtcaacagagtgtactctcggccagattgttagccagaccaaggtaaccaaaccactcctgcttaagaatggaaagacagctggcaagagcactataactatagtggccgaggaagtgagcggtaccaacgattacgtgcagttgaccttccgggcttacaaactggacaacaaagatctgttttccaagagtgatccctttatggagatttataagacaaacgaggatcaatcagaccaactcgtgtggcgcacagaggtggtgaaaaacaatcttaacccttcttgggaaccattccggctcagcctgcacagcttatgttcttgcgacgttcaccggccacttaagtttctggtgtacgactacgacagttctggaaagcacgacttcattggagaattcactagcaccttccaggaaatgcaggaaggcaccgcgaaccctggccaggagatgcaatgggattgcatcaaccccaagtacagggataaaaagaagaactacaaatcctctggcacagtagtcctggcacagtgcacagtggagaaggtgcacacatttttggattacatcatgggtggatgccagatctcctttactgtggcaatcgacttcactgccagtaacggcgacccaagatcaagtcagagtctgcactgtctgtccccaaggcagccaaaccactacttacaagcgttgcgagcggttggcggtatttgccaggactatgattcagacaaaaggttcccagcattcggttttggcgccagaattcctcccaacttcgaagtttctcacgactttgcaattaattttgaccctgagaatccggagtgtgaggaaatttcgggagtaattgcttcttaccgtcgctgtctgccccagatccagctctacggacccaccaacgtggcacccataataaacagggtcgcagagccggcgcagagagaacagtcaacaggccaagccacaaagtatagcgtccttctggttcttacagacggcgtggtgtccgacatggcagagactaggaccgcaatcgttcgagcttctcgtctgcccatgtctataatcattgtgggagtcggcaacgccgatttctccgatatgcggctcctggacggcgacgatggaccacttcgttgccctcgcggcgtacccgcggcgagagacatcgtacaattcgtacctttcagagactttaaggatgctgctccctccgccttggctaaatgcgtcttggcggaagttccacgtcaggtcgtcgagtactatgcctctcaggggatttcccccggggcgccacggccttgcaccttagccacgaccccatctccctcaccgtag

SEQ ID NO: 128591 - DNA, 1326 bp, synthetic construct
  misc_feature 1..1326: note = Description of Artificial Sequence: Synthetic coding sequence
  source 1..1326: mol_type = other DNA
atggccgctctatatcgccctggcctgagactcaactggcacggcctgtcaccactgggctggccaagttgccggtcgattcagacccttagggtactttccggagacttaggccagctgccgacagggattcgggatttcgttgagcatagcgcaagattgtgtcagcccgaggggattcacatctgtgatggaaccgaggcagagaatacagccacactaacactgctggaacagcagggcctcatccgcaaacttcctaaatataataattgttggctggctagaacagatcctaaggatgtggccagagtggaaagcaaaactgtgatcgtaactccgtcacaacgggacaccgtgcagctcccgcctggaggggcaaggggacaactggggaattggatgtcccccgccgattttcagcgggccgtggacgaacggttccccgggtgcatgcaagggcggacaatgtacgtgttgccttttagtatggggcctgtcggttctcctctgtcccgtatcggggtccagctgacagactccgcctacgtcgtggcatccatgcgcattatgacacggctggggacgcccgtcctccaggcactgggagacggcgactttgtcaaatgcctccacagcgtgggccagcctctgactggccaaggagagcccgtgtcccaatggccttgtaatccggagaagactctgatcggtcacgtgcccgaccaacgcgagatcataagcttcgggtctgggtatggcggaaactctcttctcggaaagaagtgtttcgcacttagaatcgcttcgcgccttgcccgggacgagggatggctggccgaacacatgctgattcttggcattaccagtcccgctggaaagaaaaggtatgtcgcagctgcatttccctcagcctgtggtaagaccaacctcgctatgatgagaccagctctgcctggatggaaggtggaatgcgtgggggatgacatagcatggatgcggtttgactcagaggggcgattgcgggcaattaatccagaaaatggctttttcggcgttgccccaggcaccagcgctacaacaaaccccaacgccatggctacaatccaaagcaacaccatctttaccaacgtggctgaaacatcagatggtggagtgtactgggagggcatcgaccagcctctacctcctggtgtaacggttacatcgtggttgggcaagccatggaaaccgggcatgtgcggcggtgaaggagtggcccagcccccaggtctgtccacgttgatggtggagaagctttcaccacagcccccgaccattttctag

SEQ ID NO: 128592 - DNA, 1521 bp, synthetic construct
  misc_feature 1..1521: note = Description of Artificial Sequence: Synthetic coding sequence
  source 1..1521: mol_type = other DNA
atgagccctgccgacttccagagggccgtggacgaaagatttcccgggtgtatgcaggggcgaacaatgtatgtgctcccatttagcatgggcccagtcggttctcctcttagcagaattggcgtccagctgacggacagtgcctatgtggtcgcttcaatgagaatcatgacccgcctggggacccctgtactccaggctctgggagacggagacttcgtgaaatgcctgcacagcgtaggccagcccctcacagggcagggcgaaccagtgtctcagtggccctgcaaccctgaaaagaccctgattggccatgttcccgaccaacgtgaaatcatatccttcggttccggctacggaggcaacagtttactagggaagaagtgctttgccctaagaatagcctcccgactcgctagggacgagggctggctggctgagcacatgctcattttaggcataacgtcccccgctggaaagaaacggtacgtggccgctgcctttccaagcgcttgcgggaaaactaacttagccatgatgagaccagccttaccaggatggaaagtggaatgtgttggggacgacattgcgtggatgcgctttgattctgaaggccggctccgggccatcaatcccgaaaacggattttttggggtggcgccagggactagcgctacaacgaatccaaacgccatggctaccatccagtcgaacactatcttcactaatgtcgccgaaacatcagatggaggagtgtactgggagggcatcgaccagcctttgcccccaggggtcacggttacctcatggctgggcaagccatggaaaccgggcgacaaggagccctgtgctcatccaaattcccgtttctgcgctcctgcacgccagtgcccaatcatggatcccgcgtgggaagctcctgaaggcgtgccgattgatgccatcatttttggaggtcgccggccgaagggtgtccctctggtttatgaggccttcaactggcgacacggcgtgttcgtcggttctgctatgcgaagcgagtcaactgctgcggcggagcacaaaggcaagatcattatgcacgatccgttcgcaatgcggcccttcttcggctataacttcgggcactatctggagcactggctttcgatggaaggtcggaaaggcgcccagttgccccgcatctttcacgtgaactggttccgacgcgacgaggcgggacacttcctgtggccagggtttggcgagaatgcccgggtgctcgactggatctgcaggcggttggagggcgaagattctgcgagagagaccccgatcggtctggtccctaaagagggcgctttggacctcagcggattacgggcgatcgacaccacacaactgttctcactgccgaaagatttctgggagcaggaagtgagggacatcagaagttacctcactgaacaggtgaaccaagatctgcccaaggaggtgctcgcggagcttgaagccctggagcggagagtgcacaaaatgtag

SEQ ID NO: 128593 - DNA, 1521 bp, synthetic construct
  misc_feature 1..1521: note = Description of Artificial Sequence: Synthetic coding sequence
  source 1..1521: mol_type = other DNA
atgtccccggccgacttccagcgtgctgttgacgaaaggtttccaggctgcatgcagggcagaacaatgtacgtgctgccattcagtatgggcccagttggttcgccattgtcgaggattggagtgcagttgactgacagcgcgtatgtggtggcatccatgagaattatgacccgactggggacccctgtcttacaggcactcggcgacggagacttcgtcaaatgtctgcacagcgtgggacagcctctgacaggccagggggaaccagtgagccagtggccttgtaacccagaaaaaacacttatcggtcatgttcctgatcagcgggaaataatctcattcggctcaggttacggcggcaacagtctgctggggaagaagtgctttgcacttagaattgcctcgcggttagctagggatgaaggatggttagctgagcatatgctgatccttggcattacttcaccagccggtaagaaacgttatgttgccgcagcctttccgtctgcttgtggcaagactaacttagctatgatgagaccagcccttccaggatggaaagttgagtgcgtgggagatgacatcgcatggatgaggtttgactctgaagggagattgcgggccattaatcccgagaatggattctttggcgtggctccgggcacaagcgcaaccaccaaccctaatgccatggcaacaattcaaagtaacactatttttaccaacgttgctgaaacatcagacggaggcgtgtactgggaaggtatcgatcagcctctaccccctggggtgaccgtcacgtcgtggctcggcaagccctggaaaccaggagacaaggagccgtgcgcccacccgaactcacgtttttgcgcaccagctagacagtgtcccataatggaccctgcatgggaggctcctgagggtgtgcctattgacgccattatatttggcgggcggaggccgaaaggagtgcccctcgtgtacgaggcgttcaattggaggcacggcgtgtttgtgggctctgcaatgagaagtgaaagtacagccgcggcagaacataaaggcaaaatcattatgcacgatcctttcgcgatgagaccattttttggctataacttcggccattacctcgaacattggcttagtatggaggggagaaaaggagcccagctcccgagaatttttcatgtcaattggttcagaagggacgaagccgggcacttcctgtggcctgggttcggcgagaacgcgcgtgtgctggattggatctgccgcagacttgagggcgaggattccgctagagaaacccctatcggcctcgtgccaaaggagggggcattagacctgtcaggacttagggcaatagacaccacccaactgtttagtcttccaaaggatttctgggagcaggaagtgcgggacatcaggagctacctgacggagcaggtgaaccaagacctgcccaaggaggtgctggccgaactggaggcccttgagcgccgagtccataagatgtag

SEQ ID NO: 128594 - DNA, 2343 bp, synthetic construct
  misc_feature 1..2343: note = Description of Artificial Sequence: Synthetic coding sequence
  source 1..2343: mol_type = other DNA
atggcagcagtggacctggagaaactgcgagccagcggggcaggaaaggcaattggagttctaacctccggaggagacgctcagggtatgaacgccgcggtgcgggctgtgacacgtatgggcatttatgttggcgcgaaggtgttcttgatctacgagggttatgagggactggtagaaggcggcgagaatataaaacaggccaactggctgtcggtgagcaacatcatacagctggggggaaccatcatcggttctgctaggtgtaaggcgttcaccacgagagagggacggagggctgcagcttacaatcttgttcagcacggcattacaaacctatgcgtaataggcggagatggatcactcaccggtgctaatatttttaggagcgaatggggtagcctgctggaggaattggttgctgaaggaaaaatttcagagacaaccgcccgtacctactcccacctgaacatcgctgggttggtgggctccattgacaatgacttttgcggtaccgacatgaccattggtaccgatagcgccttacaccggatcatggaagtgatagacgcaatcacaacgacagcccagagtcaccagcggacctttgtgctggaagtgatgggccgccactgtggatacctggccctggtgtctgcactggcaagcggcgctgattggcttttcatccccgaggcacctccagaagacggatgggagaacttcatgtgtgaacgattaggggaaactagaagcaggggcagcaggctgaatatcatcatcatagccgagggggccatcgatagaaacgggaagccgattagttcctcatacgtaaaggatcttgtggtgcagcgcctcggcttcgatactagagtgaccgtcctgggacatgttcaacggggtggcacaccctcagcatttgatcgcatcttatcaagcaaaatgggcatggaggccgtcatggcgctgctcgaggccacaccagataccccagcatgtgtagtgactctgagcggcaatcaatccgttcgcttgcctctcatggagtgcgtgcaaatgaccaaagaagtccagaaagccatggacgataaaagatttgatgaggccacccaactgcgaggtggttctttcgagaataactggaacatttataagctgctcgctcatcagaagcctcctaaagaaaaatcaaacttcagcctggccatcctgaatgtgggcgcccccgcagcaggaatgaatgctgcagttcgaagtgctgtccgcactggtataagccacggccatacggtctatgtcgtgcacgatggattcgaaggcctggccaagggccaggttcaagaagtcgggtggcacgatgtagctggttggctggggcgaggcgggtccatgctgggcactaagaggacattacctaaagggcagctggagagtattgtggaaaacattagaatttatggtatccacgcactacttgtggtgggaggattcgaggcctatgagggagtgctccagctcgtcgaggcccgtgggcggtatgaagaactgtgcatagtcatgtgtgtaatccccgccaccatatcaaataacgtgcctggcaccgatttctcactgggcagcgatactgctgtgaacgctgctatggagtcatgtgatagaattaaacaatccgccagtggcactaagagacgagtcttcatcgtggagacaatgggaggctactgtgggtaccttgctaccgtaacaggcatcgccgtgggcgcggacgcggcgtacgtttttgaggatccctttaatatacacgacttgaaggtgaatgttgaacacatgaccgaaaagatgaaaacagacattcagagggggctggtcctgaggaatgagaagtgccacgactactacactaccgagtttctctacaatctttactcctcagagggtaagggcgttttcgactgcaggacgaatgtgctgggacacttgcagcagggaggcgccccaacccccttcgatagaaactatggaacaaagctgggcgtgaaagcgatgctgtggctgtctgagaaactgcgagaagtgtatagaaagggccgagtttttgccaacgcacccgattctgcgtgtgtcatcgggctgaaaaaaaaggctgtggcattttcccctgttaccgaactaaagaaagacacagattttgaacaccgaatgccaagggaacaatggtggctgtcattacgcttaatgttaaaaatgcttgcgcaataccgtatttctatggccgcctacgtgtcaggggagctggaacacgttactaggcggacgctgagcatggacaagggcttctag

SEQ ID NO: 128595 - DNA, 762 bp, synthetic construct
  misc_feature 1..762: note = Description of Artificial Sequence: Synthetic coding sequence
  source 1..762: mol_type = other DNA
atgaggtctatgtgtaaccagggtcgaggccgggaaagttcacggggcggactccatgttcaggggtcatgccgcgggttgagcagatccccccaacaagaaactggctttgcaaaagcccctgcaggaactgactgctttttccattgtagccccggctcccggggccagggtgaccgtaaagaagaggtcacttccgaaccaggagggacttcaattatgtctagactcgggggcatgaatgctgctgtcagggccgtgacccgaatggggatatacgttggagccaaagtgtttctcatatatgaaggttatgaggggcttgtggagggaggggagaatatcaagcaggccaactggctttccgtctcaaatatcatccagctgggcggcaccatcattggaagtgcccggtgtaaggctttcacaacacgcgaaggccggcgcgctgctgcttacaatctggtacagcacggtatcacgaatctgtgtgtaatcggcggcgacgggtcgctcaccggtgctaacatctttaggagcgaatggggttccctgctggaggagttagttgccgaagggaaaatctcagaaactactgctcgaacctatagccatttgaacattgccggtctggtcggttctatcgacaatgacttctgtggaactgacatgaccataggcacagactcggccctgcatagaattatggaagtgatagacgcgattaccaccaggggtcggttaggagagctgcacgtttag

SEQ ID NO: 128596 - DNA, 2484 bp, synthetic construct
  misc_feature 1..2484: note = Description of Artificial Sequence: Synthetic coding sequence
  source 1..2484: mol_type = other DNA
atgtgtaatcagggacgggggcgcgaatcaagccgtggcggtcttcatgtgcaagggtcctgccgggggcttagcagatccccccagcaggaaacaggtttcgccaaagccccagccgggaccgactgtttcttccattgctccccaggttcgcgcggccagggcgacagaaaggaagaggtcacatctgagccgggtggtacgagcattatgtcacgactggggggcatgaatgccgccgtgcgcgccgtgaccaggatgggaatctacgtgggggcgaaggtttttttgatctatgaaggctatgaggggctggttgagggcggggaaaatatcaagcaggccaattggcttagcgtttccaacataattcagttgggtggtacaattatcggatctgccaggtgcaaagcctttactacccgcgaaggccgccgtgctgcggcctacaaccttgtgcaacacgggataaccaatctctgtgtgataggcggtgacgggagtctcaccggagccaatatctttcgatcagaatggggatctctgctcgaagaacttgtcgccgagggtaaaatatctgagacgaccgcacgaacatattcgcacctgaacattgctgggctagtcggttctatcgacaatgacttttgtggcaccgacatgacgatcggaactgactctgctcttcatcggatcatggaggtcattgacgcaatcactacaaccgctcaaagccaccagcgtactttcgtcctggaggtgatgggcagacattgcggatacctggctctggtgtcagccttggcgtcaggcgcagattggctgttcattcctgaggccccgcccgaggatggttgggagaactttatgtgcgagagactcggggagactaggagccgggggtccagactcaacatcatcataattgcagaaggcgctatcgatcggaacggcaaacccatttcctccagctacgtcaaggatctggttgtccagcgcttgggtttcgatacccgtgtgaccgtgctggggcatgtgcagagaggtggaacaccatcggccttcgacagaattctgagctccaagatgggcatggaagccgtcatggctctgctggaggcaacccctgacactccagcttgcgtggtgacccttagcggtaatcagtctgtgcgtctgcctctgatggaatgcgtacagatgaccaaggaggtccagaaggccatggatgacaagcggtttgacgaggcaacacagctgcgggggggctcctttgaaaataattggaacatatacaaactgcttgcgcaccagaagccaccaaaagagaaaagcaatttttccctggcaatcctcaatgtgggagcaccagccgctggcatgaatgcagcagtccggtccgcagttcgtaccggcatcagccatggtcataccgtatatgtcgtgcacgatggtttcgaggggctggctaagggccaagtacaggaagtcgggtggcatgacgtcgccggatggctaggacgcggtggaagcatgcttggcacaaaaagaacccttccgaaggggcagctggagagcatcgtggagaacattcgtatttacggcatccacgccctattagttgtcggaggatttgaggcttatgagggcgtgctgcagctggtggaagcgcgaggaaggtacgaggagctatgtatcgtcatgtgcgtgatccccgccactatatccaacaacgtgcctgggaccgactttagcctgggtagcgacaccgccgtaaacgccgcaatggaatcctgtgacaggatcaagcagagcgcatcaggaacaaagagacgcgtgtttatcgtcgagacgatgggaggttattgcggctatttggccaccgttactggcattgcagtgggtgcagacgccgcgtacgtatttgaagatcctttcaatatccacgatcttaaagtcaacgttgagcacatgacagaaaaaatgaaaaccgatattcagagaggcctcgtgctcagaaatgagaaatgccacgactactacacaacagaatttctgtataatctttactcttccgaggggaagggtgtgtttgattgtcgtactaatgtgttgggccacttacagcagggcggggctccaacgcccttcgatcgaaactacggcacgaagctgggcgtcaaggccatgctatggttgagtgagaaattgagggaagtgtaccgcaaagggcgggtgttcgccaacgcacccgacagtgcgtgcgtgattggtctgaagaagaaggctgtcgccttttctcccgtgaccgaattgaagaaggacactgatttcgagcacagaatgccgagagagcagtggtggcttagtctgcgcctgatgctcaagatgttggcccagtacaggatctctatggcagcctacgtatcaggcgagctagagcacgtgactaggagaactctgtctatggataagggattctag

SEQ ID NO: 128597 - DNA, 1722 bp, synthetic construct
  misc_feature 1..1722: note = Description of Artificial Sequence: Synthetic coding sequence
  source 1..1722: mol_type = other DNA
atggggaggcattgcgggtatctggcgctggtgtctgcccttgcatccggcgccgactggttgttcattccagaagccccgcctgaggatggctgggagaacttcatgtgtgagaggctgggagagactcgaagcagaggcagccggctcaatatcatcataattgccgagggtgcaattgaccgcaatggaaagcccattagcagttcttacgtgaaagatctggtggttcaaaggcttgggttcgacactagggtgactgtcctgggccatgttcagcggggtgggacccccagcgcattcgaccggatcctgtcgtctaagatgggcatggaagctgtaatggcattgctggaggctacgcccgatacgcctgcttgcgttgttactctgtcgggaaaccagtcagtcaggctgccactcatggagtgcgtgcaaatgaccaaagaggtgcaaaaagccatggacgacaagaggttcgatgaagctactcagcttaggggcgggagcttcgagaacaactggaatatttacaaactgctcgcacatcaaaagccaccaaaggagaagagtaatttctcccttgctatcctcaacgtgggagcccccgcagccggaatgaacgctgcggtccgaagtgccgttaggacagggatatcacacggccacaccgtatatgtggtacatgatggattcgagggcctcgccaagggccaagtccaagaagtgggttggcacgacgtggcgggatggctcggcagggggggttctatgctcggaactaagcggacactgcctaagggccagctggagtcaattgtggaaaatatccgtatctacggtatccacgccctgctggtggttggcggatttgaagcgtatgaaggagttcttcagctcgtggaggcgcgaggccgctacgaggaactgtgcatcgtgatgtgtgtgatccctgctaccatttcaaacaacgtgcccggcaccgacttcagcttagggagtgacaccgccgtgaatgccgcaatggagtcgtgtgacagaatcaaacagtcagctagcggcacaaagaggcgggtgttcatcgtcgaaacaatgggcggctactgtggttacctggcgactgtcactggtatagccgtaggggctgacgccgcgtacgtctttgaggacccatttaacattcatgatctgaaggtgaacgtggaacacatgacagagaagatgaaaactgatatccagcggggactcgtcctgaggaacgaaaaatgccacgattattatacgaccgagtttctctataacctgtattcatcagagggtaagggagtgttcgattgtaggacgaacgtactgggccacctccaacagggcggagctccaacaccatttgacagaaattacgggacaaagttaggcgtcaaagctatgctttggctgagcgagaagctccgggaagtctatcgcaagggtcgggtgttcgcaaacgctcccgactccgcgtgtgtgatcggtctcaaaaagaaggcagtggccttttccccggtgactgagctgaaaaaggacacagactttgagcacaggatgcccagagaacagtggtggctcagcttgaggctaatgttaaaaatgttggcccagtacaggatttctatggccgcctatgtgtctggggagttggagcatgtcacaaggcggacattgagtatggacaagggattctag

SEQ ID NO: 128598 - DNA, 2343 bp, synthetic construct
  misc_feature 1..2343: note = Description of Artificial Sequence: Synthetic coding sequence
  source 1..2343: mol_type = other DNA
atgacacacgaagagcatcacgcagctaaaacgttaggcataggcaaagccatcgccgtgctgacttcgggtggagatgcacagggaatgaatgccgcagtccgcgccgtcgttagggtcggtatcttcacaggagcccgggtgttttttgtccatgagggctaccagggactcgtagacgggggggatcacattaaggaagccacgtgggaatccgtttctatgatgctccaattgggcgggaccgttatagggtctgctcgttgcaaggatttcagagagcgggaggggcgactgagagcagcatacaaccttgttaaacgcgggataaccaatctctgtgtcattggcggagatgggtctctgaccggcgctgacacctttagatctgaatggtcagaccttttgagcgatctgcagaaggccggcaagattacagatgaagaggcgaccaagtcatcatacctcaacattgtgggcctcgtgggctcaatagataatgacttttgtggtaccgatatgaccattggaacagactcggccttgcaccggatcatggagatcgttgatgccattacgacaaccgcacaaagccaccagcgaactttcgtgttagaagtgatgggaaggcactgtggttatctggccctcgttacctccttaagctgtggggcagattgggtgttcatcccagagtgtccccccgacgatgactgggaggaacacctgtgtaggcgcctgagcgagactcggaccagaggctctagactgaacatcattatcgtggccgagggcgccatcgacaaaaatggtaagcccatcacgtcagaggacataaagaatctggtggtgaaacgtctcggctatgacacacgagtcaccgttctcggtcatgttcaacgaggtggcacgccaagcgcattcgaccggattctggggtctaggatgggagtggaggcggttatggctctactcgagggtacccccgacaccccagcctgtgtggtgagtctgtctgggaatcaggctgtgagattgcctctgatggagtgtgtgcaagtgaccaaagatgtcactaaggctatggacgagaagaaatttgatgaggccctgaagctgagggggcgaagcttcatgaacaactgggaggtgtataagctcttagcccatgttaggccacctgttagcaaatcaggctcccatacggtggctgtcatgaacgtcggcgctccagccgccggcatgaacgctgcggtgaggagcaccgtcagaatcggcctgatacaaggcaatagagtcctggttgttcatgacgggttcgaggggctggccaagggtcaaatagaggaagccggctggagctacgttggcgggtggactggacagggcggcagtaagctcgggacaaagcgcaccctgcctaaaaaatcatttgagcagataagcgctaacattactaagttcaatattcagggtctggtcattattggaggtttcgaggcctatactgggggacttgaactcatggaggggcggaagcagttcgacgaattgtgcattccgtttgtggttatcccagccacagtgtcgaacaatgttccaggctcagatttttcagtgggagccgataccgccctcaacaccatctgcacgacatgcgatcggattaagcagtcggccgctggcaccaaaaggcgtgtgttcatcatcgaaacaatgggagggtactgtggctatctagcgaccatggcaggattggccgcaggggccgacgcggcctacatattcgaagaaccgttcacaataagagatttacaagcgaacgtggaacacttggttcagaaaatgaaaactaccgtgaaacgaggactggtgctccggaacgaaaagtgcaacgaaaattacactaccgattttatcttcaacttgtatagcgaagagggcaaggggatttttgactctcggaagaatgttttgggccatatgcagcaggggggaagcccaacgccttttgacagaaacttcgctactaagatgggggcgaaggctatgaactggatgtccgggaaaatcaaagaaagctaccggaacgggagaatttttgcgaacacacccgacagcggctgcgtcttggggatgaggaagcgagcccttgtgttccagcccgtggccgaacttaaggatcagactgactttgaacaccggattccaaaggaacaatggtggttgaagctccgaccaatcctgaaaattctagctaaatatgagattgacttggacacttccgaccatgcccacctcgaacatataactaggaagcggtcaggcgaagccgccgtttag

SEQ ID NO: 128599 - DNA, 2556 bp, synthetic construct
  misc_feature 1..2556: note = Description of Artificial Sequence: Synthetic coding sequence
  source 1..2556: mol_type = other DNA
atgcataaggatgagtttcaccttaagttttttatgtgtgttattcagagtcgtcagctggtgcggactccacaaagaacagcaggcgaggcatcaacctctagcatgctaatccccaagccacccccaaaaactgacatcctgaaaagtcttgataccatggatgatccggatacagtgggatcaatccccgtgtttaagacagagtggattatgactcatgaggagcaccacgctgccaaaacacttggaataggaaaggccattgccgtcctcacctcaggtggcgacgctcaggggatgaacgctgccgtgagggccgttgtgagggtaggcattttcaccggggctcgggtgttttttgttcacgaaggctaccagggactggtggatggtggcgatcatataaaggaagcgacctgggagtccgtttcaatgatgctgcagctgggcggaaccgtgattggaagtgcccggtgcaaggacttcagggagcgcgaggggagattaagagctgcttataatctggtaaaaagaggcattaccaatctttgcgttatcggcggcgacggcagcctaaccggggcggataccttccgctctgagtggagcgatctactgtccgatctgcaaaaagccgggaagattactgatgaagaggccactaagagctcttacttaaatattgttggactggtgggctccattgataatgatttttgtggaactgatatgaccattggtactgattctgccctccacagaatcatggaaatcgtcgatgccatcaccacaactgcacagagtcaccaacggactttcgtgctggaggtgatgggaagacactgcgggtatctggccctcgtcacaagtttgagttgcggcgctgattgggtgttcatccctgagtgcccgcccgacgacgattgggaagagcacctatgtagaagactcagtgagaccaggacacgaggtagtcgcctaaatattatcatcgttgcagagggagcaatcgataagaatggaaagcccattaccagcgaggatatcaaaaatttggttgtcaagagacttggctacgacaccagggtgacggtgctgggacatgtgcagagagggggaacaccgtccgccttcgatcgaattttgggctctcgcatgggagtggaagcagttatggctctgctggagggcacaccggacactccagcctgcgttgttagcttgtctggaaatcaggcggtaaggttgccgctgatggagtgcgttcaagtgacaaaagatgttacaaaagcaatggacgaaaaaaagttcgatgaggccctcaagctcagaggccgctcctttatgaacaactgggaggtgtataagctgctggcccatgtgcgtccccccgtctctaagagcggctcacacacagtggcagttatgaatgtcggcgcccctgctgccggtatgaacgcagctgtaaggagcactgttaggataggcctcatacagggtaacagagtgctagttgtgcacgatgggtttgagggcctcgcgaaaggacagattgaagaggcagggtggtcctacgtaggaggttggacaggccagggcggtagtaaattaggcaccaagcgcacactccccaagaaaagtttcgagcagataagtgcaaatattacgaaatttaacatccagggcctcgtgattataggcggcttcgaagcttacacaggggggctcgagttgatggagggtcgaaagcagtttgatgaactgtgcataccgttcgtagtcatcccagctactgtttccaataatgtgccaggctccgatttttccgtgggagctgataccgccttaaacacaatctgcaccacatgcgaccgaatcaaacagagcgcagccggtaccaaaaggcgcgtgttcatcatcgaaacgatgggcgggtactgtggctatctggctaccatggctggccttgctgccggggctgacgcagcatatatattcgaagagccatttacgatcagggacctgcaggctaatgtggagcacctggtacagaagatgaagacaactgttaaacgcgggctggttctccgtaacgagaaatgcaacgagaactataccaccgacttcatcttcaatctatactcagaggagggaaagggcatctttgactctcggaagaacgtgttggggcacatgcagcagggaggtagccccaccccgtttgatcgcaacttcgccacaaaaatgggcgctaaagccatgaactggatgagcggtaaaattaaggagagctacagaaacggaaggatctttgcaaacacgccagactctgggtgtgtactcggtatgaggaagagagcccttgtgtttcagcctgtagctgaacttaaggaccagactgactttgaacatcgcatcccgaaagaacagtggtggttaaagctgcggccaattcttaagatcctggcaaaatacgaaattgatctagataccagtgaccatgctcatctcgagcatatcacacgaaaacggtccggcgaggcggctgtgtag

SEQ ID NO: 128600 - DNA, 2343 bp, synthetic construct
  misc_feature 1..2343: note = Description of Artificial Sequence: Synthetic coding sequence
  source 1..2343: mol_type = other DNA
atgacccacgaggaacatcatgcagccaagactctagggattggaaaagcgattgccgtcctcacatccggtggggacgcacaagggatgaacgctgcggtgagggcagtggtgcgcgtgggaatttttacgggggctcgcgttttttttgttcacgaagggtatcagggactggtagacgggggcgatcatatcaaagaagccacttgggagtccgtgtccatgatgctgcagttaggaggcacggtgatcggaagtgctcgctgtaaagacttccgagagcgcgagggccggctgcgggcggcatacaacctagtaaagcgaggaattactaatttgtgcgttataggaggtgacggatctcttaccggcgccgacacatttcgtagtgagtggtcggacctgctaagcgatctgcagaaagccggcaaaatcactgacgaagaggccacaaagagctcttacctgaacattgtggggctggttggcagcatcgataatgatttctgtggaacagacatgacgataggcaccgactctgcactgcacaggattatggagatcgtcgacgccatcactaccacagcccagtcccaccaacggacattcgtcctggaggtaatgggacgccactgcggctacctcgccttggttacttcactgtcatgcggcgctgactgggtctttatccctgagtgcccaccagatgacgactgggaggaacacctttgccgtagactgtctgagacccgaactagggggtcccgcctgaacataataattgtggcagaaggagccattgacaaaaatggaaagccaatcacatctgaggacattaagaatctcgtcgtgaagagattaggctacgacacaagggtgaccgtactggggcatgtccagaggggaggtaccccctcagcctttgatagaatcttaggcagccgcatgggagtggaagcagtgatggctctgttggaaggtacaccagacactcctgcgtgtgtggtgagcctcagtggcaatcaagcggtgcggctaccactcatggaatgcgttcaggtgaccaaagatgtgacaaaagctatggatgaaaaaaagttcgatgaagcccttaagctaagaggcagaagctttatgaacaactgggaggtgtacaaattgttggcacacgttaggccgccagtgagtaaatcgggaagtcatacggtcgcagtgatgaacgttggcgcgcctgccgcaggcatgaacgccgcagtgcggtcgacggttcggattggtttgatccaagggaatagagtccttgtggttcatgacgggttcgagggactagccaaagggcagatcgaggaagccggatggtcgtacgttggaggctggacgggccaaggtggttcaaaattgggaaccaaacggacacttcccaagaagtcctttgagcaaatctctgccaacatcacgaaatttaacatacaggggctcgtgataatcggtggctttgaggcctataccggtggcctagagttgatggaggggagaaagcagttcgatgagctttgcatccccttcgttgtcattcccgcgacggtgtctaacaatgtgcccgggagcgactttagcgtgggtgcagataccgccctgaacacgatctgcacaacatgtgaccggatcaaacagtctgccgccgggactaagagaagagtcttcattatcgagacgatggggggatattgcgggtacctggcaactatggccggactggctgccggtgccgatgccgcctatatctttgaggagccctttacaatccgagaccttcaggccaatgtggagcatcttgtgcagaaaatgaaaactacagtcaaaaggggactagtcctgcggaacgaaaagtgcaacgaaaattataccacagattttatttttaatctgtacagcgaggaaggcaagggaatcttcgactcccgcaagaacgtgttggggcacatgcaacaaggtggatcacctaccccctttgaccgaaacttcgccacgaaaatgggagctaaagcgatgaattggatgtcaggtaaaataaaagagtcatacaggaatggccggatttttgccaacacccccgactcaggatgtgttctggggatgaggaaaagagcccttgtattccagccagtcgccgagctgaaggatcagactgattttgagcatcgcattccgaaggagcagtggtggctgaagctgcgccctatcttgaagatcctggctaaatatgagatagatctcgatacaagcgaccacgcgcacctggagcacattacgcgcaaaagatctggagaagctgccgtctag

SEQ ID NO: 128601 - DNA, 2250 bp, synthetic construct
  misc_feature 1..2250: note = Description of Artificial Sequence: Synthetic coding sequence
  source 1..2250: mol_type = other DNA
atgacccacgaagaacaccacgcagcaaaaacactgggaataggaaaggccatcgcagtgctcaccagtggtggcgatgcacagggaatgaatgcagccgtccgggcagtggtacgagttgggattttcactggcgcgcgagtgttttttgtgcatgagggatatcagggcttggttgatggcggtgaccacattaaggaagcaacctgggaatctgtcagcatgatgctccagcttggaggaactgtaatcggtagcgcacggtgtaaggacttccgcgaacgggaaggccggttacgcgcagcctataacctcgtgaagcgcggcattacgaatttgtgcgtcatcgggggtgacggcagcctgactggcgctgacacatttagatcggagtggtccgatctgttgagcgacctgcagaaggctggtaagatcaccgatgaggaggctacgaagagcagctacctgaatatagtggggttagtgggttcaatagacaacgatttttgcggtaccgacatgactattggaacagacagtgctctgcatagaatcatggaaatcgtcgatgcgattactaccactgcccaatcgcatcagcgcacattcgtgctggaggtaatgggtaggcactgtgggtatctcgccctcgtcacgtccctgagctgcggtgcagattgggtgttcatcccagagtgccctccagatgatgactgggaggagcatctgtgtcggagactgtccgaaacacgcactcgagggtctcgactcaatatcattatcgtcgcagagggagctatcgataaaaatgggaagcccatcacttctgaagatatcaaaaacgggagtagaatgggggtggaggctgtgatggccctccttgagggaaccccggatacccctgcctgtgttgtgtccctatctggtaaccaggcagtacggctgcctttaatggaatgtgtccaggtgactaaggacgtaaccaaagcgatggatgagaagaaattcgatgaggcacttaaactgagagggcggagttttatgaacaactgggaggtgtacaaactgttggcccacgtaagacccccagttagcaagtccgggagccacaccgtagctgtgatgaacgttggggcaccagcggcaggcatgaatgcagccgtcaggagcactgtgagaatcggcctgattcagggcaaccgcgtcttagttgtccacgatgggttcgaaggcctggccaagggtcaaattgaggaggcgggatggtcctacgtggggggctggactgggcagggcggctccaagctaggtaccaaacgcaccctccctaaaaaaagctttgagcagatttctgcgaacataacaaagtttaacatacaggggttggtgattatcggaggcttcgaagcctacactggaggcttggaactgatggaggggaggaagcagttcgacgaactttgcattccgtttgtggtgatcccagcaacggtctccaataatgtgccaggttcagattttagtgtgggtgcagacaccgcattgaacaccatctgcaccacatgtgatcgaattaagcagagcgctgccggaacaaagagacgagtcttcattattgaaacaatgggtggctactgcggttacctggccacgatggccggacttgccgcaggagccgatgctgcttacatcttcgaggagccatttacaattagggatctgcaggcaaatgtagaacatcttgtgcagaagatgaagaccaccgtgaagaggggtctcgtactgcggaatgagaaatgcaatgagaattacacaactgactttattttcaatttatacagcgaggagggaaaaggcattttcgatagtcgcaagaatgtcctgggccatatgcagcagggcggatctccgacaccttttgaccgaaactttgccacaaaaatgggcgcgaaagctatgaactggatgtccggcaagattaaagagtcttatcgcaacggaaggatcttcgccaacacgccagactccggctgcgtgctcggcatgcgcaagagagcacttgtattccaaccggttgccgaactgaaggaccagacagacttcgagcaccgaatccctaaagagcagtggtggctgaaactccgacccattctaaaaatactggccaagtacgagatcgacttagacactagcgaccacgcacaccttgagcacattacgcgtaagcggagtggcgaagctgccgtgtag

SEQ ID NO: 128602 - DNA, 534 bp, synthetic construct
  misc_feature 1..534: note = Description of Artificial Sequence: Synthetic coding sequence
  source 1..534: mol_type = other DNA
atgactcacgaagagcaccacgccgctaaaactctgggaattggcaaagcaattgcagtgctcacgagtggaggagacgcccaaggcatgaacgcggcagtgagatctacagtgcgcataggtctgatccaaggaaatcgagtgttggttgtacacgacgggtttgaaggtctggccaaggggcaaatcgaggaagccggctggtcttatgttggcggttggacaggacaaggcggatctaagctaggcaccaaaagaacgctaccgaaaaagagcttcgagcagatttccgcaaatataacaaagtttaacatacagggcctggtgataatcggcggctttgaggcttacacgggcggcctagaactgatggaagggcgtaagcaatttgatgagttgtgtatcccttttgtcgtgataccagccacagtttctaataatgtccctgggtccgacttcagcgtcggagccgacaccgctctcaacaccatttgtaccacctgtgacaggatcaagcaatcagccgccggatag

SEQ ID NO: 128603 - DNA, 2343 bp, synthetic construct
  misc_feature 1..2343: note = Description of Artificial Sequence: Synthetic coding sequence
  source 1..2343: mol_type = other DNA
atgacccacgaagaacaccacgctgcaaaaacacttggcataggaaaagcaatagcagtccttactagtggaggagacgcccaggggatgaatgccgccgtgagagccgttgtgcgagttggcatttttaccggggctagggtctttttcgtgcacgagggataccagggcctggtggacggcggagatcatattaaagaagccacatgggagtctgtgtctatgatgttgcaactggggggaacagttataggctcggcccgttgcaaagattttcgggagagggagggccgcctgagagccgcgtacaatctagtaaaacggggcattaccaatctttgtgtaatcggcggagacgggtctcttactggcgccgacacattccgatccgaatggagtgaccttctgtctgacctgcagaaagcaggtaaaataaccgacgaggaggctacgaaaagcagctaccttaacatcgtgggtctcgtcggctcaatagacaatgacttttgcggaaccgatatgacgatcggaaccgacagtgccctgcataggatcatggaaatcgtggatgccatcaccaccacagcacagtcccatcaacgcacttttgtactcgaagtaatggggcgtcactgtggatatttggcccttgttactagcttgtcgtgtggcgcagattgggtgtttattccagagtgtccaccagacgacgattgggaggagcacttatgtcggcgcttgtctgagacaaggactcgcggaagcagactgaacattatcatcgtcgcggaaggggccattgataaaaatggcaaacctataactagcgaggatatcaaaaatctggtcgtaaaaaggttgggctatgacactcgggtgacggtgcttggacatgttcaaaggggcgggacgccatcagcctttgatagaatcctaggctcacgcatgggagtcgaggcagtgatggccctgctcgagggcacaccagatactccagcatgcgtcgtctcactttcgggcaatcaggccgtgaggctgcccctgatggagtgcgtgcaggtcacaaaggatgtaacgaaggcaatggacgagaagaagttcgacgaggccctaaagttgcgcggcagatcctttatgaacaattgggaggtttataagttactggcccacgtgagaccccctgtctcaaaatcagggtcccacaccgtggcggtcatgaatgttggagcccctgccgcagggatgaatgcagccgtccgcagcactgtacgcatcggactgatccagggtaaccgggtccttgtggtacacgatggctttgagggcctcgctaaaggtcagatcgaagaagccgggtggtcgtatgtgggagggtggacgggacaaggggggtctaaattaggcactaaacgcacactgccaaagaagagcttcgaacaaatcagcgcaaacataaccaaattcaatatacaaggcttagtgatcatcggcgggtttgaggcatacaccggtggactggaactgatggaaggaaggaaacagtttgacgagttgtgtatcccttttgttgtgatcccggcaaccgtgagcaataacgtccccggttccgacttctctgtcggggccgatactgcgctgaatacgatatgcaccacctgcgaccggattaaacagtctgcggccgggacaaagaggagagtattcatcatcgagacaatgggcgggtattgtggctatcttgccacaatggcagggctggccgccggcgctgacgcagcttatatttttgaagaacctttcaccatacgtgatctacaggcaaacgtagagcacctcgttcagaaaatgaagactactgtcaagcgcggattggtcttacggaatgaaaagtgcaacgagaactacactacagacttcattttcaacttgtattcagaggaaggcaaaggtatcttcgattctcggaagaatgtgctggggcatatgcagcaggggggctcaccaacaccgtttgatcgcaattttgcaacgaagatgggagctaaggcgatgaattggatgagcgggaaaataaaagagagttatcggaacgggaggatttttgcaaacacccccgacagtggctgcgtgttgggcatgagaaaaagagcgctcgtattccaaccagtggcagagctgaaggaccagaccgattttgagcaccggatccccaaggaacagtggtggcttaagttgagacccattctcaagatcttggctaagtacgagattgacctagacacgagtgaccacgctcaccttgagcacattacccggaaacgttctggcgaagccgcggtctag

SEQ ID NO: 128604 - DNA, 354 bp, synthetic construct
  misc_feature 1..354: note = Description of Artificial Sequence: Synthetic coding sequence
  source 1..354: mol_type = other DNA
atgacccatgaagagcatcacgctgccaaaacactgggaatcggcaaagcgattgcagtgctcaccagtggcggagacgcccagggcatgaacgcggccgttagggctgtcgtacgcgtcgggatctttactggggctagagtgttttttgtccacgaaggctaccaagggctggtggacggcggtgaccatatcaaggaggcgacttgggagtccgtgagcatgatgctccagcttggagggactgtgatcgggagcgcccgttgcaaagattttagggaacgagaaggacgcctgcgggccgcatacaacctggtaaaacggggcatcacgaatctctgcgtcattgggtag

SEQ ID NO: 128605 - DNA, 486 bp, synthetic construct
  misc_feature 1..486: note = Description of Artificial Sequence: Synthetic coding sequence
  source 1..486: mol_type = other DNA
atgacacacgaagagcaccacgccgcaaaaactttgggcatcgggaaggccatcgctgtgttgacctctgggggagatgctcagggcatgaacgctgctgttagggccgttgtgcgggtgggtatcttcacaggggctcgggttttctttgtacatgagggttatcagggtctggtggatgggggagaccatatcaaggaagccacctgggaatccgtatctatgatgctccagctcggtggaaccgtgatcggatctgctagatgtaaagactttagggagcgtgaaggccgcctcagagcagcctacaatctagttaagagggggattacaaacctttgcgttatagggggggacggctctctcacaggcgccgacacattccggtccgaatggtcagacctgctgtctgatcttcagaaggctggcaaaataacagacgaggaagctaccaaaagttcgtatttaaacattgtcggactttag

SEQ ID NO: 128606 - DNA, 474 bp, synthetic construct
  misc_feature 1..474: note = Description of Artificial Sequence: Synthetic coding sequence
  source 1..474: mol_type = other DNA
atgacccatgaggaacatcatgccgccaaaaccctgggaatcggcaaagccattgcagtattaacaagtggaggcgacgcccagggcatgaacgcagcagtccgtgctgtggtgagggtgggcatctttactggggcgagagtcttttttgtgcatgagggataccagggccttgtcgacggcggtgaccacatcaaagaagctacatgggaaagtgttagtatgatgctgcagctgggtggtaccgtaatcggttccgcccggtgtaaggactttagagagcgagagggtcgacttcgggctgcatacaacctcgtcaaacgagggatcaccaatctatgtgtcatcggaggcgatgggtccttaacgggcgccgatactttccggtccgaatggtccgacctcctgagtgatctgcagaaagctggtaaaatcacagacgaggaagcaaccaaatcttcttatctgaattag

SEQ ID NO: 128607 - DNA, 258 bp, synthetic construct
  misc_feature 1..258: note = Description of Artificial Sequence: Synthetic coding sequence
  source 1..258: mol_type = other DNA
atgactcacgaagaacatcatgcagccaagacgctgggtattgggaaggctattgcggtgctgacaagcggaggagatgcacagggaatgaacgccgcggtcagagcagtggtgagggtcggtatctttaccggagctcgagtcttttttgtgcacgagggctaccaaggactggtggacggcggcgaccacattaaagaagccacctgggaaagtgtcagcatgatgctgcaactcggagggacggttattggctag

SEQ ID NO: 128608 - DNA, 420 bp, synthetic construct
  misc_feature 1..420: note = Description of Artificial Sequence: Synthetic coding sequence
  source 1..420: mol_type = other DNA
atgacgcacgaggagcatcatgccgccaagacactcggcatcggaaaagccatcgccgtcttgacatccgggggcgatgcccaagggatgaacgccgccgtccgcgctgtggtcagggttggaattttcaccggagcgcgcgtgttttttgtgcatgagggataccaaggactggtcgatggaggtgatcacattaaggaagcaacctgggagagtgtatccatgatgctgcaacttggaggaaccgtgatcggcagtgcccgctgcaaggactttagagagcgtgaagggcgcctccgagctgcctacaatctagtgaagcgaggcataaccaatctgtgcgtcatcggcggcgatgggagcctgacaggggctgacacatttaggtccgaatggtcagatctcctgtctgatctgtag

SEQ ID NO: 128609 - DNA, 2250 bp, synthetic construct
  misc_feature 1..2250: note = Description of Artificial Sequence: Synthetic coding sequence
  source 1..2250: mol_type = other DNA
atgactcacgaagaacaccacgccgccaagacgctggggatcgggaaggcaatagctgtcctcacttctggcggcgacgcccaggggatgaatgccgccgtgcgagcggtcgtaagggtgggcatattcactggcgctagagtcttctttgtgcacgaaggatatcaaggcctggttgatggaggagatcacatcaaggaagcaacatgggagtccgtcagcatgatgctgcaactgggtggtaccgtcatcggcagtgcacggtgtaaggatttccgggaaagggagggccgcctcagagcggcttacaacctggtaaaaaggggcattactaacctctgcgtgattggaggcgacggatcactgaccggagcagacacatttagatcagagtggtcagatcttctctcggacctgcaaaaggctgggaagataacagatgaggaggctacaaagtccagctatctgaacatagtcgggctcgtcgggtcgatcgataatgatttttgcggaaccgacatgacaataggcacagatagcgctctgcatcgcatcatggaaatcgttgatgccatcacaacaaccgcacaaagtcaccagaggactttcgtgctggaggtgatgggacggcactgtgggtacctggcattggtgacaagcctgtcttgcggcgccgactgggtgttcatacctgagtgcccccccgatgatgactgggaagagcacctgtgtcgccgtctgagcgagacacgcacaagaggttccaggctgaatatcattatcgtcgcagaaggcgcaattgataagaacggaaaacccattacctctgaggatatcaaaaatggatcccggatgggcgtagaagcggtcatggccttgctcgaaggaaccccggatacacctgcttgtgtggtcagtctgtccggcaatcaggctgttcgactcccccttatggaatgcgtccaggtgacaaaagatgtgactaaggctatggacgaaaaaaagtttgacgaggcccttaagctcagaggaaggtccttcatgaacaattgggaagtttacaaactcctggcacacgtgcggcccccagtgtcaaaatccggctctcacacagtggctgtcatgaacgtcggtgctcctgcggcagggatgaacgccgcagtgaggtctaccgtgcgcatcggcctgatccagggaaatcgggtccttgtggtgcacgatggctttgagggactggctaagggacagatcgaggaagccgggtggagttacgtcgggggttggacaggtcaaggaggctcgaaacttggaacaaagcggacactccccaagaagtccttcgagcaaatcagcgcaaatattactaagttcaatatccagggactggtaattatcggtgggttcgaagcctacaccggggggcttgagctgatggaaggccgtaaacaatttgacgagctctgcatcccattcgtggtcattcctgccactgtcagtaataacgttcctggcagcgatttctctgtgggcgctgacaccgccctgaatactatatgtaccacctgtgataggatcaagcaaagcgcagccggtactaagagacgagtgtttattatcgaaaccatgggaggctactgcgggtaccttgccaccatggcgggcctcgccgccggggcagacgccgcatacatctttgaggagcccttcacgataagagacctccaggctaacgtggaacacctcgtccaaaagatgaagacaactgttaagcggggcctggtgttgagaaacgagaaatgtaatgaaaactataccaccgattttattttcaatttatatagcgaagaaggaaaggggatctttgactcccggaagaatgtgctcggtcatatgcagcagggcggctcccccactccgttcgacaggaactttgcaacgaagatgggagcgaaggcaatgaattggatgtcgggaaagattaaagagagctacaggaacggcaggatcttcgctaacaccccagactcaggctgtgtgctgggcatgaggaagcgcgctctcgtattccagcctgttgccgagttgaaggaccaaactgacttcgagcacaggatcccgaaggagcagtggtggctcaagcttagaccaatcctgaaaattctggccaaatacgagatagacctcgacacttccgaccatgctcacctcgaacatatcacgcgcaaaaggagcggcgaagcagccgtgtag

SEQ ID NO: 128610 - DNA, 609 bp, synthetic construct
  misc_feature 1..609: note = Description of Artificial Sequence: Synthetic coding sequence
  source 1..609: mol_type = other DNA
atgggcgggtattgcgggtatcttgccaacatgggcggactcgcggccggggccgatgccgcatatattttcgaagagcctttcgatatccgggacctccagtccaacgtggaacacctgactgaaaaaatgaaaaccaccatacagaggggactcgtattgcgaaatgagagttgctctgaaaactacacaactgattttatctatcaactttacagcgaagagggcaagggggtcttcgactgccgaaagaatgtgctgggccacatgcagcaagggggagctccgtctcccttcgaccgtaactttgggacaaaaatctccgcgcgggccatggagtggatcaccgccaaactaaaagaggccagaggacggggcaagaagttcactaccgatgactccatatgtgtgctgggtattagtaaacgcaacgtgatcttccagcccgtggcggagctcaaaaagcaaacagattttgaacaccgcattcctaaagagcagtggtggctcaaactcaggcccctgatgaaaatcctcgcgaagtacaaggcctcttatgatgtctctgatagtggccagctggagcacgtgcaaccgtggtccgtgtag

SEQ ID NO: 128611 - DNA, 2331 bp, synthetic construct
  misc_feature 1..2331: note = Description of Artificial Sequence: Synthetic coding sequence
  source 1..2331: mol_type = other DNA
atgtgtggctatgaaagatgcaggccgtgtcggggcgctcacggctatctccggggagggcaaggggtgttacacctccgcggactgccaggccacggtgggaggagactcaaacatcggagaggtcggttgggagagtgtctgcagcaccctgcttccggcgcagtcagaggggactggcgtgagaagcccggatgttggtcacaccgattcccatgccccggcagacatgctctggtgggaggcacaattatcggtagcgcacgctgccaggctttcagaaccagggagggcagattgaaggctgcgtgcaatctgcttcagcggggcatcacgaatctctgcgtgatcggtggtgacggatccctgactggcgcaaacttgtttcgcaaagaatggagcgggctgctcgaagaattggcacgcaacggccaaattgacaaggaggctgttcaaaaatacgcatacctgaacgtggtggggatggtcggttccattgacaacgacttctgcgggaccgacatgaccatcggtacagacagtgctctgcatagaattattgaagtcgtcgatgccatcatgaccaccgcacagagccatcaacgcacttttgtcctggaggtaatggggaggcattgtggttacctcgccctggtatccgccctcgcctgcggagctgactgggtgtttcttccagagagtcccccggaagagggatgggaggagcagatgtgcgtgaaactgagcgagaaccgcgctcggaagaaacgattgaatattatcatcgttgcagaaggagctatcgacactcagaacaaacccataacatccgaaaagatcaaagagctggtcgtcactcaactcgggtatgatacacgcgtcacaatcctgggacatgttcaaagaggcggtaccccgagcgcctttgataggattctcgcctctaggatgggagttgaagccgtgattgccctcctggaggccactcctgatacccccgcgtgtgtggttagtctgaacggaaaccacgctgtcagattaccactcatggagtgtgtacagatgacccaggacgtgcagaaagcgatggatgagaggaggttccaggatgccgtccgccttcgtgggcgttctttcgcgggaaacctcaacacttataaaagactcgctataaagctgccagacgaccagattcctaagaccaactgtaacgtggccgtcatcaatgttggagctcctgccgccgggatgaatgccgcggtgcgatccgccgttcgggtaggtattgctgatggccaccggatgctcgcaatatacgacggcttcgatgggtttgccaaagggcagataaaggagatcggatggacagacgtggggggctggacagggcagggaggctccattctggggactaaacgtgttctgcctggcaagtacctcgaggagatcgccacccagatgcgcacacattcaatcaatgcgttactgattataggcggcttcgaggcttatctgggcttgctagaactgagcgccgctcgcgagaagcacgaggaattttgtgttcctatggtcatggtccctgcaactgtgagcaacaacgttcctggctccgatttttcgatcggagcagacaccgctcttaatactatcacagatacatgtgaccgcatcaagcagtctgcttctggtaccaagcggcgggtctttattatcgagacaatgggcgggtattgtgggtacttggcaaacatgggaggcttggctgccggtgcagatgcggcttacatcttcgaagaaccatttgacatccgtgaccttcagtctaatgtggagcatctaacagagaaaatgaagacaaccatacaaaggggcctggtcttgcgaaacgagagttgcagcgaaaactacaccacagatttcatttatcagctctacagcgaggaaggaaaaggcgtctttgattgccggaaaaatgtgctggggcatatgcagcagggcggcgctccttcaccttttgaccgaaactttgggaccaagatcagcgcccgtgccatggagtggatcactgccaaacttaaagaagccaggggacggggtaaaaagttcaccacggatgattctatttgtgtgttaggtattagtaagcggaacgtgattttccagcccgtcgctgagctgaagaagcagacagacttcgagcaccgtatccctaaagagcagtggtggctgaaactccgccctctgatgaaaatcctggctaagtataaagcttcttatgatgtgtcggattccggacaacttgagcatgtgcagccttggagcgtttag

SEQ ID NO: 128612 - DNA, 2355 bp, synthetic construct
  misc_feature 1..2355: note = Description of Artificial Sequence: Synthetic coding sequence
  source 1..2355: mol_type = other DNA
atggacgccgatgattcacgtgcacctaaaggtagcctccggaagttcttagaacatctgagtggcgctggcaaagccatcggagtgctcacatccggcggggacgctcaaggtatgaacgctgcagtgcgcgctgtagttaggatgggtatttacgtgggggcgaaagtgtacttcatctacgagggctatcaaggcatggtggacggaggtagcaacatcgcagaagctgactgggagtctgtcagcagtatactgcaggtgggtggaacgatcattggaagtgccagatgtcaagcatttagaacccgtgaaggtaggcttaaggctgcgtgcaatctgctacagcgcgggattacaaacctgtgcgtgatcggtggtgatggtagccttacgggtgccaacttattccggaaagagtggagcggactgcttgaggagctcgcccgtaacggacagatcgacaaagaggcagtgcagaaatatgcctacctgaatgtggtggggatggtcggcagcatagacaatgatttctgcggcacagatatgactataggcaccgactctgccttgcacagaattattgaggtggtcgacgccattatgaccacagcccagtcacaccaacgaacctttgtgctcgaagtcatgggacggcattgtggttacctggctcttgtatccgccctggcttgcggtgcggattgggtgtttttacccgaaagccctccagaggagggctgggaagaacagatgtgcgtcaaactgagtgagaacagggcaaggaagaagcgcctcaacattattatagtggcagagggcgccatcgatacccaaaataagcccatcacttcagagaagattaaggagctggtcgtgactcagctcggctatgacacacgcgtcactatccttggtcatgtgcagcgaggcggaacgcccagcgcctttgataggattttggcctctagaatgggtgtcgaggccgtgatcgcgttgctcgaagcaacgccagatactcctgcctgtgtcgtcagcttgaatggaaaccacgctgtcagacttcccttgatggagtgtgtgcagatgacccaggacgttcagaaagctatggatgaacggcgctttcaggatgccgtacgacttagagggagaagcttcgccggcaatctgaacacttacaagcgcctggccatcaagttaccggatgatcagattcccaaaactaattgtaatgtcgcagtaataaatgtgggagcccctgcagcgggaatgaacgcagcagtgagatcagccgtccgggtgggcatcgctgacggccaccggatgctcgctatatacgatggcttcgacggatttgccaaaggtcagatcaaagaaatcgggtggacggacgttggtggatggacagggcagggagggtccatcttgggcacaaagcgcgtgctgcctggaaaatacttggaagagatcgcaactcagatgcgaacccactctattaacgcactgcttatcatcggcggcttcgaagcatacctcggattgctggaactttctgccgctcgggagaaacatgaggagttttgcgtgccaatggtgatggtccctgccacggtgtccaacaatgtacccggatctgattttagtatcggcgctgatacagcattgaacacaattacagatacctgtgacagaatcaaacaatctgcatctggtacaaagaggagagtctttatcattgagactatggggggatactgcgggtaccttgccaatatggggggcctggccgccggtgcagacgcagcttatatcttcgaggagccatttgatataagggaccttcagtctaatgtagagcatttaaccgaaaagatgaaaactaccattcagcggggactcgtcttaagaaatgaaagttgctcagagaactacacaaccgattttatctaccaactgtactcagaagagggaaagggggtgtttgactgtagaaaaaatgtcctcgggcacatgcagcagggcggtgccccctctccgttcgaccggaattttggaaccaaaataagtgccagagccatggaatggattacagccaagttgaaggaggcccgaggtcgcggtaagaagttcacaacagatgattccatctgtgtgctcggcattagcaaaagaaacgtgatctttcagccggtggccgaactgaaaaaacagaccgatttcgaacaccggatacccaaagaacaatggtggcttaagttaaggccactgatgaagattctggcgaaatacaaagcctcttacgatgtttccgactctggacagctggaacatgtgcagccctggagcgtatag

SEQ ID NO: 128613 - DNA, 2322 bp, synthetic construct
  misc_feature 1..2322: note = Description of Artificial Sequence: Synthetic coding sequence
  source 1..2322: mol_type = other DNA
tacgaaaggtgccggccctgtaggggcgcacatggctatctccggggggggcagggggtgctccacctgcgaggtctgcccggccacggtggccgccgcttgaagcaccggcgcggccgcctgggagaatgccttcaacaccccgcctcaggagctgtgcgaggcgattggagagaaaaaccaggctgctggtcacatcgcttcccatgtccagggagacacgcactggtaggagggaccatcatcggctcagcccgctgtcaggctttcagaacccgcgaaggtcggctgaaagctgcatgcaacctgttgcagcgtgggattacaaatctgtgcgtgatcgggggagacgggtctctgaccggcgccaacctcttccgaaaggaatggagtggtctgctagaggaactggcgagaaacggacagatagataaggaggccgtccagaagtatgcatatctgaatgtggttgggatggtggggagtattgacaacgatttttgtggaaccgacatgaccattggaaccgattcagctttgcacaggatcattgaggttgttgatgcaatcatgacgaccgcccagtcccaccagaggacattcgttttggaggttatgggccggcactgtgggtatttagcgctggtttccgctctcgcttgtggagcggactgggtgttcctgccagagtctccaccggaagaaggctgggaagagcagatgtgtgtgaaactctctgagaacagggcccgaaaaaaacgtttgaacattataattgtcgccgagggagccatcgacactcaaaacaagcccataacttcagaaaagataaaagagctcgtggtgactcagctggggtacgatacccgggtgaccattctcggacacgtacagcgcggaggaacaccatctgcgttcgaccgaatcctcgcatcccggatgggggtggaggccgtcattgcacttctggaggccacacctgatactcccgcatgcgtcgtcagtctgaacggaaatcacgccgttcgcctcccactcatggagtgcgttcagatgacacaagacgtgcagaaggctatggatgagaggcgcttccaggatgcagttagactgaggggccgcagcttcgcaggcaatctgaacacttacaaacgacttgctattaaactgcctgatgaccaaatcccaaagaccaactgcaacgtagccgtaattaatgttggagcccccgctgcagggatgaatgcagcagttcggtctgccgtaagggttggcattgctgatggccatcgcatgcttgctatatacgatgggttcgatggcttcgccaaggggcagatcaaagaaatcggatggaccgatgtgggcggatggacgggccaaggtggaagcatcctgggaactaagcgagtgctgcctggaaagtacctcgaggaaattgcaactcagatgcggacgcacagcatcaacgcgctcctgatcatcggcgggtttgaagcgtatctagggctccttgaactctctgcagccagagaaaagcacgaggagttctgtgtccccatggtgatggtgcccgccaccgtcagcaacaatgtaccaggttctgattttagcattggagctgacacagccttgaacactatcacggacacatgcgacagaataaagcaatccgcctccggcactaagcggcgagtgtttattattgagacgatggggggttactgtggttacctcgcaaatatgggcgggcttgccgctggagccgatgccgcctacatttttgaagagcccttcgacatccgagatttacaatccaatgtcgagcatctgaccgaaaagatgaagacaaccatccagcggggcttagtcctgcgcaatgagagttgctcagagaattatacaaccgattttatctatcagctgtattctgaggagggcaagggcgtgttcgattgtagaaagaatgtcctgggacacatgcagcagggcggcgcacctagtccattcgaccggaatttcgggaccaagattagcgctagagccatggagtggattacagcaaagcttaaggaggccaggggtagaggcaagaagtttactaccgacgactcgatctgcgtattgggcatttctaagagaaatgtgatctttcagcccgtggccgagctgaagaagcaaacggattttgaacaccgtatccctaaggagcagtggtggctcaagttacgtcctcttatgaagatcctcgcgaaatacaaggcaagttacgacgtttcagacagcggtcagctggaacacgtacagccatggagcgtttag

SEQ ID NO: 128614 - DNA, 633 bp, synthetic construct
  misc_feature 1..633: note = Description of Artificial Sequence: Synthetic coding sequence
  source 1..633: mol_type = other DNA
atgaacgcagccgtgcgggccgtagttaggatgggaatttacgtgggagctaaagtctactttatctacgagggataccaagggatggtggatggtggttccaacatcgcagaggctgattgggagagcgtgtcatccatccttcaggtgggaggaacgattataggaagcgctcgttgccaggcttttcgtacgagagaaggtcgcctaaaggctgcttgtaatttgctacagcgtggcatcaccaacctgtgcgtcatcggtggagacgggagcttaacaggggcaaacctgtttaggaaagaatggagtgggctcttggaagagctggctcgcaacggacaaattgacaaagaagcagtgcaaaagtacgcttacttgaatgtggttggcatggtgggaagcatcgacaatgatttctgtggcactgatatgacaatcgggactgactccgcactgcatcgtatcatcgaagtcgttgatgccatcatgacgaccgcccagagccatcagaggacatttgttctggaggtgatgggcagacactgcggatatctggctcttgtgtctgccttagcgtgcggtgccgactgggtattccttccagaatcaccaccagaagaagggtggtag

SEQ ID NO: 128615 - DNA, 501 bp, synthetic construct
  misc_feature 1..501: note = Description of Artificial Sequence: Synthetic coding sequence
  source 1..501: mol_type = other DNA
taagctgatggccacagaatgctcgccatctacgatgggtttgacgggtttgctaagggccagatcaaagagatcggctggaccgacgtcggcggatggactggccaaggaggatctatcctcggaaccaaacgggtgttgccggggaaatatttggaagaaatcgcaactcagatgcgcacccactcaatcaatgccttactgattatcggtggcttcgaggcgtataagtctgcctgtgacatggccgaagcaagaggccggcaccaggagctgtgcatccccctgtgtgtggtgcctgcaactatctctaacaacgtccccggaaccgagataagtttaggatccgacactggtcttaatgccgttgtcgagacatgtgatcggatcaaacaatcagcttcgggcaccaagagaagagtatttatcattgaaaccatggggggctattgtgggtacctggctaacatgggcgggctcgccgctggggcggatgcatag

SEQ ID NO: 128616 - DNA, 723 bp, synthetic construct
  misc_feature 1..723: note = Description of Artificial Sequence: Synthetic coding sequence
  source 1..723: mol_type = other DNA
atggggcgccactgcggttatttggcgttggtttcagcactcgcatgcggggccgattgggtgttcctgcccgaatcccctccagaggagggctgggaggagcagatgtgcgtgaagctctccgagaatcgcgcccggaagaagaggcttaacataattatcgtggcggaaggggctatcgatacgcagaacaagcccatcacgtccgagaagattaaggagcttgtagtaacccagcttggttacgatacaagagtgacaattctaggacacgtgcagagaggtgggacaccatctgcctttgatagaatcctagccagccgtatgggggtggaagcagtgattgctctcctcgaggcaacccccgacacgccagcttgcgtggtctctctgaatgggaaccacgcagtgcggctgcccttgatggagtgtgtgcagatgacgcaggatgttcagaaagctatggatgaaaggaggttccaagacgcggtgaggctcagggggaggtctttcgcaggcaacctgaatacatacaagcggctagctataaagttacccgacgatcagattcctaaaaccaattgcaatgtggccgtgatcaatgtgggggctccagcagccggaatgaatgctgccgttcgcagcgccgtaagggtaggaatcgctgacgggcataggatgttggccatttatgacggcttcgacgggtttgctaagggctag

SEQ ID NO: 128617 - DNA, 501 bp, synthetic construct
  misc_feature 1..501: note = Description of Artificial Sequence: Synthetic coding sequence
  source 1..501: mol_type = other DNA
atgaatgccgctgtgcgagccgttgttagaatgggcatttatgtcggtgctaaggtatatttcatctacgagggttaccaagggatggtggacggtggatctaatattgcagaggccgactgggagtctgtgagcagcatcttgcaagtgggaggaacaatcatcggctcagctcggtgccaagctttccgcacgcgcgagggcaggttgaaggcagcctgcaatctactccagcggggtattaccaacttatgcgtcatcggaggggatggctctctgacaggcgcgaaccttttccgtaaagaatggagtgggttgctcgaggagctcgccaggaatggacaaattgacaaagaggcagtgcaaaagtacgcctacctgaacgttgtcggtatggtgggatccatagacaacgatttctgcgggacggatatgaccatagggacagattcagctctgcaccgcatcatcgaggtggtcgacgctataatgaccacatag

SEQ ID NO: 128618 - DNA, 312 bp, synthetic construct
  misc_feature 1..312: note = Description of Artificial Sequence: Synthetic coding sequence
  source 1..312: mol_type = other DNA
taattcatctaccagttatatagcgaagagggtaaaggggtgtttgattgccgcaaaaacgtgcttgggcatatgcagcagggcggcgctccttctcccttcgacaggaactttggcactaaaatctccgctagggccatggagtggatcactgccaagctaaaagaggccaggggacgggggaagaaattcaccaccgatgactctatatgcgtcttagggatctcgaaacggaacgtgatatttcagccagtcgctgaactaaagaagcagaccgatttcgagaccgtatccatgcagcccccacgctag

SEQ ID NO: 128619 - DNA, 1743 bp, synthetic construct
  misc_feature 1..1743: note = Description of Artificial Sequence: Synthetic coding sequence
  source 1..1743: mol_type = other DNA
atgagcgactttgaggagtggatcagcggaacctacaggaaaatggaagagggtcccctgccgttattaacattcgccactgccccctaccatgaccagaagccagggactagcggcttaaggaagaagacatactatttcgaagaaaagccctgttaccttgagaatttcatccagagcatcttcttttccattgaccttaaagacaggcagggatccagcttagttgtggggggcgacggacgctattttaataaaagcgcgattgagaccattgtgcagatggcagccgcaaatgggataggcaggctagtcattgggcaaaatggtattctctcaacccccgcggtgtcctgtattatacgaaagataaaggccattgggggcatcatcctcacggcctcacacaaccctggaggccctaatggtgacttcggaataaaatttaacatttcgaatggagggccagctcccgaggccattaccgacaaaatcttccagatctctaagaccatcgaggagtacgctgtttgccccgatctgaaggtggatctgggcgtgctgggcaagcagcaattcgatttggagaataaatttaagcctttcacggtggagatcgttgattcagtcgaggcctacgctaccatgcttcgctccatctttgatttttcagcgcttaaagaactactgtctggtccaaaccgcctcaagattaggattgacgctatgcatggggtagtaggaccctacgtgaaaaaaattctgtgtgaggaactgggtgcaccggcaaattcagccgtgaactgtgttcccctggaggatttcggcggacaccacccggaccccaaccttacatacgcggcagacctggtggagactatgaagtccggtgaacacgacttcggcgctgcttttgatggggatggggatcggaacatgatcttaggcaagcatggcttttttgtcaacccctccgattccgtcgccgttattgccgccaatatcttttccataccatattttcagcaaactggagttcgcgggttcgcacggtctatgcccacaagcggcgcattggacagagtagcctctgctactaagattgccctgtacgagacgcccaccggatggaagttctttgggaatctcatggacgccagcaagctgagcctttgtggggaggagagcttcgggaccgggtctgaccacatacgggaaaaggacgggttgtgggcggtcttagcctggctaagcattctagctacacgcaagcaaagcgtggaagatattctcaaggatcattggcagaagtatggccggaacttctttacaagatatgattacgaggaggtggaggccgaaggcgccaacaaaatgatgaaggatttagaagcactgatgttcgaccgatcatttgtcggcaaacaattcagcgccaacgacaaggtgtatacggtggagaaggccgataatttcgagtacagcgatccggtggatggttccatctcaaggaatcaggggctgcggttgatattcaccgatggcagccggatcgtttttaggctgtccggaacgggctctgccggggccacgatccggttatacatcgattcttacgaaaaggacgtggccaaaattaaccaagacccccaagtcatgcttgcgcccctgatcagcatcgcactgaaggtgtcacagctccaggagagaaccggacggacagcgccaaccgtgattacatag

SEQ ID NO: 128620 - DNA, 1689 bp, synthetic construct
  misc_feature 1..1689: note = Description of Artificial Sequence: Synthetic coding sequence
  source 1..1689: mol_type = other DNA
atggtgaaaatcgtgacagtgaaaacccaggcataccaggaccagaagcccggcacgtccggtctcagaaaaagggtgaaagtgttccagtccagcgccaattatgccgagaattttatccaatccattatcagtactgtcgagcctgcacaaagacaggaagcaacactggtcgtggggggcgacggacggttctatatgaaggaggcaattcaactgatcgccaggatcgctgccgctaacggaatcggaagactcgttatcgggcagaacgggatcctgtccacccccgcagtaagctgcatcatacgcaagatcaaagccatcgggggaataatcctaacagcatcacacaatccaggtggcccaaacggcgacttcggaatcaagttcaacatttccaatggcggcccggcgcctgaagctataacagataaaatctttcaaatttctaaaaccattgaggaatatgccgtctgccctgatctcaaggtggaccttggcgttttgggtaagcagcaattcgatctggagaacaagtttaagcccttcaccgtggaaattgtggactccgtggaagcttatgcgacgatgctcaggtctatattcgacttctcagccctgaaagagctcctgtctggccccaaccggctgaagatccgtatcgacgcgatgcacggtgtcgtgggcccctacgtgaagaagattctatgcgaagagctcggggctcctgccaactccgcagtaaactgtgttccgctggaggacttcggaggacatcacccagatccaaatctgacgtacgccgcagatctcgtggaaacaatgaagagcggggagcacgacttcggagccgccttcgatggcgatggggatcgaaatatgatactcggcaagcatggttttttcgtgaacccgtcagactcagtcgccgtgatcgccgctaacatcttctcgattccttatttccagcagacaggggttaggggattcgcacggagcatgcccacttctggggccctcgaccgagtggccagtgccacaaaaatagctctctacgaaactccgaccggctggaagttcttcggtaacttgatggacgcttccaagttatctctgtgcggcgaggagtccttcggaactgggagcgatcatatccgggagaaggatgggttgtgggctgtactcgcgtggctgagcattctcgccactagaaagcaaagcgtcgaagatattctgaaggaccactggcagaaatatgggcgcaacttctttacccgttacgattacgaagaggtggaagccgagggagccaataaaatgatgaaggatctagaggccctgatgttcgaccggtcatttgttggcaagcagttcagcgcaaatgacaaagtttataccgtggagaaagctgacaatttcgaatattccgacccggtcgacggcagcatcagcaggaaccagggcctgcggctgatatttacggacggatctcggattgtctttcgcctgtcgggaaccggaagtgcaggcgctactatccgcctgtatatcgactcctacgagaaggacgtggccaaaatcaaccaagaccctcaggtgatgctggctccacttatctctattgctctaaaagtatctcagctacaagagcgcactggtaggacggccccaacagtgatcacttag

SEQ ID NO: 128621 - DNA, 1617 bp, synthetic construct
  misc_feature 1..1617: note = Description of Artificial Sequence: Synthetic coding sequence
  source 1..1617: mol_type = other DNA
atggttaaagtattccaaagttctgccaactacgctgagaatttcatccagtccataatcagtacggtggagccagctcagaggcaagaggccacgctggtcgttggcggggatgggcgcttttatatgaaagaggcaattcagttgatcgcccgcatcgcagctgctaacggaatagggcggctggtgattggtcagaacggaatcctctctacgccggccgtctcttgtattattagaaagatcaaggccattggtggcattatcctgaccgcatctcataacccaggcggccctaacggggattttggaatcaagttcaatatctctaacggcggcccagcccccgaggccatcacggataagatctttcagatttcaaagaccattgaggaatatgcggtgtgccccgacttgaaagtggacctgggcgtactgggtaagcagcagtttgacctggagaataaattcaaaccgttcaccgttgaaatagtggacagtgtcgaagcatacgccaccatgttgagatccattttcgacttttcagcactgaaggaactgctctcggggccaaacagacttaaaattcgcatcgatgcgatgcacggtgtggtgggaccgtatgttaaaaaaattctctgcgaagaactgggcgctccagctaactcagctgtcaattgtgtcccactcgaagatttcggtggccatcatccagatccaaacctgacctatgccgcagatttggttgaaactatgaagagcggcgaacatgactttggggcagcctttgatggcgacggcgacagaaatatgattttgggcaagcatgggttcttcgttaatccttccgatagcgtggctgtcattgccgccaacatattctccatcccttacttccagcagacaggggttcgaggattcgccaggtcaatgcccacttctggcgccctggaccgcgtcgcttcagcaacaaaaatagctctgtatgagacgcctaccggttggaagttctttggtaatttaatggacgcatccaagctctccttgtgtggagaagagtcctttggcaccggctccgatcatatcagggagaaagacgggctctgggccgtgctggcctggctgtctattttagcgacccgcaagcagagtgtggaagacatacttaaggaccactggcaaaagtacggcagaaacttcttcacccgctacgactacgaggaggttgaagcggagggcgctaataagatgatgaaggacctggaagcacttatgtttgaccgcagtttcgttggtaagcagttttctgccaacgataaagtttataccgtggagaaagcggacaacttcgagtattctgaccctgttgatggctcaattagccgaaaccaaggccttcgtctgatatttactgatggatcacggattgtgtttcgcctatcggggaccggatccgcaggagcgacaattaggctgtacatcgattcctatgagaaggacgtcgccaaaatcaaccaagacccacaggtcatgttagccccgctgatatctatcgccctgaaggtgtcccagctgcaggaacggacgggccgaaccgcgcccaccgttataacctag

SEQ ID NO: 128622 - DNA, 1098 bp, synthetic construct
  misc_feature 1..1098: note = Description of Artificial Sequence: Synthetic coding sequence
  source 1..1098: mol_type = other DNA
atgctacgctcgatttttgacttctccgctctcaaagagttactgtctggccccaaccggcttaagattcggatcgatgctatgcacggcgtagtggggccctacgtcaagaaaattctctgtgaggagctgggagcaccagccaattccgcagtgaactgcgtccccctcgaagatttcggcggacaccaccccgatccaaacttgacatacgccgcagacttggtcgagactatgaagtctggggagcatgatttcggagctgcctttgatggcgacggagacagaaatatgatcctgggcaaacatgggttctttgtcaacccgtctgacagcgtggcagtcattgccgcaaacatctttagcattccatatttccagcagaccggagttcgaggatttgctcgctcaatgccaacatccggggctctggatcgggtggctagtgccactaaaattgccctctatgagacgcctactgggtggaaattcttcggtaacctgatggatgcatctaagctatcactgtgcggagaagagtcattcggaacaggatccgaccacatcagagaaaaggatggcctttgggctgttctggcctggctgagtatactcgctacccgaaagcagagcgtggaagacatcttgaaagatcattggcagaaatacggtcggaacttctttactagatacgactacgaggaggtggaagcagaaggtgccaacaaaatgatgaaggacctggaggctttgatgtttgatcgcagctttgtcggaaaacagttttctgctaacgacaaggtatacactgttgaaaaggcggataacttcgagtactctgatcccgtcgatggaagcatcagccgtaatcaggggctgagattaattttcactgacggtagtcgaatcgtctttaggctgtctggaaccggttccgccggggccactatccgactctacattgatagctacgagaaagatgtagctaagattaaccaggatccacaggtgatgcttgcccccctgatctccattgctctgaaagtgtcccagttacaagagagaacgggcagaacagcaccgacggtgatcacctag

SEQ ID NO: 128623 - DNA, 1839 bp, synthetic construct
  misc_feature 1..1839: note = Description of Artificial Sequence: Synthetic coding sequence
  source 1..1839: mol_type = other DNA
atggctgcgcctgaaggaagcgggctgggggaggatgctaggctggatcaggaaactgcccaatggctgcgatgggacaaaaatagcctgacactggaggctgttaaacgtttaatcgccgagggtaataaagaggaactgaggaagtgcttcggagcaaggatggagtttggtaccgcgggcctgcgggcagctatgggcccaggaatatcccgcatgaatgaccttactatcattcagaccacccagggattttgccgttacttggaaaaacaattcagcgatctgaaacagaaggggatcgtgatatcattcgacgctagggcccacccctctagcggaggatcttccaggcgattcgccaggctggccgcgactaccttcatttcacagggaattcccgtgtacctgtttagcgatataacacctaccccctttgtgccattcactgtgagtcatcttaagctctgtgcgggaataatgattacagcaagccataatccaaaacaagataatggctacaaagtgtattgggacaatggagcacaaattatttctccccatgacaaggggatctcgcaggccattgaggaaaatttggagccttggccacaggcttgggatgacagcttgatcgactcctcacccttgctgcataatccgtccgcaagcatcaacaatgactacttcgaagaccttaagaaatactgctttcaccgatctgtgaaccgcgagacaaaagtcaagttcgtacatacctcggttcatggcgtgggccactctttcgtccagtctgccttcaaggcttttgacttagttcctcctgaggcagtgccagaacagaaagaccccgatcccgaatttccgaccgtaaagtaccctaatcccgaggaagggaagggcgtcttaacactttcatttgccctcgctgataagactaaagccaggatcgtcctggctaacgatccagatgcagacaggctggctgtcgcagagaagcaagattcgggcgaatggagagtgtttagcgggaacgagctgggagcactgttagggtggtggctattcacttcctggaaagaaaagaatcaggatcgctctgcgctgaaggatacttatatgttgtctagcactgtctcgtcgaagatcctgcgtgctatcgcactgaaggaggggtttcacttcgaggaaacactgaccggatttaagtggatgggcaatcgcgcaaaacaactcattgaccagggcaagacggtgctgtttgcattcgaggaggctattggctatatgtgctgccctttcgtgttggataaggacggagtatctgccgcagtcatttctgccgaactggcgtcatttctggcaaccaagaacctttctctgtcccagcagctcaaagctatttacgtggagtatggatatcatatcacaaaggcctcctacttcatctgccacgaccaggagactattaaaaaactcttcgagaatttaaggaactacgatggtaagaataattaccctaaggcttgcggcaagttcgagattagcgctattagggatttgacaaccggctatgacgactctcaacccgataagaaagcagtgttacccacgtccaagagcagccaaatgatcacctttacctttgctaatggaggtgtggcaacaatgcggactagtgggaccgaacctaaaataaaatattatgcagagctgtgtgcccctcccggcaattccgacccagagcagttgaagaaagaattgaatgagctggtctctgctattgaagaacacttctttcagcctcagaaatacaacttgcagcccaaagccgactag

SEQ ID NO: 128624 - DNA, 1359 bp, synthetic construct
  misc_feature 1..1359: note = Description of Artificial Sequence: Synthetic coding sequence
  source 1..1359: mol_type = other DNA
atgattactgcctcacacaaccctaaacaggataacgggtacaaagtctattgggacaacggcgcccagattatttcacctcacgataaggggatttctcaggcgatcgaagagaacttggaaccatggcctcaggcctgggatgacagcttgatcgattcctctccattgcttcacaacccctcagccagcattaacaatgactacttcgaagacctcaaaaaatattgttttcaccgtagcgtgaaccgggagaccaaggtgaagttcgtccacacatctgttcatggagtggggcacagcttcgtccagagtgctttcaaggctttcgatctagtgccccctgaggccgtgccagaacagaaggaccccgatcctgagtttcccaccgtgaagtaccctaaccccgaagaaggcaagggagttctaactctcagttttgctctggccgacaagacaaaagccaggatagtgttagccaatgatcccgacgcggaccgtttggccgtcgccgagaaacaagattccggggaatggcgggtgttctccggaaatgagctgggtgctctccttggctggtggctcttcaccagttggaaggaaaagaaccaagatagatccgcgctgaaggatacatacatgctttcctctacagtgtctagtaagatcctgagagctattgccttgaaagaggggtttcattttgaagagacccttacggggttcaaatggatgggtaatcgcgcgaagcaattgatagaccaaggaaagaccgtgctgttcgcttttgaagaagcgatcgggtacatgtgctgcccctttgtcctggataaggatggggtaagcgcggcagtgatctctgctgaactggctagttttctcgctaccaaaaatttatcgctttcacagcagctgaaagctatatacgtggagtacggttaccatataacaaaggcatcttactttatctgccatgaccaggaaaccataaagaagctgttcgaaaatctccggaactacgacggcaaaaacaattatcccaaggcatgcggtaaatttgaaatcagcgctattcgcgacctaaccactgggtacgacgactctcagccggacaagaaagccgtcctgccaacttccaagtctagtcaaatgattaccttcacgttcgccaatggtggtgtggctactatgaggacttccggaacagaacccaagataaaatactatgcagagctgtgtgctccaccagggaactcggatcctgagcaactaaagaaagaactgaacgaactggtgtccgctattgaggaacatttttttcaaccccagaaatacaatttacagcccaaagcggactag
